United States Patent Application Publication US 2014/0230087 A1 - sequence listing, part 12

SEQ ID NO: 9177 - DNA, 2309 bp, Citrus sinensis
  Intron number 1 from transcript orange1.1g048754m (locus o range1.1g048754m.g) derived from phytozome v7.0 (chr-ID sc affold00058; pos 185791 to 188099 reverse strand)
ggttaccgcgctgacgaggtccttggtcgaaactggtatgaaagctatttagctcgatttgatttcctggtttatttttttgtttggtcgatgagaaaaaaaatggatcagatgaaatttgttgtgattattcattagtgtttttttttcggttgcattactatgactaagtttttggttgaaatatgatgtgaaattttcatttttaagttgtagagtttgtatttttattttttattttttgcttgctctgtttggatgaggagcgaaggatggaaagaaaaaatccactggcgaagtatgcaaatacatagactctgttagttaagaagatgtaaagctcgtttgtataattattctttttgtttgaatctgtggcaaccttgggacaacttaaattgtatattccttttttgcatggtcgagggggtgctttgctcttttggtgccaaaatgaaaacaaatctagacaggtacagtaaagtatatctggtgcattgccttgagttttgtagctcaaataatgaaaaagaaaaatcacataagtcaaagttttcatgttctgattttggccatgaaggaaactagaagttagagaaagagtaatttaaatattcaatagaatgttcacatctcaatggaaggcgtttggagttaataaaatctgaaattatattgtggaaaagatcaaggcggttaactgctggagaagtgcacagaaaaagcaaataatctggtcaattaagcatcatagccatagactacaaaaatgtaaacttgctacatctgagaccctgttgtaccattgcaagtcaagccgtcttgcagttagcttgctttatggtgattaaatgtctttttaaatcaattgtttttatttttcagtttttaagctcttgaagataggaattgttgatggcatatgatagttgtatcagttcagcttactgcgcatgcccttacatgcttctgctgttgttgtgtgcaaaaccttgctaaataagccttcaaatataatctattttcagatcaatgtatgaaattgtgacttcctgtgattttgcctatcaatgtttatcaagtgcatggatagtccttaaaagattgaagtgagttacaatatctatgagtatgctgaatgatgacctttgtgcagtatcataaggttcgtctgaatatgtcttgcatgatgaattaattttcaaagttgtagttgctcaaggtttaactctttgttttcattctcaagcttgtagctacttcggtgttttgatgttaaacaatagagttgcttattggtgggcttaaattatttttttgacctgagatttggagcaaagtgatctaattcctcctggctccaaaatttggatgacctgtcttagtgggcccatcgactgtactagagaggacaaaaagaaagaaaacctcatattcaagaaagccgttgctcaagagtcacgtaatagttataaagatgagattaaatcaaatcagtgagagagctagctttattgttaacttgatggatcaataaaaggcatgatggaatgaggttttcaacagctaggcaggtgctgtaacttattttcttttgtatttgttacaaaagctaaaacttctactgttcccattcagtgagcaacttgctgtggagatttcttattctgctcactgttttctctgcttttgtttacttcattttatatgtatgaatttttatgggtagtctccctttcctaaacttccaagtagtttccgcttccctttaaggttttttgagacaatgtaatgtggttttctggagaaattttcctatatatacatatacaattaagtatatgaagactgcagtatctctttctttggtggtttgactagtgtatatagtgtagacatagttggaatctaacactgcttatcctctgtgctattttgtatgtatatgttatatggtttctctttcttctttttcctttctcctttccttttctttttctttcctcctaccaaatgtactcgctgtgctttcactactttgatctcttaaataataataataattgttgtatgcacaaaactttaaatattctcagtatttattttttttctttttttgtaacattttgatgtcagctaattccttgctttctttcttttttattttttcttgctttagggattaaattgatgtatttttctttcaattggaaagtgttgtatcttgtttcttgaagccactttgtctgagtatgcctttgtctttctgtttagtcggttcttacagtaccgggatcctcgtgctcaaa

SEQ ID NO: 9178 - DNA, 384 bp, Citrus sinensis
  Intron number 1 from transcript orange1.1g009645m (locus o range1.1g009645m.g) derived from phytozome v7.0 (chr-ID sc affold00001; pos 5583984 to 5584367)
aaattgcttattgctcgcgcagttaaaattctaaggtacgtatacggttggttatatttctttttcgtgggttttttcaagtactctggagtgtacggattcttagtaattaaggaagtgttatggagtattctagattttttgaatttttgacgtaaacacacactctaacgaacgtccaaaagtttaggaaggagaagatcactttagtagttagagcttaagttgatcgctttcaaaaaccaatattcctccattctgaggttcaactttttctatttctggttgagttttgtttatatttttcttattcatacttttacattctacattcttgaatgcatgaaagtttgacagcgtatcacaaagttctccacgagacga

SEQ ID NO: 9179 - DNA, 975 bp, Citrus sinensis
  Intron number 6 from transcript orange1.1g029239m (locus o range1.1g027286m.g) derived from phytozome v7.0 (chr-ID sc affold00015; pos 1832193 to 1833167)
ctcgagagagagatcgaagaattcttctacgtgctgtaagctcctacactgctattcttgatctaaatatatgtgtttctttttgccaagtgaagaaaaatttcaaatgctttttcattttgtttgcaattgatctttaccaactgcttttttaaggaggcaacttgtctgaatgacacaagtcaagccacattcatacttcaatcaaaaatataaatgggccctttctcagcgatggaatatcaaaatcatgtccaaaaaagtaaattaaccatattgttgatgctaagttaaattgttgagttttactgcatttgagatttgaactactagtaaaatcaaggttaagaagggatattttggggtgttcaacttctattctcagtacttgaatttatataattgtctttctgacaatcatctgaaacaatgcaatagtaagacaagacagttttgagaatatctttctgaagttttatgttagatggactatgaagattggggcattatcttccatttcaactgctttctgtagttttgatttgcatggttgactatgaactattgattagacaccagtgtcttatcccgtcttcccttgatattagaggggtggtggcagtggagagggcatcttgtttgactgtctgactgagacatataacttgctacctcttacctagtaggccaaaatcacagtttgaatagattaagtttccgtaggcaagtcctgaaaaaattggttgaaacttcagaagttggattactatagcttcatgaaggtgtttgaatcatcatattaaccagtctgtgatcttgaacctttttaattctaggaataaattgccttttgtgctcatattgagttgtggcttttttttttttctaaagtttaatttgcttagcattgaatgctatttattctaatagatggataaaggtaaatctgaaaattcagcaaaaaatccagccaac

SEQ ID NO: 9180 - DNA, 1025 bp, Citrus sinensis
  Intron number 1 from transcript orange1.1g004357m (locus o range1.1g004200m.g) derived from phytozome v7.0 (chr-ID sc affold00040; pos 800468 to 801492)
agagaaggacgcagagctttttgccttggcaagtgaggatgatgtgctaaatgaggttcttgttgatacatcctcagtgtaacttctgttttaattcaatcatttagaaattaaaatttgtaggatttatttaattcttttcactattttttctttcatttttgtacttcttttacttactctttagaagattttggggcagtcaggtcggagaaagagggacatggttagggaattgaatttgtattcctgccactgctcgtggtcatctcttgagcaattagtcatccttcatcctagcatgatttttggagcttctcgatatgctgaaaagaaaatcttcttgtttgtaaagatagaaagtggtgcatgaacagaatttacagaacaggaagaacgttgtacaatttttgtttctcaagtaatttggaaaattaatagtatttacaaaggggaaagttttatgatttctctgctgggttttagatgatacccttcatcttttcatgtctctgaacacaaaaaatgtttgtcatttatcttcaagagagtccaaatacttgtgtcagttaacgtggctatgttttaacttctattcattattcttcttgcttggacttccagtgggcttttgcaggcaatatttgcattcttaggcaatctaagagttttatttaatttggtttatgtgctgctaagcttggccattatagtcatgactgacgattgagttcattctgaaaggcacttagctttctgtctgcatagttattctgaatcagctgataattccccaaaacaagcttgtagaagtttatatgtgtgttgtttggatcatatgcagccccttcaagagaatgatgagaggtgtttgctggaaaatcatgctcaagattttcttttctactagaatttgatgtcttatgctagttcatattcctatttagaggatctgagctgctaaagtatcattcagttccaattatagattctgtgttctccattccagaacaagtaaagcttcc

SEQ ID NO: 9181 - DNA, 2418 bp, Citrus sinensis
  Intron number 7 from transcript orange1.1g000343m (locus o range1.1g000343m.g) derived from phytozome v7.0 (chr-ID sc affold00072; pos 138988 to 141405)
gctattttaaattcaaaagagttgacgtgagtagttacatatatatttctttttgttcccacttcaacaagctcattgtctttattatatatatgtgagaaacattttagatgaaaaatggaattcaaagatgtcaactagaagttcagtcattacttttcattagggtagtgatgccagaaagtgacaaagctcatagttttcttcattttttcccctctattgatgctagaaagtgaaaaagctcatagttttcttcatttttctctcaattttcatttcttatcctctccttaccttttgagtgggggcagggcagcaggaggtgttgatttgtggttaggatgaaagaaatctgtgggaaaaactggagccaatgttagaactggctcgtttcacttggcaacagctattgcttaatttatgaagaatttctcatttttattttctttggatagcatggacatacattatatagaggtggattgtgattctgtgacctagaaagtagaaattaaatgattcccgacttagcagaatggacctttttcttttccttaaatcaccttccttgaagtttcagacatcggactcacttgagaaagttcaaggtgaaattcatgttaggcagcttggtataaataacttggtaaatgacagacttgttgtgtttgtcagaagaatgaacactgtatttttttgaaccttattatacttggcaatcaccacagctgggatattttattccattgatttgtaattgtggctgggtttaagcttttgttttatggttggttatagtctcaacatagcaaaccttatttatgggatatttttgcactggtctggtgcattcataccatgctgatatgtgatgtgtgcaaaaaagctcagtgatgcatgttacaccttgttgccaatgaatcttgctgtgctggtatgtaaatgtttttgtttttctctttgtactctttttctttgctttttctggcattggattccaacctatattcaactctactcttccttaaactgcttatctatattattatctttacaagcccttaatctgtacttcctaatatttttgtatgaaatcaaatatagccaccagcagagacattcttgagtattcatcagtttattagtagcttaaattttcagatatctaagattaccaaaatctctcctcggacatcactgtttttatcatgaagatgcaaattacagtgccttatcttggaagagaaagatgggttttgtgtcctgttttattgtagtaaacttatttttgtaatgctcaatggaaattttaccttggatgggaacacggttgtcacaacaaaaaagttaaatcaatcagcaataaattcttttgatttgaacaactttaggtaactatttacttggaatgaaattagtgccttttttctatgctggccatggtaatcaattccttggctgaggtgaaggattccagcctcttcggaagagaaaggtgatctatggttcaatggaactttctcatggaaatttatatgtttttaatgagggaaaagacttctattaatgatagtatgtggtttatgacacatgctaactaaaaagttagaagttatgtctttagtcttagcatgcatcatatttctcattagtcctggttgggggagatgaaatgagaaaatgcctgtagttttagatttttaagcttattaaaccttgaaagtctctgttgagaaacttcaatatataagtctcttgtttcattggctgagaggagttacaccatgataatcggaagatttcactgaaggcaataggcttttggcatctgtttaatgaacaaaaccactaaaactagagttggattctgcataatgccaaactctaccactggtatctgtttgtggtgtgatcaggaagactttttttaaaaaaaaaaaaatttgatttaaagggaaaaggatttgtgaaccgttttggggataagttagtggaaattggaaagaggaaaattaagttggaatggaaaggttttgggataagtttataaaagaatgtaaatgaaaaaggaagagagttttgctgctcgggttctatacgctgaatagcaagaaattagaaaaatgaagagaacttcattgttaaatgcacaggcttttatagactgtattatttctagtgtttccatgctgttccaaccttgtcatcaaataaaatctagacgctactcttttaacttgctattttgttgtggtgcaataattttgattcaaatttctattatgagtaactacaaaatgtcaaacatttttaagcttgtgtggtactccttcgtctctttttttgtttttgtgtcttttcaacatgcatctaagtgctgcatatctgaatttgttgttgcagaccattgcattt

SEQ ID NO: 9182 - DNA, 1119 bp, Citrus sinensis
  Intron number 2 from transcript orange1.1g022306m (locus o range1.1g018954m.g) derived from phytozome v7.0 (chr-ID sc affold00030; pos 629700 to 630818)
ctaagacgccttccagggaatccttattgaaaaaggtaagggttttatgtgaattttttatcatatataattaaatcgtgcaacaggcatcataaattctgcgatattggtaatttatcttcttccatttacttcatttatttatttgtctaagattagaggcagaagtacagctggatttggaatttttttttgttggtatttagtgatttggttggttatgatttgtaaaacagtacaagttcatatcttttcagcaattggagtggcattttggttctgggttttaagtagggtttgaggtattatcttattgggagaatgtggtttgtagtgctatattggttaggggattaggagaatgttgtttttcgtgctatataattggttgggtcttgtaaggcattgttaaccctcgaagacaagtgtttggtgattttggtaattaggggacttatgggttggatttggagggaaaaactcgattaaaatagaagaattcattaacctcaccaaattccatgtgaaagaatcatgatttctctgatccactatactatatttttctggtcataagctacacttcctgagttcaaatgccaactaactgtagaattttgtaaggataaaccattgcatttgcatgcaaaaccatcatatttttaagcttgataaagtctatttcaaccaagagagcttgctgttgatattctgttcatcttatttttatgaaatgtccattgcaaaactctaaactcatttgtttgctatgtaattagttgcatgtcactagactatccacttgagcgtactcaccttagcccattacgtacattgacatttgaattaacaggtccaaggtataagctaataaatactttatctttcaaatctcacttataataacattctgaattaatatttcccttttaagatctctcgtttatatgactctgtcaacattcaagttttgctgtcgagagtattgtgttctttccaaaattttggttttggtgaggcatctctatttgctttacgtggtttgtcaaatgagaatttattatttttttctgttcatttgaagacaactgatccaaaaggtcggaacgcggctcaatc

SEQ ID NO: 9183 - DNA, 2412 bp, Citrus sinensis
  Intron number 1 from transcript orange1.1g002006m (locus o range1.1g002006m.g) derived from phytozome v7.0 (chr-ID sc affold00226; pos 18704 to 21115)
acacacattgagatccctctctctgtgtctttaaggtaccctcttcatctctttgattatcatttccatctgatcaggtcgaatttttgttacgattcattggatctcccaccacccttttgttgtttgctgatctgggtattttttatattgtcttatttttagtgggttgtttttgtttttgctctatgatgttttgatctgctgatctgaagttttatttgtttgtttgtttgtttgtttttgtctgttgtcttttagctgctcggtgattttcattctttgttggtttgctgctgttcattaataaaacttttttatatctttgttttatatgtgtgttcattttcattgccacttggatgattctattctgcaatagctgtggaaatgatgtgatttgttacttcaatgagagcttaaggatcttagctttgagttgagttttgcaagaaaatcagttgatttttttttttttttgagtgtatcagaagggagaactatgaatgctgattgatgaggctagtgcttcaaaatgtattgctattttcaattgtgaaaagttttaggacaagaagaatgctttgaatgctcttgaagagttggatttgaggatgcccatgaatgaatgaaatatagattgcggattgtcataagaatttgcattgattgccatgggactttgcaactttgggaatcctgcatgccaaattctgtttatacttgggaaattaggtgtcttggggttgtggacttgtagcataggtcttcctagtatgaactgtatagttgtttgaatagtatattcatggaaagttcacaagtctgggaatgtacatgtatataaacaaaaaggtgatcattttttgtgcatgagaattgatgatcctttatttatttgttatttttattcacttaattgaagcttggataaaatgccagatttctggtggaaagggataggttgtactggctgaaaagttggtatttgcatgactaattagagccttctgcttcaggctacatttttgcagaaatatgaaacttctttggaggtcaactcgctgaaacttctaacctaggtgatttgtttgattaaacctggattagttaagtgatgaatttctggaatgattatatgatctctgcatctatactacgaggaattcaattttttttaaggatttctcaaacaagtgattctatttggtggaggattggtaatgtagctacggctatggaagttaagagcatcttaggacattgtgatattgtgatgattttatgggatttccctgaaatcattcatgtaccagaatatatgaaggaagaaataaagaaaagggaatgaataatattgtttttgttatggcgtcaaagttcttatgtgctttagggttcttgtccacatgatgaaagttcatcctatttgttttctttttatggttatcaaagacttgatgcattttcctagcttttcaaaattgtccttgtaacttgacatgaattgatgatgacatttgattattttatcatctcaaggattgagtaagaaactagaattcagttggcttaaacttgaagggagggtcctgtaggttaggagggaggatagcaacgatgaccttaaaatacattgaaagagtatataacactttataaagtcctgcaaaaaataatgggatggaagcttggttcatctgttcaaatgctatctgtttgatgtaaaaatgagataagataaaatgaagagatgatggatgttgcaaaaatcagcttgactcgctattaaaagcgtggcatgctaagagttttggttgaatctcagatctttagctaatgaccccatgaaaaggaagagacccaatctttttgagaaaatgaagtgtgttaaatgttaattaagtaaacattactgtagctggtgtgtcaaagtgaagtgccttgcttttcttttctgttacatttatcattctgagcctttaataatgttttttgattggatagttagccttgaaattagataaattatgatcctatcaaaagtgaaataagaaaaaaaaaattagcttaagtctgaaattacagtaaatccattactcctgtatttgtctttaagtgatgattgccgcaaaataggcaagttcattttgtgtattttctgtttgtagcttttgcttatctattatacaggcaagaaacatatatggtccacgagtatgattattttaatgtggtaggttgttcatttaatcataaaacattacagattgtgccattttccatcttgcaattaaacgatgaacctatgttgtgatatttagttatttgcatattcttgatcctcttataatcttttgtagtttatctgttgcagtgaatattacagtttcgaggtagcaaaatcatcga

SEQ ID NO: 9184 - DNA, 2261 bp, Citrus sinensis
  Intron number 2 from transcript orange1.1g048819m (locus o range1.1g048819m.g) derived from phytozome v7.0 (chr-ID sc affold00009; pos 2192015 to 2194275)
ccagaaacatttctgtaaaacaagaggtttgcttccctgaatttcaccttattgcttgtggcagacaaaattttgaattttgcagtttaaatgactttttttactgactcccatatatgtttcatagctaattgaggcagcttgatcacttttatagtatctggaatctaaaaattgatgtttggtattttatgcaaattttcgttttaatatttcatgttttttttttccttttttaaaaaaagttgtctttggtagctccattgcacgatcttttctcatttccctttgggcctcctccagtagttagtttgatttaggaaactagatggggtctaaaagttgtgttgtttgccagctgaatttcaagctgggatacattactatatccaaaagttggaaacctggagagtgtgctggatgttggaccataaaacaaaacaatacataagttattgacaatctcagtctttttgggtggtttttcaagcacaagagggttctatgtagggctgggcattgagttcagtttggccaaccgaactgaacctataattttctattcggtttggtttggttctgttataataagccactgggtttcagttttcataaaccaaatggttttcgattggtttggttcataccaaaccgaactagaaaaccgcttggtcttttaacttctaaaataaataaaatcagaaaatatataattgaaaatcttgagccctactctagcccttaatttacgactctcacagtctcactcttagtacacaaacaaaaaagtttttttttatgtttaacacaagtgtataactaagtatataagcccacaagaaaaccacaataaagcccacagtaaatcacaataaagcccaacatcaaatatcacaataattgaactcgcacatccacctgggagactcgaactcttcatcttaaggttagggggagaaggtgccgaccaatccaacctaggagttgttggcaacacatacaaaagctgcacaaaccaaccctagaaattcacagttgcttcttgcctgcgtctctttgattccatcgacacttcccttcctcttattgctgcctttcttcttgagccttcactgcttgcctgccatcttctacttctgctgctgcttgcctgctgccgccgccgctttaatcactgctgtcgatagcttgctgcctctgtcacctgcccgtggctttctgcttccttcaccttgagtgaaattttttgttttgcctattaattcttttttgctttaattatttctttttgttcaattctttttagcattctgttttgcctattaattttttggaatggattctttggctctcaagcatccgaccttagtttttgttcaataaggtaccactgtccaccgagattaagaaagcacatatcataattggattttttttcggtgaaaattttgcattttagttccttttttcccattttaatccattatttattttttgttcttccttttagtccaaacaaaacaaaaccttcaaaactaactgattcggtttggtttgaatatttggtttgtattcaatttgaagtttcccaaactgattggttttggtttggttggtttggttttttcccaaaaaccaatccaaactgtacagttcccagagctagttccatgtcttatatttgggaactcagataggttaaattgataaacagtcaacccaacaggatgagtgaagaaaccatatcttccacatggctaatgatagacagtaattactaattgggctgaaaattaattttattaaaattccttgacacagagaataccaatccaaaatgattctaatacttcaattctttaggcatctaactaaaatgtgttctgttactagtttgcttcttttcagtttggtccttcagcctgttaagatctgctttattagtctttaacagtacacttctgttttaatatctgatgtgcaacttgaaatcttgtttgtgtcaacaatttgctgatctcctgaaattattactatttcagcttctgatttggggcacaagatagacaagatatatgccctctattaattttgtcaagttttttgtgtgctttgggtaatgatagtgtacttggttttaatggtaatattcggctgtcatttttacatctggtttccatatgtgctttagaatttcacctattgcatgggaatgatttttcttactcttatcataggaagagaattttgctattgataaa

SEQ ID NO: 9185 - DNA, 1325 bp, Citrus sinensis
  Intron number 4 from transcript orange1.1g013471m (locus o range1.1g010168m.g) derived from phytozome v7.0 (chr-ID sc affold00226; pos 134628 to 135952 reverse strand)
gggtgctggtatgatctaatatccttttgtctgcaatgtcagtcattcagtttgttgttttcctcatttgctttcttctctctgtcttctcaatgatttttcaagctcattattattttgcttatatttctcaagaatgaatgacatttttcagcatgttgctgtgattgttcttaccacccatttatatatgttattttgtccttttttctccttgcttggcttgaaatacaagttttttttaataaaaaatagaaacacagcttgacacatttatatatgttaaactggtttttcacattgggctgcaccaacacatgttgaaagtcgctgtatttcatgctgaccggtttaaaaacttgtaagtacagtctatgttaatataccaattttttttttaaattggctcttcaacgtataaggcacttttcatgattcaacagtccccaaaaaataaaacagaaagaaaacatttactggttatttgaggggaaaaaaattgatcttataacatgttattttccttgttgaaaataatgacactgcagtgatcaagtgaacaatctctactttaaacagaaaacaaaaacaatgacaaaggggaaatttatagcattgagtatatttcatatctcttatgtgcaagtctattgtcattatatttcttcaggtgtcaaattacaataaaattaaaaaagaaaaattgaatgacaatatctctgctgcatatttgtgcaatggtttcaaagtgccaaatatgtggtatggccagttttacaacatttataagcaggagattattgttcaacacctaatatatgttggttatcttaattgatattctaagccactcttataaactacaaatccatagaattatttaaaattagcaaaattttcctttgtgcaggaggaggttggtgtgggggaagatggatcagaagaaactgtttcacaactacaacctaacagctcatttggagaagtctctattctttgcaacattcctcaaccttatacagtttgtatctgtgaactgtctaggcttctacggattgataaacagtcttttacaaatattcttgagatatatttctgtgatggtaggaaagttttgaccaaccttttagaggtaatacaactatgctgatgaattaattgctactgttgaagttctacttttatgtttgtggctgtagtaggtagaaaagcataaccaaatatcactggatttttcatttaaacaataaataattacgtagtcaattttcgcaattacataattgacagggcaaagaatccaatcttcgacttaagcagctgaa

SEQ ID NO: 9186 - DNA, 1145 bp, Citrus sinensis
  Intron number 1 from transcript orange1.1g028578m (locus o range1.1g023441m.g) derived from phytozome v7.0 (chr-ID sc affold00034; pos 531723 to 532867)
ttcaaggagcttctagaggaattggccttgaatttgtgagtgtcatggtttttctttgacaccctttggaaaataattgttactacttggaaaattttgacgcattaggaatttgtttaactggtgagctataaaattatcaatttgaattcttggcttgatttgtttggttggattcttacgttttcaaattgtgaattatgtcatggtttgtctctttaatcttgcatgtatttctcatgcatattggccgtttgcaatgcagtttgtaaacttgacagctttccacttatcttactgctttgggttacaactagaatgaagttcattaaaattagtgttgatatatagctgtccaattttaatttcctgttaactagatgtaaacattgtttcttgttccctctttggtagattgtcaaatacaggtcacccatttagcagtatcttattttcgacacatcaacttcactagatttatggtattgccaagtactgaatatattgtagtcatcaatcgagatgaggtgttaaaaattccataactcttgttgagctttcaattaaggcttcacattgcaataatcattttctgaacttatgcagcctgtattttgaatttcaatcttgtgcaatcatctagtgtcctgaggatggcagacgtggaatgtgttattttatcaattactaggctttggcatgcacattttaggattcactttcctcttcctgagcttttctgctttaatgttgggttactgctgcatctttgtgtcggaggctgctctgttttcatggtgcatatcaagactagtttatctcatttcagtcatttgggatgaaatatttattctgtgccatcgtttacatatatttttaaggcatattgtcttcttgttatgcttgttctactaattttggatagtggtcatgctcaccagattatatacaattctgcaattatcaacctgaatgttttattaatttaatttttgagtgaaaacaatcatattgctggaagacatcacttgtttgtttgtaatatgctcgtgttgaatttaagaatgagaaaggttagtgaagccggggtacataatctttacatgttttctcctttgtataggctaagcaactgctggagaaaa

SEQ ID NO: 9187 - DNA, 2233 bp, Citrus sinensis
  Intron number 2 from transcript orange1.1g014616m (locus o range1.1g010848m.g) derived from phytozome v7.0 (chr-ID sc affold00501; pos 80207 to 82439)
ttctttcctacctcgtaaatcttgcttttacggaggtcagatttacctagcttaactgtttgctttgctttcataaacttgcgatacttgtgtcctgtgtaacatggtagtaagtaataaaaacttttgtgagatttgggtctctggtttagctatagatcagaagatgaaaagatggatttaccttctattcttatacatatattggtcttgcttttaagaagttccattgaaaagctatagtgaattgcattttttcaagagagaaggtcttataaaaataaacttaaaccggtatctaaggcatattgggacaaatattcgtttaaatggtctattcgtgggcccttcccactttcttgaaacctccttttgtagttctagatggaaattattttgtactctttagttaaacaatagaattgtgaaaggtgttaaatatctaatggtgaataaattagtttatgtggtgaataagagttttatcattttcttctttggagtttcttccttaaactcagtagttaaaggattacccttttcatgaagtaaattcagttggctttttaagtgatgaattgctatgacgattgtacttctattttaccaaaaaagttcttgcaggaaaaattgtcatatccttgctccttatacatctcagctggtgtgaaaggtttctcttctgcagttttgaagaggcaccaccatgttatatattggggtttgcattttaagaattccccatagacaaatcactaaatgaatctgtcattttttttttggcataatttagatgataatggcagtatggttgtaaatagcatctgatgtattcaatattttagtataattctcatattagagagaaataacatttgcttacttctgatttttgggaaaaagcagcagtgaaaggaacttgcaaaataattctagaagcttttctctaaaaaactgtgtcagtaaaggtgcaatttagttagcattctacaagcactgtgttttcttggaagcaaaagacaagagttacttgctttttgaatcatagtttaatttatttatttctttgatctgtttgtgataaaaatcctagtagcattattaacaagttttcaaacctcttctgttgagaagggttatattaaccttcatttaatacaaaattttcaagatttttggttccataagaacttttttgacccccccgaatacttttgtgaacttagaattagtactctctacatgggtcattgacggtaattgattgaccccgtggaagagtgcttttccttatttcacaatatattgctaatgtgctgtgtttgatgatgctataaatctggttccgactgcctcatgtttgggtaatggtatctaaggcttccactttaagtatttccttaactcttttgaattgtagcttggttgattcctttctttcaaatattttactgcctcgatatctcaaattttactttgctgcagtttctcatgttccggctttggcagcttttatctttctccgccaccatggaattttattctgtcctgagtcctgacaaaggtcacactttgttggtcttctgtatatgtgtctcaattcttaaaacttatttctggctattctgaaagaatatgcatggaattgctgctttcaagcattaatagggaatgcatttagtttggctggaagggagtgaattagttaaaatatccttgtggtgttccaatttgttgtactaatctatttagagatttgatttaattatcttgtccctcttttattattatcacacttttttatgctatttgtctgcatatgcttcacaaaagagtttttgaggaatgacttgatccagtgccccattttggagttagtttttacaaattaatggatttggctcaacttaagatgtaatgtcggtaactctgagatctttcattgacaactaaattatagaaatatgttctaccaatcagtattacctggtcgggaagtttggccggtggtccaattcttaagatgtgtatctctaaggattttatgattctagggttgagagagcgagtagtgagatggagccttgttggacgattgttggctttgagaacactttagctttctgagcatcttttaggccattgtaggtcttagattttctgttttgagggtgttcacatccagttttgtgtagctttatgacatgtatttgcttgggcaggtccctggaac

SEQ ID NO: 9188 - DNA, 600 bp, Citrus sinensis
  Intron number 2 from transcript orange1.1g043823m (locus o range1.1g043823m.g) derived from phytozome v7.0 (chr-ID sc affold00088; pos 222484 to 223083 reverse strand)
aaaacggcatcaatattcttgactcttcagaggctgtaagttcagatacacattacctatagatacatgcacgtatgcactgatggacaggtacctgcaaaccctcagaacctcaacccaaccggccactcaccacgaatagaatcttaaagtaaatgaacaatgttgtttttactcatctctttccttcagtttcaattttcaaaatcacctataacttagttgtcaacaatgcaaccgacgttttaatgtcaaaagcttcattgactcttcctctgcaatccggaggaattaaccaaaaaaaaaaaaagaaggattgtttcctggcgttgtctctaaaaattctacctccttagctggttatgtctttatcatcttgaagatttctattcctgagttatttagtaggaagatcctttgtttcagtggtcttgtctttacagccttaaattcataatgcaaaatattgtaacttttggtttcatgaagattaatatgttccttgtaactagatgttggtagctgcaagttctcttttctcttgaattctcagtgagtttcgatgattctttgcattttgtcttacagtaccccattcca

SEQ ID NO: 9189 - DNA, 672 bp, Citrus sinensis
  Intron number 3 from transcript orange1.1g010234m (locus o range1.1g010234m.g) derived from phytozome v7.0 (chr-ID sc affold00562; pos 104036 to 104707 reverse strand)
aaggcttttatcaggttggttggttcttctttttcccttttcctaagtagtcccctcaaattattagttgtttttgttgtgcaacagtaatggacatatttattgatttgtggctgttatattctttgaaaaataatgttgaaataatgaaaataaccagattgttggagtaataaaaattcactttctctggaaagtaatgccgacatgatgttttctttttagaataaccaaatcagctctttaagcttggcagcaactaataattgatctaaagagtcatagactgaagaacgatacccaaaataccggtctttgaaacatttatgggtaaaagaagccaatctagtaaatactcagctgagtgaccccaatgagttatgatcaagatttggttagtttagctgactccaccaaataggtgactgatataatgactgcatcatttggatgatgacgtttacagagcccggctttgtagttctgtacaaacaacaccctagactgctaatatcatgttattccagtcatatataaccactttggaagagattgtcagccgagtttaactattaaaccttgattattacattttattactcctggaattccgtcctaggttctaatgcatgagtttgtgctaagtgagtttttaacacctatctcaggtac

SEQ ID NO: 9190 - DNA, 1616 bp, Citrus sinensis
  Intron number 1 from transcript orange1.1g048606m (locus o range1.1g048606m.g) derived from phytozome v7.0 (chr-ID sc affold01250; pos 30028 to 31643 reverse strand)
attacttgggtcttgagtgtccaaagcctttaaaggtttgtttctgaacagcaatagttttcgataatttcattagtcattttgatcaagttgtctttctttggttcttttgtgatgttttagactcctttactgttgggctatgggaattttaatatgaatatatgcaagttgaaaaatactagatacgtttatagtaggccagctgtcttaaagtttcattttcaatagtgcttcatttcctgaatggttttcttctgccatgtgggattggctgaagaggtggttggtaattttctgctggcgttacttaattttagttatatgttaatgtctttgaatgagatgtcattcattcattcatttgctaaacatttatgctttttttatttgtattctttgatttcgagtgtggttggaattgaagttggatagttgtagcttaaaaggtatagcagtaaagtgtttgttagctgttgtagcataaaagttgtattaatatgatttttcacttgtataacggagaatctattatatttttaataattttgttaaaagtattatttataatttatatttactatatattattaacttttatttcatagttaaagttttttcctcacaacagttgtagcttaaaatttacagtacctcaatcccaaatgcacctttcatccgctatttaatcttggttcttatttgattcatttttgttcatttgtttgtttattaaaatatatacctctttgatttatacacttaaaattaacctacttttaagatttcaagagtgtgccaaggaggatatgacttcctatacaattccattttattaggcgttgttagaataaaatatcaagtctaagcctcaaaattagtgcctaaaatttcaatatgagatcttttctcagtttcaacatgcaaatctcttattcttagaacttacttgatgaatttggttcctaaaactttttaagttgagaaagatttatatcaagttcctctattttactgcatacttgatttaacctatgagaagtatgaagaaaaataacaaaaatgaagataaagacccattcaagttgcagctctgcaattaaaaaaatcgggttattttatagttaaagtgaactttattttttttattgcactaattttcatagtttgaaggaatcaaatttttttaattataataccgcaaaattaggtcaattatgtagatgccacagaaaacatgatcatgtcttttggcagctttgaggtttggtcacttgagtttgtttatgacaatagtactgtcttttgcccagtgaagagacacgtactgatttgtagccactaattttgattgagtcaatgcttctcattggaatatatgcagatgatgatgatgattgttatttttttttttgttattgcttgcccttaaatagtttgagtagatgcatgatattaagtaccaatgatcacagtaaaaacaaattttgtcagttgaatatcctcaaacttttagaaactacaagtgtttgattggttcatcagtgcatacgaaaagagctaacatttgctttattcctgatcatttttccatcattataggaaatccttaaact

SEQ ID NO: 9191 - DNA, 651 bp, Citrus sinensis
  Intron number 2 from transcript orange1.1g044023m (locus o range1.1g044023m.g) derived from phytozome v7.0 (chr-ID sc affold00016; pos 500205 to 500855 reverse strand)
acgaagaagtcctacttcaaaaaccgaaggcaggggtacgtcactttctgcagtgcctttgtttttagtaggtggtcacagtctgaatgcattttgttttgaattaacttcttgaagtagattagctttttcgtaggtttatatggtggtttgaaattttggacatagagttgaatgtatttttagaaatactagggattggtgacgctaataccagctaatttcaactgaaattttggacatagagttgactgtatttttagaaatactggggattggtgtgaataatacctgttaatttcaattcagaatttatgattctgtgttaccaaacttagtactaggaatgttctatactaagcatgggtaagtgataaaggaatcttgatattttatttacttcaatgttgtgttgaaatactgttgtcaactgttcccttgatatgattgcactaaaagaagctgcatgtttgtatggcttccaatttcttagtaatttctttttattctatttaccttggattatctaatgagtctgaattggcaaattttgttttatttgattttgaagattactagagtgatgcttttttaatgttcaccataatgattgcagcttctgaagcccgctttcacaattatacgggataa

SEQ ID NO: 9192 - DNA, 2462 bp, Citrus sinensis
  Intron number 1 from transcript orange1.1g046935m (locus o range1.1g046935m.g) derived from phytozome v7.0 (chr-ID sc affold00278; pos 11624 to 14085)
attgttgataactctatgaaatgagagttatcatggcacttttagacttaaatcaatactacttagagagtaaagcatgtgtttatattgcatttttgttatattttgcataaataatcattttagtcaatcttaataagttttgctcgatttaaagtaatttgtgctcaaattgtgtgcataattgtaggtttccagaagcttataattcatggaaggaatgttatgcaataggcttgcaaaaataaagaagaacttagctacaaaagaattgaaacaaatctaaaacagtgcagttgctgtagccgttgctatagcaacattgctgtagtcgttgctgtagcaatcctggaacaacgacagagaaaattctgcacgggataactgcataattgcgatctgtagtttcctaatctgacttatgcgcgacctaggcttccatttaccctaattttcaattataaaagaagcacacatcataagaaatggagggagccatcacccaaggagaaaaacacaaagaaacaaaagaaaaacaagattcaagagaaagattaagggctgcacaagaggaaaaattgtagagatcaattgggagctcaatctttcttatccttcccttgttttcgtgttttctatttatttatggagatgtgtttaatggctgaaactttgttctttatttttcttttgcaaatcatgaactaaatttatttgtagttgagtgataaacaatcttgatggtttattgactgaaaatatgtgttgctgcatgtttgctgtagcagtttattttgataatatttatttttattcattatttcagttgatcacccatttaatgatacaagttaggagagagccgcaaaatggcctatcttagtggaacatatcagagcaatacttggttttagattgagtttcctggattgagtttaacttattccaaaagggtcatgcttaatctaaaattagtgatgaactagacatagagattcaccttgtagggtaaatagaacctaagcgtgtaatgctatatcttatgttggcataacaactaatcactgttaggttgcatatagatataagatatccaacatgtgacggctgaggatacataaggattctgcccagtgctgtagcaaatactgcagcaactgagccaaccattagaaaatagtcaagaccattaggagagtttattcactcaactactatatattcccattagttttaaccttgagcttgacgtgatagtttactttgttgcattttatttattgcccttttattttaattagtatattagtttcattaattgttttattttatttttgcacaaaatctgcactgttaagattgttgtagcaaatctgataacatcaatccctgtggagacgatcttgaatactcatcactttattacttgttgtgtatacttgcacattgacaccaatagcattagtatttatacaccaacaattgtcgtcttcatgggcttaagtctcatgattgtcatacattgatgcaaaaactaccactattagcaattcgtaattgtttgcctcaaaatgttagatttgtcataattaggttgtgcctcttctttaattctttgtgttctaaggtagtagaacacaattctctagaccaattgcaaaaggaacttaaaatcaccttatataatttagaacaatctttcatacctaccttcttcgatataatggtccgtttaacagtccatttagtttaagaagttagattatgtggcccgatttaccttcgatggatgtatccatttgagagagaaatgaaacctataaagggttatgtacgcaactgataccatcttgaaggttgcattttagagtgctatattgctgaggaagcacttgaattttgtgctgaatatctttcaaattgtaaatcagtcggactacctactggttttctaattgattttacagtcaaaaggccactcgaaggtgtaaatatttaggtggttgatggccctacattagtgcaaacgcaccgatgtgttttggtgaacacctttaagattaaaccatacatagagtatgtgacttaaaatttgcacttttttttcattaagtttttttttcaattttattaattctgttgtataattttagggagaatttgaccttattgcaatcaaaacaccctcgttaattacaaaagcctttatggttaccaaccgagcactcatgtacatttgctgattggcttaaacaaaaggtcaaattagcttcattaggtctaataaaattatccaagtaaaggtaaacaaacttttctctttcaactaattattgtggtttcattaattgaacaataagtaacaactgataaagcaaataatgtagcggttgccgaaaaagtatggtggctggcaaacaaaccttgatcaagcgtggttacatatgaaggctactgtatta

SEQ ID NO: 9193 - DNA, 1339 bp, Citrus sinensis
  Intron number 6 from transcript orange1.1g045707m (locus o range1.1g045707m.g) derived from phytozome v7.0 (chr-ID sc affold00217; pos 75835 to 77173)
ctattggtcccattggacatccagcaactgctcctgtaggaatgggtggatacccattttacaaacattaacctagaccccatttgaatatggtaatatgcaagttttacctctgtttccttcttgtttctttttctaacaacaccttgttttctttctcatctgcaatcttatcctctggtttttgcagttcaagatatggagccgtggatttggaaacagtttactgaaagcatggatcaaaactcacaagcccttttcggtgacaaagtagctgaagttttgatgtagactagaagatgttattgttggccttttttagtagtctcctctgtaatttttagcttagagtattagaattgttgtatttgataatattatttaggagtgtctgttctgaaattgatattggtagagaagatggggctcgtagttacttggcaagaatttgctatcctccacttcaaaaagaaaaaataatgttcaattatctttttgttttggccttctaaagcgttttaaatttttccctctttgttccttttcttcatagacttattctttgatttggataatgagatggttaactaaaagaaatgctagaattcatataaacaattcctattttgaatttaaaccatatattaatagttacaggaaaaaaattgatattagtatattactatatggcaataattacatacaaaattgggatatgtggcatctacatacaaaattgggatatgtggcatctgggttcgctatttgatcttataaagtctcaaattttgacataaaatcttaacacaaatttagccatgtaaattaacctctcaataaaagaatcttataagtttaataataaatatcaaagtcaaaaacaatatttaatgatgtcaatttatcaaattttttttcttcattaccggaacttattttctgtttccattaagttagttattattattattattattattattatttggttgcataaaatattagtactttaaaaaaaaaactaataatcgtcttctttagtaaattaaagccccagtaaagtataaaccctgtgactcccggtacgaacgtgaagcctcatcgttcaaaatccatccgggaatcataacatgagcagcctctgaatcatcaaaaccacttctgctaaaacttcaaatcctgaagaagctccaaggtaagataggcaatcaaacattgcaattttattcgtatccattgagctacggctttgttgttttgttagggtttcatatctcatcgaaagattcatgattgatttgcagaagcgtagaatagcatctattctcggacgggtttc

SEQ ID NO: 9194 - DNA, 1354 bp, Citrus sinensis
  Intron number 1 from transcript orange1.1g011984m (locus o range1.1g011984m.g) derived from phytozome v7.0 (chr-ID sc affold00010; pos 1743410 to 1744763)
gtccaaggacgacaattctcctgtcaccgttgccggtaattttatcttattcttttaatctcaatctttctttcttttcttttttcttaactgttttattttttaactgggttcgtctttcttgtcgattttttcacattattttgttctgagcttgttgcaggatttatggttcaataatttgttttattgggcatgagtcattaaattgctattagcttaatcatccttattattattattacttcctaataggcaggcttttgttctttgagttagctattttgatattaattagatatatgttgctaataatgagcacattgagcaaagcatattgcatatatgctattgtttattctaccgaattattaaagtcttttttttggggaatgaggataactgtagcagctgttgagttgaatgcaggggcaaacatgcataaacagcccatgtctgtggagttactagaaagactcaattgcatccactcattcatggatatgcatcacaacttgtttcttctccattcagaaagggaagggctaggcctagtagtaggacacttggataaaggagctgaaattgcactcaaaattgctaagagttctctcattttccaaacatctcatttttgctgcatgagctttatataattcaagcttgaaatagaggaccaaatacagataagaggaaattcttttttcctcaatatgtgaaaatatttttttgtagtttaagggaaaaaaataaaaaataaaaggaaaattctcctataagccatcagctgtttatctggaaatggtttagagctctctaatatctatgtttgtaagctgcttcatttattcatctttgtttatgggacaaccattctccttccatggacatgtagcgtattcctctatttcaagggaaagcatgtggagtttcctctttattctcaatcatttgtaagccatgtgaattcacttgtttattattaaaactgactgatgctgtaattttgcctctgaagtgatgaagccgatgtcaaaatgcttagaataaattaccactatcagagaatataaattttaaatgttatacctgatctgatagttaacacaatcattgatttttgtaaaccttctcttgcgcgattgctttttcagcattttaatttatggatggggtttggattaaggtttcagtttatgtttctaatacataaaactagctaagagtagagctctcattacaatgaatgattctgaaagtaagcaatataatagtaacaatggttatggctggttttcatgctcacaccatgtaaacagattggagtgttcaggcaactgttagctggctactt

SEQ ID NO: 9195 - DNA, 1563 bp, Citrus sinensis
  Intron number 8 from transcript orange1.1g001905m (locus o range1.1g001111m.g) derived from phytozome v7.0 (chr-ID sc affold00035; pos 620531 to 622093)
aagctcgttatcggagatacaaggtttgcaaacttgcatgagtataccacatacgtactagttatgtttgtatgagtagttgtgatgcagattaggaatccctgttctatttaacttggtttccttattgtctaaagtttgttgttctatttcttaatagtttaagactttgttttctttttttctttatggtttaggataattactagtaatataagtagccatttcttgttgcctttgaaggcaaatttgagttaaataatattttcagttttcaaagtgtgtgtgaattttttagtttagttaattctcggcattttatggaatcaatgagtcttagaggaacctctaggttcacggtagtataaataatcatctcttgtagcctttgaagacagatttgagttcaataatactttcagttttcaaagctctgtgcaagtttatgagtttagttaatttttggcattatgtggaatcaacgaatcttaaccctctaggttcactgtattcttttgaatcaacgtgaatttagatcgtttctttattttggtattctcaagaatcaagaaaatattagaacattaaacttctttgcttctcttgttgtaatataacttacttttaaaggcttctttggccattgcgctagtgtttattgggaagcttataggttattgagttgttataatattttcttcttatctagtgtccaaatctctttagcacatgtttgggcgttagattaaatggcattctatgaaattgatcagattaatttatccatctatagataagaaatctgaacttaatccaacatcacccaaatagctgctatgcctcttagcccattaagttagtatagttaagacaacagtgagcaattttcatgttggtagatggtagtgcaatattaaaccgacctaatcatattacttcctaatggccaacaaacgaacttaaagtatacctgaaaatccggctccgaagatacgtaaattttggtcaaaagatgtataataagacataaactctggtcaaaagatgtataataagaaaggaaatcttaacaagtggcaaggttaaacaagatttctgagggcaatttgatttacagcttggttattgctaatccttggtgaaaagataaaacatgtttgatcaaaaggaaaagcaataaaagaaagtatataagaaacatttagaaaaatacattttaacatgatttttggaagtcagcttgtcaatttaggtttcctattttaggcattcctggtgttatttgtggggagtccttatgtttgggtgcttgacctgccctagttgatggaatgctgacataaatcttgatgctcctgttcacttggaaaaaccatcatggccaccaaggttctactcttggataagggagagacttggagatttcatccaattttctttaccttatcctttaacaataataatgcattatcaattctgtatttttgttttccataattctctttgcaaattgacaactcgacttttcaaaattgtaggcaaattgtgctgtttgcaaagcag

SEQ ID NO: 9196 - DNA, 4812 bp, Citrus sinensis
  Intron number 1 from transcript orange1.1g032966m (locus o range1.1g032924m.g) derived from phytozome v7.0 (chr-ID sc affold00005; pos 1444730 to 1449541 reverse strand)
aggcggcaatttgttggtttgtgtagcgctcattggtaattgatctattgctcattattatgaagctttatatattcatataattggaatttcatggttccatttaatttattggtgacaaggtgtcattgtaggctgagattgtggattggagttgttttgccttcaattttcttttctcttcattcaattcttggttacagaatcttgaattcctgtgcggagagtggaggtttgagataccggtagggtgtctgctctaagtctcctgtgttaattaacttggaactgtcaattaatcaggaggtgtctgactcattatttgcttctttttctgcgtgtacaacagtacaaatggtcgtcgtgcatttagaggagtattggggctctaagtttcatggattaataaacttggaactgtcaagtaatctggaggtttctggcttgttatttgctcctttttttttttgcatgtacaaccgtgcaaatagtggtcatggatttagaggagtattggcgctatctatcaaccggtttttaggactcttttatgttttctcctcctttttagcttccacaattgcctttctgaatactatgatgtccagctcatattttgatcttgcgtttttgcatatgctgcagcgatgtggaaatggtttgagtttttctggaagattgggattctggggatgtgttaaagagcttttctgaccccttcttagttccttattgaaaatttctagtcaggttatgctgggctatctcactacagcagggggtttttatggcttctttattgtttttccttgtctcacttccatccatcctattcgagtgctataaagttacagctcataattttgtctttcatttttgccaatttctgttgcagtgatgtggaaattctttgggtttcggtggaagattgggattctgctaatacttgagggtgtctaatgagtttttgtccatccttccttagttaatcacttctatctatgaaacttaaaatcaaattgcgttttgatcttttgatttacgcatacttttgtgtggcagtgttaaagagtatttgaggaataccgtgactctgcatctgggtgatgtttcatgagtttttttttttccctttggaacctgctcttagtttatcacttttatctatgaatacttcagtgcagattgtattcgggccatttcatttttgtaatttttacgtttcagtgttctagaaatggtttgggtagctgaggaacatttgggctctgttacgaaggtggcattcatgactttttcttagtttactgtccgtattgttgagcaaatcttttcagttttgcaatgttctgtggcagcaatagggaaacattccaagttccaagtaacgctgggagcaagttttgaaagaatactaggactattctactcagggggttttctattgtcctattttagtaatttttgcagtttaattcttctgtctttacctaactgaatccttgaggttcgtattaactctgtcttcattttttgcaaatttcttgagagtgatgaataagtgttttagcttgccaactctccaccttaggagtttctgacaactcccttgttctttcttgttggtagcttccatctatgcctgtttgaatactataagttcagctttcatttttgtgaacttctttcctatgatgtgggttttttccccctttttcaaaggtttgggtaggatttggggatgtcattcgtccctttcttagctgatcgcatctacaaatttatctatgaaaaacccaattgtattttggtcatttgatttttgtaagtgttatgttgcagttcttgagaaatggtctgggtatttgaccacttctaggggctgatctaatgaattttttcgaactttttttaatcacttctattcatgaatattttagagcatattgtaatctggctgtttcattttttgcaatgtttaatgttgcagagtttcagaaatggatttagtagttgaggaatatctggactgctgcaaagggagcttctatgattgaggaattttctgagttttcgaagaatcaattgaccatttcacttgaggagttgtctattgtgttgttcagtcatttttccagttggtttcttttatctctgcctaactgaatgctctgaagtgtaactatgtttgttgcaaatttcttgagcagcgatggcaaagtgtgttcagtttttttggagtattaaggctttctctccactgcaggggcttctgatgactctaattctttcttcttgcttctagcttctagcttccacatggctacctgaatactatgaggtttatctcatattttggtctttcatttgtgcatctctgttggagtgaggtgaatatgtttgaattgcttgtggatcgtttttaaatagattgaaattttgagtgttatggatttatgagtacatcttcgtgtttttgagaagtgttgcagaacgctattcaaggggcttctagtaaatgatttagcttctcaatgccttgctttagagtgtaatttgatcagtcatattgccaaattgttgttgcagcttgccagtagagaattgtttgtggacatctgcgaataaagagttttgttagtgttttgcggtttgcttgttatcttatttgtttaatttgttgatgagattacatcctgcaggtttgtgttggaatcttgtttgtttgatttcaatgaggttatatgcttcaggtttctgttggaaaatactctggccaatggtcaatatagtgagtggtttgtcttccgggttgtgattggctacagcaaggcttctgcaagtttgtagggcacaaaattccttgccatttgttgattatcacttttgaagcagctgctggaatcaactatttggcaacaataaatgggggtgtaagggaaacattctaccactagttattgagcctttatggattatccatataccaagtaaatatacttctgatgtttgtcaatattttgccctatcatcagattattcagtgtgttgaactttttagcaaatattctacatggaagggtgtccacgtgtggggatcataatgctggcacgcttatcttgcgtacttattttcccctttttttctctttgatgcatcgctctgttttttgagttgatcctgtgatccgttctatgatttgtttggttacagagaattgttatagctgttccattgccccccttttctctagttgaaagagagttttggtgtggtcgaattccgagtgttgttgggcagatattgcctattggttctatacctcctggactttgttttccctttttagcttgtcttggttgctagttagccctgtgctcattttttttttttggtttgattacagagaatgatgcttcagaatgatgttgctcggttgatgtttgtagtttttatggaataccaggacttttgtctcgtggtgtctatgaacattgagaacatattcgtgctttggtaatgccattttacaaatttttttgttgcagtgttacttaaatggtcagtgttttgaggagtattgggactgctactgctgtgtctttaatgggctttttctgacctttttttagcttatcacttctactcgtaatctgtaagagaggattgtatttggtttgttttctctcttaacaaatttttgagaagtatcgtggagcattttttagacattttacttagtttttaccactttatctttgaatactttaccttcattgtgcccctttagtttggcaattttttgttgcagtgagagaaaaaaatgttccaagttttcaaggagtataaggactattctacttgggtgattttctgacagatttttagtcctttcctaagtttatttgttctattctaacagtccagtttttaattatgttttccatctgttgcaaaattttggagcagtgatggttgaatgttacaaattttgagtgttggggctagctatcatctaagggggtgtttgatggcttttaaaaattttcctctaattccttcacaattttttgttgcataggtatggggaacttagttttcaggaacattgggactgttgacgtgggggtacctatgaacttagttttcaggaacattgggactgttgacgtgggggtatcttccgtgatttttagtcttttctctaatttattatatctatattcttatcttactctgttaaaatttaagatacattggggctagatattgactacctatgtcttgctattttggaaaattgtgttgcagtgatggcagtatgcactgagtttttgaggaatttgaggctatacattgaggagtgccccgatgagtgttttgtctcttatagtttctcacttctgtctatgtttatcctgagtacttgaagaatatatctcttatcatttatttggcacaattgtgttgcagtgttacagagttgccaatttttttgaggaactttggaacttgtacgtgtgaaatccataactaaaattttctctttctcttctgcaaacatatgttgcagtgatatcattcctgtgttttcaaggaatagtgggactatgctgcttgtagtgaccaatgggtttttcttccttcactaatttattattggtgtctcagactatctttcatttcttcatgaggttcaatttgtaattttgtctttcataattgtagtattccatttttgcaaatttatattgcagtgatggtgaatgttttgaggtatttcgggattatctgctgcttggggttttttg

SEQ ID NO: 9197 - DNA, 1308 bp, Citrus sinensis
  Intron number 1 from transcript orange1.1g004934m (locus o range1.1g004932m.g) derived from phytozome v7.0 (chr-ID sc affold00061; pos 201454 to 202761)
cagaaacaaaacccaaaacccagatccaggtttgtcctttatatattctctgaacttctttctagaagtgtgtttgattaagttgtaagctgttttgttatctgtttggttgctgagaaaggaaaacgaacgaaaaacaaagagatatcaaagtgttgagcttgttatttgtaggtttatcttatatggaaaaagattcagcttagctgagctgaagggctatattcattattgtttgagtgaagcgagaaagattgtttatttggtctaaaggtttgatttttcttaatcattgcatgcatttggagcctaatagcttaatgggtgttttaacttttgtcaaggtggtaaatggatgattttttgttgaagaatgagattaactgggcttaaaagacacgcaaagatgaaaagagttttaacctttatgtttggttgctgagaaaggaaaacaaaacaaagagatatcaaagtgttgagcttgttatttgtaggtttatcttatatggaaaaagattcagcttagctgagctgaaggggtatattcattattgtttgagtgaagagtgaaagattgtttatttggcttaaaggtttgatttttcttaatcattgtatgcatttggagcccaatagtttaatgggtgttataacttttgccaaggtggtaaatggatgatttttttgttaaagaatgtgattaactgggcttaaaagacacgcaaagatgaaaagagttttaacctttatgtttcctgcttccgttgttcttcctcaggaattgttaatctatagtaagtgattggtgttgtacttataacagtttcattttggtatttagtcataaatttttttgtgagaaagaatgttctgtattggttctgttttcttgaggataatgtatgctagaaatgaggtgatatctattgattttttttttcaatacccagagtattggatgattcttatttagtgtgtgataaattattaatacattattaatcaacagcttttattagtgtacttccaaaattttccctttcttctttctttgtcgttttcgtatagattttgtttctgaaatgtttattctttttttgttttctagtattaaaaaaataagtgattccatacgtgcacttagtatgtgctttgcgtgtcgtttacttctgattctcagccatgaattagaaagtctttatattgaataagtttgatgtatacactggttacatggactttttcctatctaaatataatattaatttctttccttcaaaacattgttgcaggctggttgtttcaggg

SEQ ID NO: 9198 - DNA, 2039 bp, Citrus sinensis
  Intron number 1 from transcript orange1.1g013899m (locus o range1.1g013899m.g) derived from phytozome v7.0 (chr-ID sc affold00009; pos 2111648 to 2113686)
aggcattgaagcttgaagaggagtttgaattgtgattgacaccatccaaatgggagagtaggagactcgaggtagaaatcttgcctactcatattggttcgtttttgtctggtggaattagtaggttacttttttcaactttgatgtatgtctgtgaatcttatagtacatgtaatactcatacatgatatttgaatttctttttgagaaatgattgtgcttttatttcaaattatctaatgtggatgatgtgtaatcaaatgaaaaactagacatttcatagccttgaagaaagaaataaaatatatgcagcacatagttattctgatggtgaccagttgctttttagaaacaaacgtgtttttgtgtatatttattttggcttgtgtatctcctgcttttgtgagggaaatagtctcccttaaattttggcttggaaaggtagtggatgttttgttaccaatagtttatttttatttatttttgtgtatatatatatgcataaagttgatttataaggtgtgcagttttgagaagtacatgtggcaaattctgtttctgttaaagaagcacctacaagtaatttagaatagactaatcacagcatttctgttaaaaaaaatttcataacatgagggtatgctttacgaaatgtggcatatcaagtttttcatatcatgaggaaatgtaccaagtaatgttaaattgaaagtgtagtagcacttttattgactctgtgaaattgatttactcgtttgctcatcctgataaatgaaaatataaccctgttttaacaccaaataactgtaatggatgtttcgatgttcatagttctgctttcttgtctgatcacatgtgccatctctttacagattgatggtttcgcatgcatgcattatattctgtattgttgaatacataactttgttttatgtttagaatttttatttatttatttatttacttccttttcagattcctttctcctaagatggtggttttagttggtttttttgaacaaagatgttttaggacattttacagacacaaaaaagagtgtactttcttctcttgggttaaatgataggggcgcagtaatcatttattgtccagctttagctgattacaggtttgtttgggttgtggataattgctaagttttcaagtccagatgccatcaagtatgatgtttcacacttttatgccaaatgtcttatttctttatatttaatgttttagtgctttaaccacataactcactggtcttaggctgctgagtttcggtgagaaatgtggagttttcgtttggttgggttgtgttaaatattgtgtcaacttgagaagcaaaagaattgccttaagagttggtgttgatgtaactcaccttgcttgcctattgtgatggtaaccaggaacttcttcaaccaaagtcattatttaaattgtattttgttggaaagagtagagatgttatgattctgattgcctgaactttcgtagaggtgaaagccactcccaccattttatgaatggttttatggttttggtgctccttttttaagtaattcatacttcggttgttatgtcatctctagattcagtttttgattatttaaaattgatgaattatgagcttgtgtgagctagctagtccttgttgatttcattgtcagggccgtgcctggcccttggttctcttttccccacctaattattcatttggttggcttgtgtgtttttgaataacatttggttggttgagatatatgaaacggttggctgcatcttgtagagagttattagggctgggtaatatggatattgttgatgattcatatatgcttcgtttagttgcttgcccctttttttttttatatggtgtacgtggaaaacactaatactacaattagaaggttactggtatttatgattagaaatctatttggattaccctaagttaagtcttatcacgacaaaactgatgatttccatcctccctaatcggagggatatcttctacattgacattggaagggaag

SEQ ID NO: 9199 - DNA, 3017 bp, Citrus sinensis; identical to SEQ ID NO: 8939
  Intron number 6 from transcript orange1.1g020490m (locus o range1.1g020485m.g) derived from phytozome v7.0 (chr-ID sc affold00264; pos 22011 to 25027 reverse strand)

SEQ ID NO: 9200 - DNA, 921 bp, Citrus sinensis
  Intron number 2 from transcript orange1.1g003174m (locus o range1.1g003174m.g) derived from phytozome v7.0 (chr-ID sc affold00633; pos 47573 to 48493)
ctgatcaaggtcatctcttccatcctacttaaacatataattacattcatagatgtcgtagctgttcttgtgtgtgttatttatgatagtttttcttattgttttttgtattatgtcttcgagtataacttttatttggtcctctcttggcacaattattatgatttgatggatatggtttgggtcaaaactcctgaattagtgactggttgagtttatttgtttgagtagcagttttgcggctagattttgtgcggttccaaattcgtggtcacctctcatctctgatcagagggttacagtaaagatagaaaccttatgctacttcaatcgcatgtgctgaggtttctgtagtcaaggagattttatgctgctgttaaatgagctaatttgcattcaccgtcttttcccccttaatgaatttttgatgaattatggtggctagagtataccaatttatttctgtaaaaccctacaagatttttaaggccagacaccatggtagatacagcacatctcatgtcatgctcatttatatgcagtagctctctgtccttttttatgcgtacatattctatacaagtccccttccagtgagggatccctcattggaaaattaatatatatatatatatatatatattgattatattaggctggattagtaattactttttcattctttattacttggaaaattatgggtaaatgtttcctctttttccattcttcaatttcgttgcagtgctgcatactttatgtgtttgacattttctggaattaaatgttagttcttgaattgttaaaattggaggaaactagtaacgaaatggagggtttcactattctgaggtttttattttttaatttgtggaaatattggcaggagctcattcatccaagggcctcaacacatttgaa

SEQ ID NO: 9201 - DNA, 584 bp, Citrus sinensis
  Intron number 1 from transcript orange1.1g047160m (locus o range1.1g047160m.g) derived from phytozome v7.0 (chr-ID sc affold00183; pos 181317 to 181900)
tctaaaaggcaagagtcaaaaattagtaaactatctaggaaaagaaaattacgattgcatctacatcttttcattattattgttattttattttattttttgtagagagattgttttttttttttttgatttatagagagattgttgaaagattacaaattatatatttcaatgcataattgataatatcactatattatcacaggttgtagaaatgaatagtactgttacgtagtaagtcttatttatgtaaggacgaaaataaataaatattttagcccttcaaactttttagattaagcaaaaaataataataataataatttaataactaaaattttttataagctaaaaaaataaacagaattaatggcttaactgaaacagttatcaattgaaaaagattacgcagcaaaattttttaatatagacattaatctataagttcagaaggctccttgccaccgcctcggcccccaccatacattaaatattgaatacgtatatatagatatctatacaattgcaaagaattaatgtttctaaaattttgaatcatattattgtaaatagcacagagtact

SEQ ID NO: 9202 - DNA, 2464 bp, Citrus sinensis
  Intron number 1 from transcript orange1.1g002001m (locus o range1.1g002006m.g) derived from phytozome v7.0 (chr-ID sc affold00226; pos 18704 to 21167)
acacacattgagatccctctctctgtgtctttaaggtaccctcttcatctctttgattatcatttccatctgatcaggtcgaatttttgttacgattcattggatctcccaccacccttttgttgtttgctgatctgggtattttttatattgtcttatttttagtgggttgtttttgtttttgctctatgatgttttgatctgctgatctgaagttttatttgtttgtttgtttgtttgtttttgtctgttgtcttttagctgctcggtgattttcattctttgttggtttgctgctgttcattaataaaacttttttatatctttgttttatatgtgtgttcattttcattgccacttggatgattctattctgcaatagctgtggaaatgatgtgatttgttacttcaatgagagcttaaggatcttagctttgagttgagttttgcaagaaaatcagttgatttttttttttttttgagtgtatcagaagggagaactatgaatgctgattgatgaggctagtgcttcaaaatgtattgctattttcaattgtgaaaagttttaggacaagaagaatgctttgaatgctcttgaagagttggatttgaggatgcccatgaatgaatgaaatatagattgcggattgtcataagaatttgcattgattgccatgggactttgcaactttgggaatcctgcatgccaaattctgtttatacttgggaaattaggtgtcttggggttgtggacttgtagcataggtcttcctagtatgaactgtatagttgtttgaatagtatattcatggaaagttcacaagtctgggaatgtacatgtatataaacaaaaaggtgatcattttttgtgcatgagaattgatgatcctttatttatttgttatttttattcacttaattgaagcttggataaaatgccagatttctggtggaaagggataggttgtactggctgaaaagttggtatttgcatgactaattagagccttctgcttcaggctacatttttgcagaaatatgaaacttctttggaggtcaactcgctgaaacttctaacctaggtgatttgtttgattaaacctggattagttaagtgatgaatttctggaatgattatatgatctctgcatctatactacgaggaattcaattttttttaaggatttctcaaacaagtgattctatttggtggaggattggtaatgtagctacggctatggaagttaagagcatcttaggacattgtgatattgtgatgattttatgggatttccctgaaatcattcatgtaccagaatatatgaaggaagaaataaagaaaagggaatgaataatattgtttttgttatggcgtcaaagttcttatgtgctttagggttcttgtccacatgatgaaagttcatcctatttgttttctttttatggttatcaaagacttgatgcattttcctagcttttcaaaattgtccttgtaacttgacatgaattgatgatgacatttgattattttatcatctcaaggattgagtaagaaactagaattcagttggcttaaacttgaagggagggtcctgtaggttaggagggaggatagcaacgatgaccttaaaatacattgaaagagtatataacactttataaagtcctgcaaaaaataatgggatggaagcttggttcatctgttcaaatgctatctgtttgatgtaaaaatgagataagataaaatgaagagatgatggatgttgcaaaaatcagcttgactcgctattaaaagcgtggcatgctaagagttttggttgaatctcagatctttagctaatgaccccatgaaaaggaagagacccaatctttttgagaaaatgaagtgtgttaaatgttaattaagtaaacattactgtagctggtgtgtcaaagtgaagtgccttgcttttcttttctgttacatttatcattctgagcctttaataatgttttttgattggatagttagccttgaaattagataaattatgatcctatcaaaagtgaaataagaaaaaaaaaattagcttaagtctgaaattacagtaaatccattactcctgtatttgtctttaagtgatgattgccgcaaaataggcaagttcattttgtgtattttctgtttgtagcttttgcttatctattatacaggcaagaaacatatatggtccacgagtatgattattttaatgtggtaggttgttcatttaatcataaaacattacagattgtgccattttccatcttgcaattaaacgatgaacctatgttgtgatatttagttatttgcatattcttgatcctcttataatcttttgtagtttatctgttgcagtgaatattacagtttcgaggtagcaaaatcatcgagtctttattctgtttgtgattataataacagtaataaagaaggattttgagg

SEQ ID NO: 9203 - DNA, 843 bp, Citrus sinensis
  Intron number 5 from transcript orange1.1g009193m (locus o range1.1g009193m.g) derived from phytozome v7.0 (chr-ID sc affold00048; pos 546139 to 546981 reverse strand)
gagggctccaaagatctgcttacctaccctttaaggtctgtatgacaggttttatatttgcttctgctcttctaaagttttaatattctgagtaacatccttaaatattaaaatcacagaatgctcaaggtaaaataattgggatttgcctgtcaggttattcatctgcgaacacttgttttagtcctttagcatgttacatgacttagataagggattcctgcgtttaaaaaaaaaagaaaagataagggattcctgaacaccaaaattaattatcttgatctgaaacttgagtcccaaaaatgtggaaggaataacagctatttgttttttgggttctctttacaaggactaggggccgaatatgttgtctgcaattatccacaaagtaaaaagaggataaagctttggagatgatgttactgtcatctctatctcttgcttgcaatgcatgtgtgagcactctcacgcagatacatgatttaacagcatgctttgttgtgcatgggttaagtgagattgcaggtctaagagtagaaaatgcaagtgctaccactttcttggcccatctcaaatgatgttacccacaatgctagttacgttataactacaaaagcgcctctctattatatcataactatattctctagtaaccttaacttggatctctctctctctctctcattatgaattatcagccaagatatgagagtgattgctctaatagttttgtttttatacacccaagggattatatgtcgtttgaagtatactatttagtcagatagtttattgttttcttatattattgttttaattaaacaggtgaatagttctggagtg

SEQ ID NO: 9204 - DNA, 1028 bp, Citrus sinensis
  Intron number 3 from transcript orange1.1g031214m (locus o range1.1g031107m.g) derived from phytozome v7.0 (chr-ID sc affold00153; pos 197773 to 198800 reverse strand)
aaatagattaccccaccgggccttttggcacaaaagtaagtgtgttttgctgagtacattgtataagacgatgttcatctttttaatttttaccattttaaaaccattagtatgcaaataactaaagtctggacatcaaaatataaatttgatatcattttgaatatttgttatggtttggccatgcaaaccttatttttcaaaggtcaagagaaaacatttaaagctggtggattaggttgctagcacagtggtaagatgagaagctaaatgagatttgaaattaaaatattaaactactgaacttgccatctttcacactcgccagccataccttggcagcttagcttagtagggttgtaaggttttagtgacaacgaattttttgagttatgtcttctgatttatatatctttacttggaaaaagttcataaagcttcttgtgctaaatatttatatcaactacaatattctgaggtataaatctttgcatggaacaaatacttctgtgtgcttggtgttgtccactatttgggtcaaactatcatgtgttttaagctaaatagtttctcaaatgaattaaaccttcatgtttaagttttgttactactttaattaatattcaaatctgtattcgttttccaatgtgtcgtttgttgacaggcaaattttttccctttgtcgtatggctttgtgatagtttttctattacagaggatatatcttatttgctggtggcattatctgttatctgtagcaatgttttggaagatagatccatatcttggtatccaatacaaattaaatgaatctggtgaatggatgacttaacaggcctttacaatttaataaatttagtacttgaattcattcttgatctgttgcacattaactctctactgtgttattattttctggttgaagtgatgtcagtctttgattaacacctagtcttacagttggtcatctttatgttcatttttcttgatttccttgtaggacgcacctgctgttgttaagtcatact

SEQ ID NO: 9205 - DNA, 2600 bp, Citrus sinensis
  Intron number 20 from transcript orange1.1g000201m (locus orange1.1g000049m.g) derived from phytozome v7.0 (chr-ID s caffold00161; pos 121070 to 123669 reverse strand)
ttgagcgttctggagctgctcaagggctgagtgaggttagaatgtgctgtttatattttacttcttccatcattatagtaacaaaactttaagtttatgatcccataattgataattccacctagttcactcaatggcttctggttttaagtcacctccattctttatatacagatttggcatttgagttaaaataaagggaaattatcactgcaccacctctattttgctttatgttcatccaatcactataaagttctaacatgttctctgcactacctttctttttaaatttgtatcaattagttacttttgcactaacaccgttaaataatttaaacgaaatgacaattttactcccaaataaattaaaagaccattttattttataaaaactttgaaaaattataattataaaaatacccctaaatttaattaaaaaataaatcccaaaattagaatttttatttttaataaaaaattataattataaaaataattgcaaacttttgggatttaataaaaatctcctaaattattaaaattagacttttgggatttatttttaattaaatttaggcgtatttttataattataatttttttctttttcaaagcttttataagataaaatggtcttttaatttatttagggtaaaattgtcatttcatttaaattatttaatggtattagtgcaaaagtggctaattgatacaaatttaaaaagaaaggtggtgcagagaacatgttagaattttgtggtggttggatgaatataaggcaaaacagaggtggtgcagtgataatttccctaaaataaatgaaaatttactcacatttgttatattacatagatagtaaatctcattggcgatgttcacttttgctcatctctttttgtgctaaaagtgcttggatagtagtttttacacacacacgctgatagattgtagcattatgtggaaacaatttcttagcttcttgttattgattgagaagaaattataccttgatcaggaagcacgttaagttttccatttatttggactgcccctacaattaattattcactttcacaatactcattattattgccttttatttagtaatatctatcgaaggttgacatttatgcaataataacttaccatttgagggtatattttcatatgctctttcagccccatgtagttttccccatgctttaattattttttcctgtgacttttatatttaatttttttgttattattcctgtttaagagcaacgggctatattagtttcgtgttgcattaacaaatggggatgtcaacaaatttgcaagctgtaatctattattatttattcatttgtggtagaaaacaaagtatgactatatgtataaagaatagacatttcgagaagtgacaagctgtcaacagaaataaagacaagctgtcaaaaaagtaagaggactctgaaaagtccttacaaatcattgtgactcagattaaaaatttatagcagtaacagtcccttggtcccaaattactgcaaaccaacctctccccagcaccccacttcctttgctctttttaatgccattgatgcttcccgactgccatcaacaaagaaaaatgaaacactgtgaaactctagttggtactgatcatgagtagtacaactcttctgtagtaatatcccaaaagatttcattccaagtgatgtgacattcatccattcatattaggatggtaataagtaatttaatcagttatgaaaatcttttaccattctattgatgattgtcgcaccctttgggatggaatctattggttattacttcagaagtgtagtattgtggtactaactatacttcagaagtgcagtattatggtactacgttcatggcggtgacataattgtattttattatgaaaattatatggctatatttcaatgtttttcttttttgttgttaacatgtgtatgtcttaacattatttttatgcaatatctagcacactgcagaagaaaaagatttggtaatattgcatataattttcagaatacattcttatgggagagggtttcggggctaaaggttttaagggctggtccagccttgtacaagggtggatggatatactttttacagtgtagtcttaacctgattttgatatacttttgtgtagctttttgttttgcttctttttgcgtttttgctttcttagtggacacaggcttcatattacagatgtactgatagctcttattaattgcatttttcagttcttattaataaaatttaaatatgtattagtaggtgtttggcagtcaacatgtcaactgaaataacaatagtacttgtaattgtgattttgtaagttatcaatttggtgctttatgtgggattggttttggcaactgatcacaagttcatttgttttgacttaaatgttttcctagtaaggtgtttcattctctttgataacaaagatgactacaaaaattttaagaatgactctttttgtaaattattaaatttggcatggttgactgaaggagatccatgtattgccaggttttagctgcacttgggactgtgtactttgagca

SEQ ID NO: 9206 - DNA, 815 bp, Citrus sinensis
  Intron number 2 from transcript orange1.1g010394m (locus o range1.1g010394m.g) derived from phytozome v7.0 (chr-ID sc affold00007; pos 1875983 to 1876797)
atcaccacaacggacccaagtaagtgcaagcttctagcccactacatgatggtttaacttgaaaaggcgtggatattgttttttgcgtaggaattttcgtacaattaatgatatgattttagtagtttttatatatctatagtttgtagttagtgattcatctgctaaatttcaatagggttaatttttctgacatctgtagttcgtaaattgaattcttgttgtgggcaaacatagaactgactaatggggaagttaaagatggatagttgtactagaaatttagtttattcttctttgcaactgagaagtgtcttaaactagaagtagtccacaaaagtaaagcgatgaagatagtggcaccttccaatcacaatcttcaggggattctcaagaggcaaagctgactgcaaaatagaaattttgtgtgattccttcctgacagaggcacatgggttttttactgattggaggttgaatattgatcctggagagacactgtttggtttaagtagggaaaaatcatttcgatttggacaacggtttgtgtattttgtgagccccattgtgccatgataatgttatgagataatggaagacccgggatctgattttccttggaaataacttgtttcttgcatgtatgttattgaatgcaacttcactgtttgcctgtatgcacgggaaggggttgatccaagatggggtccaagctctttgttatttggctcctgcttaaactgccatgtatgtgtgtgtgtgtgtgtatatatatataatattacattttctgattgtgcgtccttttgcaggtc

SEQ ID NO: 9207 - DNA, 1820 bp, Citrus sinensis
  Intron number 1 from transcript orange1.1g024172m (locus o range1.1g023147m.g) derived from phytozome v7.0 (chr-ID sc affold00348; pos 125665 to 127484)
catcaatctccgatattctgcggccaaactatccggtaattatcttttcatattgaaggtcctttctcagatccaaatcaatttctccttgcaaatatatattcttgatctgtttttgatattggttaatagtgaatatgtggatttaaacatgattctgaggctgtacagttaaatgggtttttgggaattaagttttcagtgatcagaatctgaaaattgttgtgttttgagctttcacggctgatttgtgaagtagggttttgttcttgtggcttgtagaggcctaaagtttgtatcttatttcttggggaattgagagtggatttcttttttggcaagttatgcatttttataattgaaatgtcgatcatgagaagaagttgaattgagtgatattaatgttaatgtaactgttgaatgtcttaggagacctactgaagtttaggatttggttttttcttgagaatgctcgacaatgacaacttcttgttgagatggatttggattcttgacaatgacaacttcttgttagatatgagatgccatttgataatcgtagctggtttacgatttttcgtatgtgtttgcatatcagtttctttgtacaatttatgcttgtttttgtattttgaattcattgacaccaaagtatatacaatttggtattttttgaatttacttctaagaaactagccctatattttcttagtgattttgctttgctttttcttttttgatttcgggtaactgtagtttgttacaccttctgcttcaatagtgaaatgttatcattattgagcagacacttgtgtctagttgtttcctacgaaagggtattctggaccttttgcttctgttgagttcttaatgcatgttgaacacagaagtgtcttcagcagtctaatttgaataatagaaattgttgtttacggtttttggtagaagctgtagtgatgaaagttcaatagaggagtcaggtactgtaagttcttttagggatttgaattttcttttgatttgatccctttcttcttcttcttattcaaatcacaagttaatgattctttcctctttgttggtcctaaatgatgcaggagctagggcttctagaggaagagaaagttcagtataggatattgtaggagcactgtgcaggtttatgtaactaaggctgttcaagtgagtttaggttttgttttcatttttcgaatgctatagatgtacatataggattaggattgctgttatgagtcaagaataatgtctattagagttttgagattttgaatctatataggtacaactgttcaagttataaagacttacaatgatgcttattcttgctaataaaaaataacaaattatggcgttccccacattttcctagggattatgatttgagaagagttgttgagattttaagggactggtgcattttactgccattttctgactcatggactatagggaatgtcctttcttagttatgtgatttctatgccaacttctgagaccactttacatttttcttttatgaataaagaaaaagtgtgctctcaatctagcacccaataatatgctatctttgggaatgattaaaaaaaaaagaagagagagagagaggaatatgtctaatcacgtggtaattgttactgatgaatgtattggccatgcaagactgcaacaataataaaatcatttgaggttaaccaatatgggaatgagaatctgttgctaagagatgtagaaacttagggagatgatgagtttagatgcttctcaaagcttgttctgactgttattttctgattacagaa

SEQ ID NO: 9208 - DNA, 2405 bp, Citrus sinensis
  Intron number 1 from transcript orange1.1g016378m (locus o range1.1g016378m.g) derived from phytozome v7.0 (chr-ID sc affold00058; pos 305529 to 307933)
acttctccagcttcatcaggcaactcaatatctatgtgagctttgttttgctcttatgggaaattttacatttcagtttttgctcctatgcgactgttgtttttatttttctttcttggaattatgtggagattttttgaaatgggtgtttgtgcttgtgttgggattgttattgggttagtgagaattctctgttttttttttgagtaattacatcttttattatgagattctggatcgctttttaggttgtgctctaatctgtgttcttcttgttgttttgttggctttctgaaaaaattgctcattggctctaagaatttgaataatttgtaattttgttcatctaatctattagtaatatagaagttgaggaatttgcgacactgctttctgacataaattttggttcaagtcgagtgaactgaatactatgatgtattaaatcatgcaaggaaaactcaattgatttaatggtattcttttattcacttctactttttgttttgtttaaaaattcttttttattgtctgaacttttagtatcgaagaccactccaatgcttaacccttgatgcttgttgaacctcatgggtcaaagtgttgatatagtctggttttggtggctcgtcgttctatatcttttagtacaaattcctttcaaatttttataatattcatgcactgatctttgatacctacaaaatagaatatttatatcacatctctctgattttccgtgcataaactatgttccttaagagcaattctcttggcattgcggtgcctacttgttgcttttggcttgacctgttccagaattctctctttatgtttaaagaatctttcaattctgttaattaaggatgggaggatgcagggctaatctggttgttagatgggtttaccaaagatttcatgtttgttttgataagcatcaattttcctacactttatgagatattttccatgattcatgatgagcgtttataagattggatgaagttctccttcttgaaagtagtttattttttattccatttgattcagttgaaagtttagaaggttttcgagtgttaggtgattgctgcagtgacttttattttagctcccgaaagatgtgtttaatgagaaacagaaacaaattggtctttcacaactatggttcacaatactttcttgattgtggtagtatgcattcaattattggggatgaatgttgttattaggcagttatttcttgcagtccttgtctgctaattaggagtgatgtgtagactgttgtgttggaaattttttgtataggtaacatggatagcgcttaattttttttcagttataactgttttggctaaaaatattgtgtaccattgaattcttacataaccttgttaaggttgataatgatgggtgaaacctaatgcccttactatgactctagggcattcattcccttttattctgaagtatggaatctgccatagtttgtggcattaagcaatgattgtacagagcctaattgtttcttgagttattaccattgacttttgcaaggttttaagattcatattaagaaattgaattcttggactaataactgcttggtcttaaatatgccagttgatagtcccatggttgcaatatctgagatgaggagagggagggccatcattctccttgtcatttgtatggcagaaaggacggatatgatatcattctctgtaacttcgagtgcagaatctgaaatggtcacaataaagtggaagcataacaaattttgataaaatcagatttgttcttttttgaatgcgagaaatgtagtttcctgatctgtggttattttttccaaaagggaaaaaaaaatgcaaaacttgttctgtcttatctttttgtttccatgacctctgagtctctgaccttattagtgacgccttcttctagccatgatcaaaagcacaatcatcttaagatatctgttgatggcattttttctagaagttttaacagttcattgtccttgcttgcatttcttaatttgatatctctaaccgttggataattttagatcgtgtcatcttcagacattaccgttagataagagtaatgttccagaagtcctccttaaggacggtgggagcatcttttgttgtaggtaataagtgtaattcgttagtcacaagacccagttcaggctttcaataagggctactggtaacaacagtatttgcttatgtaatagcagaaattcatgtgttgtcttgtgttcggtcacatgtctgagtttgcacatgtgaatgcatgtctttgaaattaaattatttgaaatatcagttatcgttgaaacaattacttacttttagcttttcccaggggtttagaaaaatcgacacagaccgttgggaatt

SEQ ID NO: 9209 - DNA, 2398 bp, Citrus sinensis
  Intron number 1 from transcript orange1.1g002005m (locus o range1.1g002006m.g) derived from phytozome v7.0 (chr-ID sc affold00226; pos 18704 to 21101)
acacacattgagatccctctctctgtgtctttaaggtaccctcttcatctctttgattatcatttccatctgatcaggtcgaatttttgttacgattcattggatctcccaccacccttttgttgtttgctgatctgggtattttttatattgtcttatttttagtgggttgtttttgtttttgctctatgatgttttgatctgctgatctgaagttttatttgtttgtttgtttgtttgtttttgtctgttgtcttttagctgctcggtgattttcattctttgttggtttgctgctgttcattaataaaacttttttatatctttgttttatatgtgtgttcattttcattgccacttggatgattctattctgcaatagctgtggaaatgatgtgatttgttacttcaatgagagcttaaggatcttagctttgagttgagttttgcaagaaaatcagttgatttttttttttttttgagtgtatcagaagggagaactatgaatgctgattgatgaggctagtgcttcaaaatgtattgctattttcaattgtgaaaagttttaggacaagaagaatgctttgaatgctcttgaagagttggatttgaggatgcccatgaatgaatgaaatatagattgcggattgtcataagaatttgcattgattgccatgggactttgcaactttgggaatcctgcatgccaaattctgtttatacttgggaaattaggtgtcttggggttgtggacttgtagcataggtcttcctagtatgaactgtatagttgtttgaatagtatattcatggaaagttcacaagtctgggaatgtacatgtatataaacaaaaaggtgatcattttttgtgcatgagaattgatgatcctttatttatttgttatttttattcacttaattgaagcttggataaaatgccagatttctggtggaaagggataggttgtactggctgaaaagttggtatttgcatgactaattagagccttctgcttcaggctacatttttgcagaaatatgaaacttctttggaggtcaactcgctgaaacttctaacctaggtgatttgtttgattaaacctggattagttaagtgatgaatttctggaatgattatatgatctctgcatctatactacgaggaattcaattttttttaaggatttctcaaacaagtgattctatttggtggaggattggtaatgtagctacggctatggaagttaagagcatcttaggacattgtgatattgtgatgattttatgggatttccctgaaatcattcatgtaccagaatatatgaaggaagaaataaagaaaagggaatgaataatattgtttttgttatggcgtcaaagttcttatgtgctttagggttcttgtccacatgatgaaagttcatcctatttgttttctttttatggttatcaaagacttgatgcattttcctagcttttcaaaattgtccttgtaacttgacatgaattgatgatgacatttgattattttatcatctcaaggattgagtaagaaactagaattcagttggcttaaacttgaagggagggtcctgtaggttaggagggaggatagcaacgatgaccttaaaatacattgaaagagtatataacactttataaagtcctgcaaaaaataatgggatggaagcttggttcatctgttcaaatgctatctgtttgatgtaaaaatgagataagataaaatgaagagatgatggatgttgcaaaaatcagcttgactcgctattaaaagcgtggcatgctaagagttttggttgaatctcagatctttagctaatgaccccatgaaaaggaagagacccaatctttttgagaaaatgaagtgtgttaaatgttaattaagtaaacattactgtagctggtgtgtcaaagtgaagtgccttgcttttcttttctgttacatttatcattctgagcctttaataatgttttttgattggatagttagccttgaaattagataaattatgatcctatcaaaagtgaaataagaaaaaaaaaattagcttaagtctgaaattacagtaaatccattactcctgtatttgtctttaagtgatgattgccgcaaaataggcaagttcattttgtgtattttctgtttgtagcttttgcttatctattatacaggcaagaaacatatatggtccacgagtatgattattttaatgtggtaggttgttcatttaatcataaaacattacagattgtgccattttccatcttgcaattaaacgatgaacctatgttgtgatatttagttatttgcatattcttgatcctcttataatcttttgtagtttatctgttgcagtgaatattacagtttcgaggt

SEQ ID NO: 9210 - DNA, 1158 bp, Citrus sinensis
  Intron number 6 from transcript orange1.1g019172m (locus o range1.1g016486m.g) derived from phytozome v7.0 (chr-ID sc affold00212; pos 137591 to 138748 reverse strand)
actgtaatcaaagcaaaccaacagaagtaagttgtctatgcacatgtaggcagtaatagggctatgtctgggcttctccttttgtcataaattaagaccaccgctaaattttttgcttaaataatctggacaggttcagataatttactcatttattcatattctaaagtagagaacatatttcaaaaatgccaggtgctcagcattcatgacacattcagaattctaagcaagaatttatacttaggattgtatctctgcgtccaaatgctactagcggtgtaagctgccatatgcatgaataatcatatggtcaaccatttggtgatcttggaacccagctttttgaagttgtttaactagtgaatttcttttatcaaacacctattattgttttatatagtgttacttttctaaaagtagcaaatcttggataacaggtgcatagaggagactagcatggtttagaaaaccctaggtgaatgatgtgatttcactgtcaagatggatggcggaaaaattaaaaagaataataaaataagataaatttaaaaaaataaaaagggagagatgatcaggaatcgtcaaatcggattttgatatgtagttgtggtagtttgcaagctccgctcaccacttcttgtttcagtagcagacatggttgctttactaatggtaggacatgtctgttaatcatctagaacaagcaataagataagttaaagatctaaaagggtccttttagtgattgatctttaaggaaatgtggatgtgcagtcatagtgcttaggatcttatgctctattatgtcaggagtttttctacaaacttaagattttgattgaaatctaactccgtttgatatcaaagccagttcaacaaagagttttattgttatcttcccacatatttctatttgtatttaaagaaatatctgtatctgcattcatttctgtatggttatgatccatatgagaagccgctgataaattcccgtcatgcacttgaggaagcttatttgtatcttaaaacttttgattcaaataactagtaactcaacacttaaaacttgggttccaaatgaaatcaaacagctttgttgattgcttatatattttaacatcttgataagcaattaattaaagctattcaatacag

SEQ ID NO: 9211 - DNA, 4821 bp, Citrus sinensis
  Intron number 2 from transcript orange1.1g007794m (locus o range1.1g007242m.g) derived from phytozome v7.0 (chr-ID sc affold00166; pos 124039 to 128859 reverse strand)
tctacattttgaagagaaacaatttaattcacaaggtacttgtatccttatccttcacgtgctgatattattcttccttaatttctcataactcacggataccaccgtctccaagaaaatatatatttatttaatttgatttattctttaaaattccatgttatttttttttttttactgatatttgaaaaagaaaaaagcccaccaggatgatagaaatagtatttttaccgtccgtccgtcaaataggataacactatgatacattaaaacgacgcattgtttatacacagtattgtcgtttctgtcttgctagtatttgaatattatttttccttttagttttggttactatgtagttaagctgacctcaataaaccaataggtgggttaattagtagataattatttgctttgcattcactgattaggaactgtggttggtgtctaattactttctggttttcttttctattctattctcccccaattaataaaaattgaaaactcgtcaagatttcagatattataccgacctaaaattcaataaatttatacgatttttatgccgaatggaaaattttaagataattgacagggatgattaagtaacgttcaataaatgaatctgattattgtttataagttaataacgcaaacggtggctggctggacggaggccatcgccgccaggtgttctgactctatgcggggaaggaaggacgtaccaaactaccaacaaggtgtttgttgcgggggggtcctataaatagatttttgggtgagataataacacccccacttttagtatagtgacatcccacttacgactccttttgtttttttgttgcatttacaattttatcctcaaacaacaacttcattctttttttcttttttctttttttttaatcacgaggtggttctgagtgggccccaacggtggatgcacctttaaatctgtaccacaacccagattaatctccgctctcactggatccgcccgtaagggataaagtactagccaaaatagtaactccatacgagagcggggcttgaacacctgacctctcttaaggaatgagagtgccgaaccactcacaccacctaactttgtttaaattggcatttactgcatctatctatttcatcgataaaatcatttacttacggcatttgaaacctaaagaaaattgaaagttttggctggtacctggtaacgatgttcttcccaatgtatggtgacctatccaaagaacactattagaggcctaaacaatttcaagtttccaactcaatttggggggaaaaaaaaaagttttaaacgtctaaagtcaatttctcccattccacttcgctgcaaatccgccatttttttttttttttttactctctttgcatatcttaaatcattgatatgatttcttgtgttgcagtagtttaatgacattctttcctcatgcattagagttctgggaaacttaagaagctttcttgcttactatgcttttctttttcgtgagttttttttttcttttaatgaatatttccttttcatgaaccgaaaaatcatgtgtgagtgaataagaaaattgaaaagaaacaaggataaatttggtattagcgattttaatttgggagttattatataaataatgggctggaaatatcgttatcttaaatttttaagtccaagggtaacaagtatatcaatcttcaatgtaaattaaatagtaaatactttccaaaggatatataaaaaagtaaattacaatgaaaaaattgatagcaacacgccaacacctgtgtggttcgatgaaatagtcatagaggcccttatttgtagaaatctttccatggaccttctttggtatttaataatggtcacgcatacgtggcatacaccagagtttggctggacatgggccatgttatttttaaaataatgggggtattcctgaccattttgcaaatcatttggtgtccatgccactttcgcaaactttaatgagaacatttaatattaggaaagctttgttggggtcgtttttaaataattttatttatttattctcttgaatttaaattttaaataaagtaatagttaaaaaattaaattggactttatctactccgttatttatttttttgaataaaaaattgaacataaaatttcaataacaaataagaaagataattaatcatttaaaattcataattcaaaataaagaacacctaactataaattttagtagaatagtagatgcaaacgataaatttaattgatttgtttttcattaacttaagttcaactattgtgatttagtccctatatgttaatttacatatccatctagtttctatattttaaaaagttttttgtttttttttgttttttgttttgttttttttttttacagttggggatggataaactctaaattagttttttgaacctatatcttttcagaatttgaatttacatgattagttaaaaaaaaattttaaaatcactcggtcatgtccataaagacactatgcaccaccaaaatctttcgaaaatattaactatttacagttcaattaacttggtctttacggtagagagataaaaccctccttttcaattttttttttctctccgccatcaacagaataaatcataatcattttttcatagttgtattctttaccatcgacaattggagaccttcattcttgggtttggacttcgggtttggtttattaattgaacttgacaacttgattttaagatgtgtcctattgattgagttattaagactatgagtacctcattgataatttagtttgaaaaagaccatgtttaaattttgtttggggatatttccaacccataatttgcgtaaattcactctatttcaaaaaattattgtacacaaatttatattattttttaaaattttaagataataaaaaattctaaataatttattacttagatccttacctttatatcagtttcttgcccattgttgaccgatactattattttaatgttattgtaatttgattatttttcttgtgatataaaatagctaaattgtccaaactatgtgcttttattttgaagtataaacgactctattgtactattgtacacacattcttgtaaataacactcattctcttcggttaaattgctcactttcctctctatctcttctgtaaatatcttcgtttgtattgtgttttctgttcaaatttcttttttatttgaaattattaaaaaaatgtaaacttttttaattatctttttgaggtggggtggatttacacaatttgaggcgtgaaaatataactttaaatttttgaatttttagaggtgaaatcgtgcattaatgactacttatttcatatgtagacagtaaaagtgaaattttgaaattaaccatacaaaatcttaaatggagttgtcaaaatttatagttgtgtaaaatttttgaaaactttggtagtgaagagtgacaagctatttgagattggaatagaatcttctctttatcctttgtgattatgcaaaaattttaagtagttgggtaatgataatccaaaaaacaaaattaaaaaaaaaatgattttgcccttgcactgttaagacttaagactgaattaacggaactgatgggttatttgtagctgttcatttttctaatacaatagttcttttagttatttctaattatgcaaaaacctcagtaattgcattataattaatgactcgtaagtaactataacagtgatatattcgagacttcttttcaaacgaaaaaaaaaaaaaaggtaaactgaagtcccaagtgaaaaagtaaggaaaataatattgggagctttgtttattttcttctaaaatctatagttacaatagggatccgtaagaagaaatttgcaaactgtgtgttctatatgtgatttattcaaaaagttagggaactagaagttattatccattagtaaaatttaacaatttaactataataattactcaaaaggaactctttaaccgccggtaggagatacagcgctttccttgattgagaatttgatattcaaaataaatggagtcattaatgactgaatgtgacacgcattcttttcaaaaaagaaaaatgtcacattcttttcaaatgtgacgcaaatttggaaaagcaaaatgcaaaaagcaaccaataaaaaaaattattaggctattatcaccggtaaaagatgatttagtgagcaccagaggctgatctgtagcgattacttagatatgtaagagaataattttttatgaataatattaaaacggtagattattcacatagtatcacgtgacactgtcgctaatcataaaatgaatagtgaatactgttttcagtagattataactcgatcatccagcagctaaagtagttagccagttgggctcctcttcttcaatccctgattattctgcagttataaatgctgcaaaatgttgttgaattttccattactaattaacttagtcgtgcataccgcaccgctatcaaggcatcaatttattcactcaaagcctgtgaattcaccaagattatagactccaatcacattttgctgaccaaatctcattccaagtctttggtaatcaaataatcaagtgcaatagaataatcccatcatagatcttacatattccatgtctcaagatattgctgaaccatcatcgattgttcaagaattaattcaaatattttttatttttgcttctctcataaacactaatatatataggctttgtactttggcagtttatttcat

SEQ ID NO: 9212 - DNA, 1436 bp, Citrus sinensis
  Intron number 5 from transcript orange1.1g025064m (locus o range1.1g020910m.g) derived from phytozome v7.0 (chr-ID sc affold00094; pos 90257 to 91692 reverse strand)
ctagtgaaagctttgaaaagttaaagaggatctgcatttataaagataccttaaaacctgatcaagaggaaaacctacaaatcaataaaggtttgaattttctattactttcaattattttcacatttcaagaagtatatttatttgctatgctactgcactctttatattattgtcaaatggttacaaatattgtgaaagttttctgatccttgttattcaaattatcctaaaaatatctttcaaaaactaaacaaattaataaataaaatataggttacttacagattatttaaaattttttgcgcagaaaatatttgattatgcatgcataagcttcttccttgcctttattaaattagcaatttttcatttggcttgattatatgtctctctgtatctatgtcatactgaattctgtgtgggggtgtgtgtctttatagctgtttctttttcttagacagttttaaagatttcaaaaattcactaaaaggtaaacaagccatttacaggcaatataaatacttccataatgaaagccttagaattattaaccaaatcaagacattctaaaggatgcccaagatccgtaaagcaacataaaagatccccaaaaggtgcttccccaattttcaatgcttacaaatgaccaaaaattcaaaacataatctaacttattccccttttttaaggatggaaaggagttcagaagctaccaaatctcaaaaagattccaaaattaaactttctcctacagaaaagcatcatcttcaatcttattatcaatgattttcctattccttgtctaatcaaactacccaaaagattgttgtcctctctcccttccccaagcagatgcttctcaagctagacaacatcttggtactgctcagctcaacgaatatggaaaaggagagatccttatgtgtaaatcagtaagagaaaagagaaagggtcattattggtttcatcctctttctatcatctgatgcattgttaggaaaacaagtgcccactggtcttccttcgctaaggaatagtctatgcttgaattgttcctggaagacttccaaatcttcaacgtggtctaggaatcaaactttgttgtagttccatttaagttgtttttctgatctgtttcactgtctttgttaattggttccaattgtctgtgatacttcttacatctgtgaaatgtgtctggagtagttagtatggaattatctagtactcttccaattgatgtttctctgtaagtgccccattgtactcttagttaaatgtcaaattaactaatcaacttcaccatgtggagcttacaggtgatggtgataatagagaaaaacctgaagctgttgatgatgaagaagacagaatagaggttgatgacgaagaggaagatagaatagaagttgatgccggtgaagaggaatcag

SEQ ID NO: 9213 - DNA, 4602 bp, Citrus sinensis
  Intron number 1 from transcript orange1.1g032909m (locus o range1.1g032924m.g) derived from phytozome v7.0 (chr-ID sc affold00005; pos 1444730 to 1449331 reverse strand)
aattcctgtgcggagagtggaggtttgagataccggtagggtgtctgctctaagtctcctgtgttaattaacttggaactgtcaattaatcaggaggtgtctgactcattatttgcttctttttctgcgtgtacaacagtacaaatggtcgtcgtgcatttagaggagtattggggctctaagtttcatggattaataaacttggaactgtcaagtaatctggaggtttctggcttgttatttgctcctttttttttttgcatgtacaaccgtgcaaatagtggtcatggatttagaggagtattggcgctatctatcaaccggtttttaggactcttttatgttttctcctcctttttagcttccacaattgcctttctgaatactatgatgtccagctcatattttgatcttgcgtttttgcatatgctgcagcgatgtggaaatggtttgagtttttctggaagattgggattctggggatgtgttaaagagcttttctgaccccttcttagttccttattgaaaatttctagtcaggttatgctgggctatctcactacagcagggggtttttatggcttctttattgtttttccttgtctcacttccatccatcctattcgagtgctataaagttacagctcataattttgtctttcatttttgccaatttctgttgcagtgatgtggaaattctttgggtttcggtggaagattgggattctgctaatacttgagggtgtctaatgagtttttgtccatccttccttagttaatcacttctatctatgaaacttaaaatcaaattgcgttttgatcttttgatttacgcatacttttgtgtggcagtgttaaagagtatttgaggaataccgtgactctgcatctgggtgatgtttcatgagtttttttttttccctttggaacctgctcttagtttatcacttttatctatgaatacttcagtgcagattgtattcgggccatttcatttttgtaatttttacgtttcagtgttctagaaatggtttgggtagctgaggaacatttgggctctgttacgaaggtggcattcatgactttttcttagtttactgtccgtattgttgagcaaatcttttcagttttgcaatgttctgtggcagcaatagggaaacattccaagttccaagtaacgctgggagcaagttttgaaagaatactaggactattctactcagggggttttctattgtcctattttagtaatttttgcagtttaattcttctgtctttacctaactgaatccttgaggttcgtattaactctgtcttcattttttgcaaatttcttgagagtgatgaataagtgttttagcttgccaactctccaccttaggagtttctgacaactcccttgttctttcttgttggtagcttccatctatgcctgtttgaatactataagttcagctttcatttttgtgaacttctttcctatgatgtgggttttttccccctttttcaaaggtttgggtaggatttggggatgtcattcgtccctttcttagctgatcgcatctacaaatttatctatgaaaaacccaattgtattttggtcatttgatttttgtaagtgttatgttgcagttcttgagaaatggtctgggtatttgaccacttctaggggctgatctaatgaattttttcgaactttttttaatcacttctattcatgaatattttagagcatattgtaatctggctgtttcattttttgcaatgtttaatgttgcagagtttcagaaatggatttagtagttgaggaatatctggactgctgcaaagggagcttctatgattgaggaattttctgagttttcgaagaatcaattgaccatttcacttgaggagttgtctattgtgttgttcagtcatttttccagttggtttcttttatctctgcctaactgaatgctctgaagtgtaactatgtttgttgcaaatttcttgagcagcgatggcaaagtgtgttcagtttttttggagtattaaggctttctctccactgcaggggcttctgatgactctaattctttcttcttgcttctagcttctagcttccacatggctacctgaatactatgaggtttatctcatattttggtctttcatttgtgcatctctgttggagtgaggtgaatatgtttgaattgcttgtggatcgtttttaaatagattgaaattttgagtgttatggatttatgagtacatcttcgtgtttttgagaagtgttgcagaacgctattcaaggggcttctagtaaatgatttagcttctcaatgccttgctttagagtgtaatttgatcagtcatattgccaaattgttgttgcagcttgccagtagagaattgtttgtggacatctgcgaataaagagttttgttagtgttttgcggtttgcttgttatcttatttgtttaatttgttgatgagattacatcctgcaggtttgtgttggaatcttgtttgtttgatttcaatgaggttatatgcttcaggtttctgttggaaaatactctggccaatggtcaatatagtgagtggtttgtcttccgggttgtgattggctacagcaaggcttctgcaagtttgtagggcacaaaattccttgccatttgttgattatcacttttgaagcagctgctggaatcaactatttggcaacaataaatgggggtgtaagggaaacattctaccactagttattgagcctttatggattatccatataccaagtaaatatacttctgatgtttgtcaatattttgccctatcatcagattattcagtgtgttgaactttttagcaaatattctacatggaagggtgtccacgtgtggggatcataatgctggcacgcttatcttgcgtacttattttcccctttttttctctttgatgcatcgctctgttttttgagttgatcctgtgatccgttctatgatttgtttggttacagagaattgttatagctgttccattgccccccttttctctagttgaaagagagttttggtgtggtcgaattccgagtgttgttgggcagatattgcctattggttctatacctcctggactttgttttccctttttagcttgtcttggttgctagttagccctgtgctcattttttttttttggtttgattacagagaatgatgcttcagaatgatgttgctcggttgatgtttgtagtttttatggaataccaggacttttgtctcgtggtgtctatgaacattgagaacatattcgtgctttggtaatgccattttacaaatttttttgttgcagtgttacttaaatggtcagtgttttgaggagtattgggactgctactgctgtgtctttaatgggctttttctgacctttttttagcttatcacttctactcgtaatctgtaagagaggattgtatttggtttgttttctctcttaacaaatttttgagaagtatcgtggagcattttttagacattttacttagtttttaccactttatctttgaatactttaccttcattgtgcccctttagtttggcaattttttgttgcagtgagagaaaaaaatgttccaagttttcaaggagtataaggactattctacttgggtgattttctgacagatttttagtcctttcctaagtttatttgttctattctaacagtccagtttttaattatgttttccatctgttgcaaaattttggagcagtgatggttgaatgttacaaattttgagtgttggggctagctatcatctaagggggtgtttgatggcttttaaaaattttcctctaattccttcacaattttttgttgcataggtatggggaacttagttttcaggaacattgggactgttgacgtgggggtacctatgaacttagttttcaggaacattgggactgttgacgtgggggtatcttccgtgatttttagtcttttctctaatttattatatctatattcttatcttactctgttaaaatttaagatacattggggctagatattgactacctatgtcttgctattttggaaaattgtgttgcagtgatggcagtatgcactgagtttttgaggaatttgaggctatacattgaggagtgccccgatgagtgttttgtctcttatagtttctcacttctgtctatgtttatcctgagtacttgaagaatatatctcttatcatttatttggcacaattgtgttgcagtgttacagagttgccaatttttttgaggaactttggaacttgtacgtgtgaaatccataactaaaattttctctttctcttctgcaaacatatgttgcagtgatatcattcctgtgttttcaaggaatagtgggactatgctgcttgtagtgaccaatgggtttttcttccttcactaatttattattggtgtctcagactatctttcatttcttcatgaggttcaatttgtaattttgtctttcataattgtagtattccatttttgcaaatttatattgcagtgatggtgaatgttttgaggtatttcgggattatctgctgcttggggttttttg

SEQ ID NO: 9214 - DNA, 566 bp, Citrus sinensis
  Intron number 7 from transcript orange1.1g003048m (locus o range1.1g003023m.g) derived from phytozome v7.0 (chr-ID sc affold00017; pos 68651 to 69216)
aatatatttgtgagaaagtgtttgatctccttaaggtatctcttttgctttcatgcagatatcattaataatgcatgagaagtgatggggctttatatttgcacataataattataatgatattctgaatcactggaaaatatctgctatgcacctgattttggtaaggcaatattgaaaatgttgtaacagagataaatattttacagaaaagtttcagtatatctagggaggttgtatctgtacaacctgttattctgacaattaggagctctcatttgcttcacatttgcccttaaggttacattcacctcattgtgatcaataatatggtcatctgtagtctgttgaaaaagtttttggtagttatggatccattaactttaagcatgccttagaacatcctaatatcatctatccggtaggattttgacattcccctacttgtcttgttaattttctaggaacgaatgcttctattaatgtcatcttatgaacaatttgcttttaacagaagcattctgtcattgactaaagtttctgttaattgacgattttcaggaagc

SEQ ID NO: 9215 - DNA, 2909 bp, Citrus sinensis
  Intron number 8 from transcript orange1.1g000128m (locus o range1.1g000128m.g) derived from phytozome v7.0 (chr-ID sc affold00004; pos 3736621 to 3739529 reverse strand)
aaaaggtgattcatttccttaattgattatttctatctttttgttttgtgtcgatgacaataatactaaataaggataccttcacacttctattcttcttagttgactctcctctttaaagttatatgtttctttataatctaatttaagtttttgactcaattaattattttgttgttctgactcaatggtaatattgtaattatttgttgacatctttaggtaggacttcctagtttggaggaattaggactctcacgcatggataacttgagaaaaatatgggatgaccatcttactttggattccttctgcaaaataaattacctgggaatacgatactgtaataagttattgaatgtttttccacggaatatgcttggaagactgcagaaattaaggtggttgtttgtaggtaattgtaatttagtggaagaaatagttgaactccaagcactcagtgatgactcatgtgctgtaacagcagctcaattgagtgaaacaatccctagttttgtgttgcctcaattaatttcattgacattatcaagtctaccaagtctcaaaagtttctacccgggagttcatatttcaaagtggccgatgttaaagaagttggaggtgatggaatgtgctgagtggagatattcgcttctgaatttcagagcccccagcagactaatgttgatagcccacgtgatatcaaaattccacaacctttgttctctgtggacgaggtttgatctcttaaccatgtacttgttttggtagaatttaacctgcatcttggtggtgtttattaatttttcaatatgaatcaattaaaagccatcttagaattactgcaaacataatgtcaactataccatttaccatttctttatgatttttctattaattttattggatttagcatcggatttaatttatagtttaacagcaattgattggacttataatttttctgttccttctaagcactttaataaatcatttaatattagtccatggaatatgcttggaaggctacagcattagacatttttatttggtactgtggttgattttcaggttgcattccctagtctggaagagttaacgttgtgtgtacttcctgatttgttgcatctgttggaagaaagttctcgacctagcaaagttttccaaaatctagcaactctaaaaatttcagaatgtggtaaattagaaaatttagcaccgtcctcagtgtcattccaaaatctgatgtctctggaagtttcaaagtgtgacgggttgattaatttggtgaccctctcaacagctgagagtcttgtgaaacttacaaccatgcatatagctgaatgcatgatgattgaagaaatcatacaacaggctagagaagaagtgagaaaggattgtttgttgtttagccaactgaaatatttgggacttcattgtttgccaagcctcgtgtgcttttgtttggggaattatgcccttgaattcccaactttggaaaaagtagtagttagagaatgcccaaagatggagattttttctcagggagtcttaagcacaccaaagctacaaagacttctactgacagaatcagaggatgaagggcgttgggaaggcaaccttaattccaccatacaaaaattgtttgaagaaatggtatggattaattgattcctcaaatttcccttgcttctctgttactcatgcactactttattttgttatattttttctttctgttggagcagttgtctcaatgccacatattgatgccacacataaaactaacacagtgttgtgcactgacaatcataaattaacaaacactgtatttattaatttggataatatattttatggttgtaataatccataatccttgtacaacttggaatttgaaaatttatagttctaggggacctcatctctcagatatgtatcttttgtatggggaagtaagctgagcaagtttatctagcaaggcaatgaaactttttcgtactttgttgccacagtcgaaagattaacaaatctaaataatatgtaaatggatgatataactatagcttaaaggatgttcatgtggcatacaactattctctggtcattgctccactagtcttactccctaataaatttctcctagaacctgtaagctttaatgtacatatccttgtctgttaacttcaatactttggttttggtaggttggactctgtgatataaactatttggaactctcacaatttccacatcttaaagaaatgtggcatcgacaagcacttccggtcagcttcttcagcaatctaagttggctggtggtggaggactgcacatttttctcaagcgctattcctgtcaatctgatgtggttcttgaacaatttgaaaattctggaaataagtaattgtgattcactagaagaggtgtttcatttggaagagctaaatgcaaatgaacattttggaccgttgtttcctactcttcgcaagctgaagctcaaaaatcttccaaaactcataagattctgcaacttcatcgggaatgtaattagactgccctccctttcctatatgtggattgaaagttgccctaatatgataacattcatctccaattcttcaccagtacccctgacagcaaacaaggaacctcatgaaatgaccttagaggaaaacttcctggcagatatacaacctctctttgatgaaaaggtgatttgttttctttattctatttattttaaaaataaataaaatatccctttacttttctcttcttagttgaccctctttgtagctctactttactttagaattatttttgttattttgacttacgcattgattcaatggtattattaattttctttaggtaggacttcctagtttggaggaattggcaatctt

SEQ ID NO: 9216 - DNA, 641 bp, Citrus sinensis
  Intron number 4 from transcript orange1.1g002835m (locus o range1.1g002835m.g) derived from phytozome v7.0 (chr-ID sc affold00004; pos 2167988 to 2168628)
tttcaaaagtggaccactctttatatcatctaaaggtgtgtttttacttctttgggttgtagtttaaattagactgaatcatagaaaaattcatagtcaataagcgttgcactgttgtgatccatcttttcaaaattttgactatttttattttagtttgttttccggcaaagcagctatttgtctatttgcaaatgtttgtttgaaatgaaatagtttgttatttaactagcaaaaatgatctgacttttttttatggagtctttttctcctgcatttgttgagattttgttataattcagactagcaactccctgtctgaaaaacaaaaatttactcaactttatagacaaagagttgcatcgacaatgcattggagttgatagtttttctttgtcttgtagcgactctctgtatgctggtgctgattttcgaaaattgtaaatgtccagtcatgagaactcgctgtttctatttaacaaaatattttctttttctaagtgatggtccaatgttattatgtttagaggaatcctgtgcttggggatagtatctgtgtggcacaatttttcaagggcttgatattaacatttcatttcaaaatcttcctttttttcatatttacttttaataggaattgg

SEQ ID NO: 9217 - DNA, 1643 bp, Citrus sinensis
  Intron number 2 from transcript orange1.1g006070m (locus o range1.1g004579m.g) derived from phytozome v7.0 (chr-ID sc affold00268; pos 164928 to 166570 reverse strand)
ttgaaagtggaggtggcggcaactttttcactaaggtgaattatatgatattgtagtttctctctctttttttattgatctgtaatttttatttttatttttaatggtgatatgagtgttttctatttggatcttgatttctaacagttgcaaaaattttgtgagtgctaattttttttggggtgtctttcaggatttagtagacaagttgactgatctgtgcaattctattcttgcttttgtgtagtgatcagtggaaaaaaaaaaagataaaatcgagtgaattagaaatgtagtttgtattttttgaagtgatctcattgctatggactgattcagaactgcttttaatagttgatttgtagtgcaattcaaaatataagtttgtttgaagtttatctgctattttccaagaaggaaaataatcaatccgaattgatggtttcattttcacttcctgaatatatagtgatctgggatcttcacttgtcacatttctctctcctttgatttgaactgtgcttatgttccctctaaatgcttatttctttacaattaaccacttccatgctattcacatgctgccggaaaatatcaattggaaacatttgttctgaatagcattttaacctcatcttgattcctatggtcaattattctacacatggaaactggatttcttttcttattcatgttctgtagctggatcttgcacttgcacaagttattctgctttcatgaaagtgtagcaatactctggttgatatatgaagagaattagccttcttaagctctttagaaacaatatgtggccagttttaaaagctttttcttttgtattctgtaaagtcgaatcttaatgtcccgaagggatccaatctagccataggaaatgctaaaatgcattctatggccagctttattcatgagaaaactcatttattttcaaatctggtaagagacaatgaacatgtctcagcaggacttaaagagccactgaaatggcttttatttatttgcttttcaagtaatttgcgagtttttctgcagtgcaatgctctcaaatatggacttgtgttttcttttctttctcttttgtatcatgttgatacctatctacttttaatatatggttttgacaaagtttgcatatttgttacagaatattttgtatttcaattgttctcatcttgtatgtctagggttgcggctacctgatgcctgtttatcaattctttccttttcttctccttttttccccagttatttacattacaaaccattgtggatgtgagctaaatttgatttcaagacttttgtgccacttttagagatcttaccagatgaacaagttctacacaattgcttttctgtgttccttttccattttaaattttaatctcaagagatatctccataattcaacagcagatttttggattaattctttctcatgggcttgaatttatatcccgaacgtgccccagaatttcctttttcattgtgatggatgtgctttataacgcaatctttgtttattttctaaattatccacgtatttaaccacatttacttaacttcagtttctaacttaaatattacttgtagcttcttggtggtttaggcaaaggaggtagtgaact

SEQ ID NO: 9218 - DNA, 917 bp, Citrus sinensis
  Intron number 2 from transcript orange1.1g027291m (locus o range1.1g027291m.g) derived from phytozome v7.0 (chr-ID sc affold00106; pos 384961 to 385877)
ttgaaatattttacgagtcacaagacttctaccttgtgagtgtactggatggttgcaatttatgattgcttgcatattttcttttattatgattcccctttattgcttggattcattacactaaagaattttatatatatatatatatatatatgattggcacaattatgcctgtttactctgatgattgtgccacgttgttgaaagcctcctatttatggaaaagcaactataaatagctaaggtcccattagcaagtaccaggattctttttttagcattggcggtgatcgaactcatttctggcattttggatatctaaaatgtagtttggaataagttattgcaactggataacaaaatggcctttgcctatgttttcatgatcttgtattcttatgatttatttctgtcattatacttggatattatgtgatcatataattatattttttgtcatattattttttattagtgtacgttctttaacagttttggtagattctttatttaatatatttaacagtcactgtgtttccttgtttctgtacatattttgttgataaaaaacctcaaagttcaaactattaactgcaacctacaagaaccccaccagcatatgaaatcatatctaatcaaagatgtatactatgttaaattcactagttcctccagcagagcaaacacaaccaccacaaacctaaaaacaaatgcaagttcaaacacaacttgttgcaattttaaacattgccgctttaaaaaactggcttaggtagtacattaaattaccacagcctcatatctctctgaaatctttattccctgtcaatcactttttctgttaatacatttgatttattacatatgttttgtctatttcagcttaaggagcttgagaagttgggccccaagaaagg

SEQ ID NO: 9219 - DNA, 3335 bp, Citrus sinensis; identical to SEQ ID NO: 9039
  Intron number 4 from transcript orange1.1g020450m (locus o range1.1g020450m.g) derived from phytozome v7.0 (chr-ID sc affold00516; pos 27257 to 30591)

SEQ ID NO: 9220 - DNA, 2204 bp, Citrus sinensis
  Intron number 1 from transcript orange1.1g039679m (locus o range1.1g039679m.g) derived from phytozome v7.0 (chr-ID sc affold04920; pos 266 to 2469)
ctctgaagatatcgctcgcagcattgccaatcgaagtgagtttcttattttttttaataattattatttttttaaacttaattgtaatttaattatgtcttataggtatactggtgaaggggatgtatgaagtttggggagaaggaagtagttatgaagaattggaggaggctattagaagttacccagaagaccagatgctcccgtatttgagctctgataccactttcaagattactgttgatagctttggtaaagtcttcagcttccaggagcaaaatgatcgaattaaaggactttcgtatattcctttcaaggtccgttgttttgtatcttaccatttgctcattgtgtgttttaatgaagcaataatgttagtgacatatagcaatactattttcccttttttcgcaattggtgacatatagcaatattattttccctttttttcgcaaattgggtatctttctatttatttagaagaggtggtatgattgtgattgattgtgtgctctgtttctgttctgtttccttggacacacaccatgccgtgtttctgttttgttagtcatttacctctatgatgcattctgagcacttcttggttgtataatgtctgaagctgctgtgcgctttttttttttcacctctattgatttcaacttcaaaatatatgacttagcaatcattacatcagttaaacgcatttagaacatatgaaccttcttgtactttcaaatcatcttttttcttatgctatcttaagatattgttcagccttttttctctcgctacctccatacgaccatgatagattcccaaaatcttggaaaagacctgctactgcctctaggattaacttgtctccattatagtctctcacaattaggatgaccatctcacaggcgcaacagcttgttgctaatttttcttttcaaaattttgttgttcccttttttacatcaactatttctttttggggcagtaaactgcatggtttttctgaagtggcagagtttgctgcttctaaaaataataattataaataaaaacaaaaaataagaaataaaaatttaatccactacaggcagcaacaaagtagaggatatttttccattcttataagttccatcttttaaatgatataattggtatcttaaaaattaaaataaaaaatgtattttgagtgggtgttaagaataatttattttatttagttttaacagcccagatatttaaaaattcaagattttctaaatatctcaaagtttctactggtcagtcaaaattaggcaaaagttctagaatggatggattataggttatgtcactaagttctaatggcaatcaatttatgtattctttatcatctctaaagtaaaggagtaatcaatatgttgcagggtcgagttaatttgaaaaatccagatcacaagttttggcttatagaaactgatgactatggagtgaataatgggctcccaccagtggcagaaaggagaatctttttcggtagagaaataggtgctgctgataggaaactaataccaacatatcagttaaaaagccgcaattatcttggccccacagcaatggatgcagaagtggctttctggccaaccaggcattggttgaacctgggaaacttgtctatgacccttttgtcggcactgggagtattcttgttgctgcagctcacttcggtacaatgacaatggttagcacttgttactctattatttactttgaaatacattgcacttggtagttctgtttcagagtttttatgaactatgtgcttgttataaactggtttagttattggttaacagtttttaatatgtcagggtgcagatattgacattagagttgtccgcgatgggcgtggcccaatactaatgtttggagcaattttaagcaggtgaatattctgtgtgataacatttcctttcatttcttttttttttaatggaatattttattttaagacgtactttaaacacttggctatccacaccacaaaaagcagtgatgaattgtcattaatatgcaattgtgaactcatttgacatttttaacttatactccttttatattaatagctcattcttgattctttaggtttgaaaagttaatgtgggccatggtttgtataattgtatcagaattgcatgacactgtactcgttctcatatttctgcagt

SEQ ID NO: 9221 - DNA, 933 bp, Citrus sinensis
  Intron number 1 from transcript orange1.1g030368m (locus o range1.1g030368m.g) derived from phytozome v7.0 (chr-ID sc affold00271; pos 211520 to 212452)
tactgcttcgccgcattgcctgcttcggtagtaaagtgagtatcagtcattttttgtgggtttggctgtaactttttatttgtttgttgatttgatttgttataggaattttgaaattttattactggtttgattcaagttcatgcctagtctttgagttatccgtcgtctcatttaatttgatggaaatgattctggggtttcttaattacattctactttgtgacttgtagttgatatttagggttgtaatctcgaaacataaaatcttgttagtgggttgaattttgggcgtcagtagctttctcattttacatgtttgcaatgcaaatgaataattattcacctttcgatcagtatctaatcttcatcatatgatagattaacaaacctagaattgatgctgcagccaatattatttaatgttcttgcatacacatagtcaatgattgtggtgccacaattttttttggggcacaatgcctatgttctggatgcttaggagttttctacagtttgaacattctaattttttggccaataagattatctgcggccaatattatttaatgttctaggaagagcttctgtctgtctgtgtacgtatttttttgttggctgccatttattgatgtgtcttttgtgcttgattaaatgggaaatactagctattaatatcaagtcactatttgagcatatggattcattaaaggaaggctagactatgtctaaaaattgtaatgaaattctatcatttggctgttaaatcaattgcctagtttagcatttaaacccttggtggagatgtgaagaaagttttgatgtctatcattggtatcaagagtgggaagaaattctacatttttatttctgattagaaagataacttatgtggatctcttcaggtatattttgcctgggggttgcagtata

SEQ ID NO: 9222 - DNA, 1487 bp, Citrus sinensis
  Intron number 4 from transcript orange1.1g006403m (locus o range1.1g006403m.g) derived from phytozome v7.0 (chr-ID sc affold00234; pos 152353 to 153839 reverse strand)
tatcttaaggtaacactggcaggattgaaattttcacgtctttattttttagaatattgtatctttctgacttccaaaagtaattttttacgtacaattcatgaaacatgaatgctacatcatattttctgtatgttagaaatggaattggatgcagtagcttcaccactgccctgtgttatatcactgaaatagtcagtctttcttatcttaacttagtttcttggtctacatccatgcttgaatcttataggaattcttgcatttctagtctgagggttttacatttttctagggttttacatttttgcttgttgttggattctgaaatgttcaatgttatttccatccttaaggtaatcttaaaagtttaaggtaatagtaattgtctttcaagaactttttaattgtaccaaacaaattgggcgattttcctccttaatttagcatttatgtggcttctttggttagctctaaatttttcttctcttagctgctgtatttaaagcatctctacttgttggttttatgagtgaagcttactttgttggtaccatggcaaacattaattttatgagaaactaatatgatgctcaatattgaccaaagtgccttcaatttttttcccagaagtctatatatattatgtatctctgcaatgtcttacactttgggtgtgtaagaaagaaaagagaaggcttttatttgcagattcatcttttgaattttttctttaatatttgtgacattaacttaagggcaaataccgttcaggactcacgaagaactaaggtcaagcccaacaataaccaaaagaggatgttattaggctagcaattacagtatgtcattcataggagagaactttctgctccagagaactgtatacttagtgaactcttgtttcattttcacatcttgccatatgggtagtttcccaattcttactatttgtgggtagtacatgagatagttaacttgtgaccagtgctatcactttagttggggcattagtagttgagtgggtcttgggaccatggatggcagattagttcatagtggatgagaactgaaagacttttggaatcaagatgttggcttttctttctctaaccatgttgaaacccaaagatgtgttgagaaattcaaattcgaggaggatgtgctccattccatgttttggtacatatataaacttattctcttttataacctatcattatccatttccttttagttttttatgcttttatgttgtatttgttgtgctgatttgttgtcagtgatatgatttggtttgcatttttttctggtcgcgtggttttcagttattagaatgaatagcaatgattgaaacttagttactttggatgcatatccattttggaatctcatttattccttctgaaatgattctgcctgagttttgaaatctggttatctgttatatagatactaggcttggaggatcgtatagctgagctcaa

SEQ ID NO: 9223 - DNA, 470 bp, Citrus sinensis
  Intron number 1 from transcript orange1.1g036516m (locus o range1.1g036516m.g) derived from phytozome v7.0 (chr-ID sc affold00626; pos 36954 to 37423)
tggaaggacaggaaggtaaatatctaatctccaaatattttattgaaaaatattaaagtaacagaatactaataaaaagagaagtaataagtaaatctatttatcacagtttttatctgtctaaatattattgctctattttatttagaagggtaaatgcttctttaatccgtataatttagatacttataatttgtatttttaaaaaaattactagtttcatgttatatacgtcttgttatctcaatttagtagtttttaatttacaaaattattagttggattcaacaattacaagtaacgaaaggggggttttagtaaaatacaatgactaactaggtaagagaagcatttagcctaagtagaaaatctttttcaattaatttagagtacagttatgtagatattgtcatatatcaactagtggattgtgttatgcgcagatcataactaatcagatatttgcgatt

SEQ ID NO: 9224 - DNA, 1234 bp, Citrus sinensis
  Intron number 4 from transcript orange1.1g042091m (locus o range1.1g042091m.g) derived from phytozome v7.0 (chr-ID sc affold00317; pos 54725 to 55958 reverse strand)
ccatagcttcattggcactgggaataaagacagaggtgttctagttctcttgtccttacatttatttgaaattttagctgcaataatgttaatgcgtaccttaaccccttgaaagatgagtttttcattaatactttttggtttttgaggaagcttctgcactaacacgtttttcaccctttgttatgttagtacacttgtgatttgtgttttaatgcatgaggatacagtgttttgcaattctttgaatgtacaactaggatttgattattccctgccacaagttaatgtgctgcatctgaatctgaaatgttaactagaaagtaagtactagtaagatttatgctatgagtagaaagagttttaaatataatactggatgaaattgccctaagataacaacaacatgattgttgtattatgttggtagttgaattttgatgattttttattatgtcatgtttgccttctaataattggaagacagtcaaaaggttgttctacgaaaggaagttagtttttttgacattctaatgttggtatcccaaaggaaatgcatttgattcaatgtttgaatatcctcctggggtgagtcaatttaattaagtggtgttattgatttgtacgggttgatacaaaaatcaattacgcgcaataattaaaactgtgaagccttttgaatttttgattgtaaaatcttgacgaaaaatttaagttcttttttggtttgatttttttctctctttcacatttcttattctaatatatagctcttctctagtgtagtgtagacctccacacttataaaatgaggatttaagaaacacaaatgttgttttgcatcaacatagagcaaaacgacattgtattgcttaaatctgttttttgtaaagtatggatatctacacctaagaattttcatatgtatgagacacacactcacacacacgagtaggtggcaatatattaattaaatgattcaggcaacataaactctttggagtaaatgtttccaccattttattggatgacgttaatgaataacatttgtttcaattttagttaaaatattcgtccttctgaaaagacaattaaaatactccccctccacaccccaaagctaatttgcagattatttatttatttgctctttcttctttaacatttttttttctttttttttcaccttatatttcttgacttttttcctagggtgtcgaagaagggtggtacg

SEQ ID NO: 9225 - DNA, 1271 bp, Citrus sinensis
  Intron number 4 from transcript orange1.1g012571m (locus o range1.1g012595m.g) derived from phytozome v7.0 (chr-ID sc affold00003; pos 28224 to 29494 reverse strand)
ttgtgctcagtgtgggatcatttgggataaaaaaggtacatctggacttattgagcatttttctcccagtcactggtgtgctttcttttggttgattcaaaatattatttggaaaaaggaatgtgagtgtggctggaatcctatattttgctttctgttgtttgcgtaaaatttattgtgtttgtttcggtgctgaattgttcttatctgaaagtgttacaaataggggttcactgttttaatccattgactgacatccataggtattttattactgcttgtttagttttaaccacagcatataggtgctgcttggccataaatgaaagaatcgtatggttatcgaccctgagtgaattcctgactgatatgagcctaccttctttaaatttctgtgctgaaatttactggaatgatgtatcttaagaataatatcaggaaggataagatggctgtatagggcaagaaatccatttgctggtaaattttggcaaagaccagatggcattcaaactggatgctgtattttgagctgttagcaacttagcatgtctggcagcagctggattgtttgctaaaatcttatgagcctttttttttttttgaacctgaactgaaattatatttcctgtctattaatattcaaaattgtctaaaattctttgtgtcctctgcccctccattggtagaattttattgacaaatagcatgtattgaactgattctgaacttctatgctgaaatgctgtctctgcagatctcatcccaattggattgttggcattaataggccattatacataagaaattttttcctttgtgaaaatattccaataatgcatattccaccaaattacattctatattattcagcattggcttattgtaggttgtcagacacagatatagttttaaccagacttatatggtcaatattttttagtttgaatgataaacaaaaaaggtgagagatagaaacattggaaaccatagaatacacatctgatgttggaattacttaatttttttaattctcaggaattataaaacactcgagttttttgtaatataccactgtattcgtgttggacgtttcaatgatcaagtctatgctattgtcgatgtgatttggttaactaatgccatgatttctttaatttttatttttagtgtgtgcgtactactttcttctgagaatctcattgcttagcttctgaccattactactcaaaacagaaggcatatttctgattgaagcggaccggttactc

SEQ ID NO: 9226 - DNA, 2059 bp, Citrus sinensis; identical to SEQ ID NO: 9113
  Intron number 2 from transcript orange1.1g022260m (locus o range1.1g021962m.g) derived from phytozome v7.0 (chr-ID sc affold00040; pos 786334 to 788392)

SEQ ID NO: 9227 - DNA, 675 bp, Citrus sinensis
  Intron number 1 from transcript orange1.1g038457m (locus o range1.1g038457m.g) derived from phytozome v7.0 (chr-ID sc affold00064; pos 71001 to 71675)
aacgacttgctcacggtaatttcaattcaattcaattctgttcctttgaccatcttccttttttgggtatttgcgatttttagctatagattcttgtgtaataattttggattatgggatttcatttatgttgtactttttatttctgtgtgacggtgaatttggtgatttgaattctgggttttgggacctgaaatgggtgttgcttagtaaaatttgttgctttatttatttatttttttcgtggttatttgttaaagtttgaagttctgggagggtgtttgttggtcaatttagagaattttgttgattgaattggatcaaagtttgtgaaggagtaaagttttgtgattttctattgacctttttggtttttctaaagttttatcaggattattgcagtctcttttgtagaagagtaatagaataacaagtttttgaattgaattttgttaaaactctagaggcttatttggttaaatcagaaaaaaaatcacttgaatatgtctatgaattagattggattagagtgttttttgtctgaagtttatctgcaactctgtattttttttttggttgtgttatcctattttattttaagagactgtgttgactttccactgcatattgatttttgtatttcttttgctttgttctaggattcgtttgtcagtg

SEQ ID NO: 9228 - DNA, 2737 bp, Citrus sinensis
  Intron number 9 from transcript orange1.1g005028m (locus o range1.1g005028m.g) derived from phytozome v7.0 (chr-ID sc affold00409; pos 46212 to 48948 reverse strand)
gctcaataccgataaggtataattggtttagttatttattttttgtcctttcctttttatctttgctgtttttgttttgccagcttagattttctttattctaagggtcctttaagtgagtttgcccctttctggcataaatatgggggttgttgccacttaaggctgtgtgaatggtttttatgagacagatgaatgtttggagagtaaagaacgaaattaagactaaagatgtagttgttgcttgttataatggattatatacagatatttatggggatagtagctgagagatgattcttgaaagagattagaggtagatgagaacatggcatgatgttttaattactaattgacttgctttggtttgcaaggaagcatgaggtgaaatttatttacaagcttttaacaaaatgatgttgctcaaaagcgcatttcttaaaatcatgcctcaaatattatcattatggtgtatataggcaagtaagatcattcccacagaagattgtgcccaattaacaagatattaacataaaattcacaaactgaccagcaacaaagattggattaaagaccttatctgtacttaatgaaattaacttaaactttctagatctactacggacacattaatgaacactcacacaaaattatggggggatttgtagttgatttgctatgtaaaataaaagaatttaaagtagaaaatatgaaattgcagaaaacagttttgaagaggctgatatatgatgcgaaatatgattaagtaatcattctctattactaaacattggattttagatcaattatctgaatcatcatccactttcttttgaaaacaacaaccctaagataattacaagctcaattatctttatttttccttagctatcaagtaaaacaagctctttactaattattttctatgctggggcttgtttctacgggtgtttatatagatctttagccgtaattcttctaagacttataaaatttaatttgtgtaagctctcctttttctagtaagaatagaacttggaacctagaaaggtctatgtatcaaaatagctgcaaaatgcattttcaatgtggatccaaataggaaatctgaccagcccttcaaaaatcaatctttatgggcaaatttggtcctcaactttaacacatgtctaatatagcacaacaaagtgaataaagcccaaaaattcgtccaaggaagcaattagaatctatgaagtcgcagtttgactgttcttcacactaatttgtagcttttctactaacttttgttcatgcctcaaaaactcctgcaaaacataaaagactaataaagattcaagaagttcatgaaaatatcaaataactgcaaagaaaataataaaagctgatgtgaaattaagcacttatcgcaaagaaatggagaaagcatagatatttttgttcgattgttcagtactatcgttttgggccctatctactagcttaagctttaaagtcaaatggtaacttcatatggtatcaaaaccagttgccaagaggtcttatgttgaaatcctccgcgtaattgtttttatatttgttccagtctcgtctttgtttctatctttagtctctatttaagcttggatcacatgtgaagcatattattgcacaagaaagggctgatacataatactattgtttgacctctttcttagctggttaagcttttaggtcaagtgggtaacttggtaattttaatgccattgtggacctttggttccttgctgtacctactgcacctcgtttataaaattctcagtttcctatgctaaatgtagaaaaatggaaaaagaaagacctcagacctggcattacttgcttctgaccagaatgcagtatggggacttgatggagttcattcctggatgacccaatatcatttcttaatgtagtctcagatgattgaaaaagaaatttggagagcttgaataatgactaatattgtgaaatggattggtggctgtccagtgtctcaatggttaacgcacagaaacaaagcatactttgcatacaatgttccctgttgagtggaaattcatgttttgggctagcgatgataaattttctaataaaatctgttgaagaaaggatatatcttgcaaaattgaaataaaatcttccatttgggcatcaacttccaaggattttcaagattcctcattctttttcattcagcttgattgggatgcagttttggttaattttgttggtttggattcttattcctgtgtctcaggtttgaagggtttcttttctcattgtttgtatagattttggtgttctacactgcagggaagattttagtctggtttacttttgtaatatatatgttcttctaatattctatagaagtatctctgtttcctatcaaaaaagaaaaagattttaaggactgtaatctgaatgatagactaagtttagtaagggggaaaagagggagaaaaaagtaaaaaaagattgcaaaaagctaccaatgtatggtatgtagaactttctttacaaattttctttcaatattctgttctggcgtatggtagtatctttgtgtcaaatataataacccagtcaagacattcttactttcgtctttctacctgaaagtgatttcttagaaattattatctttggattaggaaattgtgtttcatttatggaatcctgagtgatacttttctattggtccagaaaccacttc

SEQ ID NO: 9229 - DNA, 1102 bp, Citrus sinensis
  Intron number 1 from transcript orange1.1g000798m (locus o range1.1g000538m.g) derived from phytozome v7.0 (chr-ID sc affold00201; pos 143460 to 144561 reverse strand)
tgagacgataagtggaagtgataagagctcagaaggtaatgattcaacatttatcaaaaccctaatattttttttttggggtttttgttttttgattcttagtttttgtaatttatctcgagatttgtgctaaatggtatctgggtttgtggagtttttgttgactcagatccatggcggtgatttttatatgggttttgttttgggattattattattattattattattattattattattattatcattatcatttttatggggtcttttctgttttacgttttctaatgttatgggaagatctgaggcgagctctgaattgggttttcatatttgttggtttcaggctttggaattttgatgggtttttattagattcttgtagatgttgttgtcatcattgttactactttaagttctcaaagtgtatataatggcttctttttatatgttgaatgactttgagcaagtcctttattgtttgtaagcatgttggcatactactatatggctttagacactggagtttgaccttggttcagtggaatgtcttttggtggtggtttcacttttgtggactttatgttgtttgattcagtggaaacatcttagtgcttagcaaaacctgattgcatatgtttctttcaatccgcctgtgtcaactgatgttttacttgtagctttgtttaaatgttgatcccgtagtaccaatttcttcgtctggtaaactatgtgcaatattattggctatttgttaaattcttaaatttctgatgcttttatgttaatggtgaattcatattactcattgaatcagattacctgtcaagtttgctgttcaaggagaaagtggatcaaattacttggagatatacttttgctggattgctgttgcagctatttgttattgtactctaatttattgtctaaagtttcctatgatttggatgaatgtgcatgtcatgaccaggagatgaaaagaaagtttatttgggtgtcaagattactttatagttgtggccactttagattggcattggatgaccgcagttagtgctgattttttaatgcttgcagccaccgcagcagtagtcgtgtc

SEQ ID NO: 9230 - DNA, 1403 bp, Citrus sinensis
  Intron number 3 from transcript orange1.1g039197m (locus o range1.1g039197m.g) derived from phytozome v7.0 (chr-ID sc affold00085; pos 214422 to 215824)
agaaaaattgaggtaagtacggtctcttgctattggaaacgttgcttcatgctgttctctctctctctttctccgtatgtgttttgttatcgtcacatgaaaatacaaatccaaaattaggaaattgagaaagtatgttattatcacaaagaaaaaagggaaaaaaattgtatacattttattttgctgcggtacagggtccaaagatatgctcaaattctaatggtgataagtatctgaaataataatatatgcaagaagcgttaactgattccgctggttgtgctttgtggatattgcataaatccaatttgacatgaacatttcactggttaagatttcatattcaattttttttttcaaactttgcaagtccatgcagggaggtttcttaattatttttactatttctggttacttctcaaaagataaaaaacattacaattatataatttgttgtattgcattatatgctttgtaactataggagccacagccttctgacagtattggcaagttagtgaaagcactaaactctctctgaggtgttagggccatcaaaacagaacaaaacttatgtagaccaattggtccaatttagaagaataaaacatggttttcaatgtttggaggtgattactacaatgaatgatttatttcgctgagtactttttagcttaggatattatcattatctcaggtaactgagtaataagagactctggctctcgttgagggtaaaattgaagtattagtcgtcaaatccatgaacttcaattggctgtacaagaaagcttcaccgtctgaaaaatctttctttgtttgatgatgtattaccagttgacttgtggaagctatgagacatgagttgtgaaaactttatagccccttatattgagttctacatgttgaactcatttgacaaagaaagtcgagtactaaaaaatataataggatttggagctggctttttatgtctttgtgggaggcttcacttttattacctagtcctaaatacttacaattctccttctgcttgtggaatgtacttcaagttaaaaccaatactttaatagttactagcttattctgtttttgttttatcctcatttcaagcatctcactgttagtagatgtggactacgtcatttaggtacttcagtttatgttatatgccgggataataatgcatctttagagatgagttccatacttgatagctccggagtgcctgtgtagcatttgttttccctaaccattttctggagtgcctgcatagcacttgtttttcctagccattttctgttgcttgtcattgcattatgtcaataaatttgattttcttctaacatatgaatcttgtgtcttccaggtagaggttgaaaggatcaggggaagagccc

SEQ ID NO: 9231 - DNA, 2580 bp, Citrus sinensis
  Intron number 1 from transcript orange1.1g023409m (locus o range1.1g023409m.g) derived from phytozome v7.0 (chr-ID sc affold00389; pos 41698 to 44277 reverse strand)
gccggagaatcccaagcaaggttagtaaataacaatatttatattttctttttcatttttacctatggatttgacatcattatccctacaattagcataataaaaattctttatggaatccttaaatgttcataaattaattaataggttactccaaaaaattaattgaggtgaaatattatgataataccaacggtttttcatttcttcactcctttgagaagcttaatcgttggtcagtttctaagattgggataaatttattatattgtcgtaattaatgcctccctatgtcacacttagagggataagccggttcagtagggaactggactagcacatgtttgtgtatggtaattaataaaagaaaaaaaaatcaaagatcattaattaaacacataaatcgattaattaattaattttaaaattatgcattatattccagacttactgaaagacatgaatgttggtgattggtgatcacgttgtccagttcaagtcaagattttttaataacttctctcgttaataatttatttcgtattacctttgaaattaacatatatcggccaatgaaatcgtgacatgagaagccctgataagaacatgtttacatcgaggaatttgattgcatgcgctagcttggaaagataaaaatatttttagaaactatgaatctgaccttaagatttaaagatttaacacaatataattaaaaaaattctgaaagtgtttaatttgtttgggtaacattaattgacgaaatttgtggtttattataagaacaagtgtaacacatgcatagcatggattggcattaatttcatgtttctctagtcgtttataaattataacgtatgaaaaataaatccattcaaagctaaaaaatatgaagaataaatattttgctaagaataaaagtcttaagtgcctctagaatactggagggttcattcttacagtatcaacgaagtaaacggattcttcagaaccatagctcaaagagggaagaaatatttcaatgggcggtagaatctagatccattattttttatgttcttacaaataagggcatagtatgtccatttttatcagatgggtccccaactagcaactaatgaacgtgactgctggaatacccttttactttcatgttagatagatactctctcttcttaaagaggatgagtcaaaattcaacaaagtgatggtcgttcggtcattgcaattaccttaattgttttgaattttcctacattttgtcctagtttttagtggaaaaattttcttttatttgtaataaaaaaaatggctgtagatgataggaccattttagcataatttgctttcatttatcattatttataaacttaaatgagaggaatagtttccaatatgtgttattgttatgcttaaaaaaagaaaaaaaaattcccttttttccaattaggaaaaaaaaaactatttgacaacttagaattttcactgttaagagtttcaagcattactttgattctactccttttccaactcattaaaaaactcttttcagatggttcctgattccatttcttttacattcttgctccactttttaacattcctttcttcatgctttctcggtttctccatacccacttgcacaaaaaaaaagaagaaaaagagtgtagacatgaagcaaaaggttgctagaaactaaagagattaagtaacaaattcaagaagtaaaagtttacttgggaaataacaattttcccctaaagttactagacttaatcgctttcctacactttataatgtttaattgacctttgatgtcaaaactttcataggaaaatttatcccagccacactaagtatttttttttaattaaaaagaatgaagtgttgttaaaaactctaagagataagtaatttttttattaacttaatgacttaattgactaaatttcaatcaactaagtattttttttcaatttattaaaatttttagtcattaggttattaaccaaattttctttttatccttttatattctttaaattagcattatttatctttataattttttatgaatatttttcatgcaatacattgtaaactaccaaaaacatttgttaaaatgttttaatatataatactaaaggggtgtattcacttgaacatgatttatgttatgataaaatattattttattttatgttcattgagatatttattattgatggaacatttaaaatgtataagagcacaaatgtaaaaatattgattttatgactttttaagtaggaaaaaaactttttaaattagaaaaaaacaacttaatgcttatcatggaagatttagaaaaaaataataaaaatatgatttagattcaaatatttaattttattctgaattcatattcagaaaaaaaaaaccctaaaataaaaaaaaatgtaggggaaactgaaaagtgtcttctctctaatattatttaaagataggttcccctaaattatcttgggcctgtgtgctgggcccatgaacataaaatttcatttggttttttttccctaattcaacaatgtaggaggtgca

SEQ ID NO: 9232 - DNA, 2151 bp, Citrus sinensis
  Intron number 1 from transcript orange1.1g031507m (locus o range1.1g031507m.g) derived from phytozome v7.0 (chr-ID sc affold00004; pos 562484 to 564634)
ttagctacaggtctctattctgtctcttctctattactcgcgtaatttatgtttttggatgttttttccgtttaatttaattgggaattttttaaaatctgctttgtgcagtaatttctgggccctgtttgaatggtttaattaatggcttaactcggtaaagctttgcactttaagtttagattagcggaacggctgtgctgatggcaatattggcaattgaattgaagtatggaaacacaaatgaagagtaaaaagctactttttgtgatttcccactaaaaagttttttactagttgtaaaactattttagctaattggggttgagtagttttgatagaccctgctctctagttttagattgtttgaactcgatcaagctcgaaatttcttgatatctgcagttttggtgatctcgtaaaagttcagatgatttgcaatttgaatgttttaattgatggcttatgcaatatatggctgatattcttaattgttggtgagaatttcaagtgggatgtttgaagatgttgttttctttacctgattgacaaagtatagtcctttgtttcttgactactctgttgcttaaaatgttcatagcttaaagcttatggggtcaatcattggttacgggttttccggattagtgaaaaatggttccattaactttttgatgaccgtggaaaggtgcctagtcatttgtgtctttgatgggctttgtggtagtcttgtttgtctgtagagatgtttatttttattagatgcttgacatattggtaccttgagcttttagtgagtagtaacatggtgctaggatcgatagccttaatatttttccgaaattataacatttgatgcgtatttagatatgttgatcttgggaatctaagtgtatgtgtagcaacttaatgttcttcaagttactctgtagtttatgtaaaataaaagaggtttatatgtgttcatgaattctatcttgcttttgtattgattacttatatctaacctggttggtggacaactatgtataacaaaatggaaaggttgaatctccaagaaatgtcaagctttagcataatcagataatagatattttgagtgaaatgcagtggatactggctgattttaggcttttgcaactagtttccctaaggcaagttactttgttctttttggccaaatgattgccatttgttaacattttgtaatttacaaataagtaatttatgttccatagcagtattgttctgtaaagggtagtgttattcatctatcttgtttaccaattattctatatttctatttaatagctgagttggcattaacatgaaattcattacaaattctgcagcatccacttgacaatgtcaaattggttgcaattcattgggatgaaaatattggtaatcagaaaaatagtattcttttgaaaattcaaataatcatattgaatgtttcagaatttcatagcttatgtaaattgtgcattttttcaaaattaaactatcaacaacctgtaacaaatggaacctgtcacttgatacatgcttctatttggacttatctgcaactttttgtgattcttggttttcagcttcccatgttgtgatgatatcaattgaaggcaagttggggaatcagagttttattattggacctttatgcttgataggaccactttagaaaccacatagaatcgatcagttaatcaactgttctcactgtctgaatgcacatacttttcatttttgctactggaagctgtcattaaattcaatattttgatattcattaggaagggaaccaaatattagcaatcaattctaaggtgtctgatgatatcttggaacccaatgtctgtattcaatgtatcacctactttccttgacgttatgatgccttccttagctattatcttatcatctaaagggaaagtattaagatcaattgtatttctgtttcttgctttgaatgactggtagactgagttagaaataccaagaaaaattgggtattctagattaaagttgaattttctttggtttttcaaaacgtagttggatttattttattttatagaaaatcttgattttatttataaagagagaacatgacaccgggtttttcatgcagctgtggttcttgtgggt

SEQ ID NO: 9233 - DNA, 1244 bp, Citrus sinensis
  Intron number 1 from transcript orange1.1g005010m (locus o range1.1g002816m.g) derived from phytozome v7.0 (chr-ID sc affold00001; pos 709389 to 710632 reverse strand)
agaacccgttcttcccctcttcggaggaaaaaaaggtatgatttttctacattttttcttttaaccatcgtttttatgtgtgatttgttatttatttaattaattttgttggtctcttacctaaccatcagattttagtgtttgttgagtggatttattagtctgctggtctgggcatgttaagacaatggaaagctccctttctttttttggtgtttcattattgattgtgatatgcgtttgttaaatttatatgctggtttgtttcttcgtgatgaaatgggcttatatttgactagaaactttgattccgttgctactttaggactgtaattgattggaaattctgtgctagaaaatgtcatatggatgtagctttgacctcttacaaaatttctcttttgagaaattattagttttacgcttttcgtcgcttttttgtagtttaattgttcttaataaagaggatggtaatgcgtgttaaacattgcagattcttgagttgtgtgcgcgtatgcatgtcaacgtgtgttttttcataggtgggttgttgcttgtggaaacttggaagctacaggtttttgttagtgctttgctttctagttggtagtaaaatgttagctgtattgtcttgaatgaccatctgatactctactagatggccatcgacctttgaaactcttagcttccgttccttcccaatcactgctttagaagtaaaaattatttttattaatttttttgtggtcaacaccaattgttttggtggtggcttcatactcatttcatggccttgtgtgatctctgattagtctggttagagatcctattagcttcctttctgaagaataggaaaaggaaaaaagagatatcttgttagcttgactagaacaaaatgacttgaaaggagactgtgatcgtagtcatggctctatacgtaagttcttgtttctgaacttttcgttgactgttatactgtagttaggcatggttgaatcttttgatgatatgatttctggtttggatgttatgaagaggggccctctggaaaagtcatttctcacttggcttgttctactgatttactgataatattagaggaactaaatgttctctgagtatttttgttattaggtcagttgcttttaataatttattttgttgtttggccaacttgtttgaactctgttttccgttttgacattgcagattgatactgctgttcttcagtttcaaaatcaaaa

SEQ ID NO: 9234 - DNA, 764 bp, Citrus sinensis
  Intron number 7 from transcript orange1.1g042101m (locus o range1.1g042101m.g) derived from phytozome v7.0 (chr-ID sc affold00008; pos 2387517 to 2388280)
gagagaaaatttcggcaggtatttgtgctatgtttatctctgattgacgaataagtaaatgttgtctataaaatgatggaatgacagagaaataagtgcgaagaatctgaataggacaaaaccacatgaagcagtacaattattgttttttggatttgtttaatgaatttcagaatggagtaagatcactagtaataatctcccaaaccttagattgatcggattctctcacacgttgcaagctttctacaaacaatatccctgaaatcactcatatgttctacattgtgatctgtttcaactccttttgatgctaaattttgggtggcccggcttttggtttagtcgtcccccccacaaaccccccccccctcaaaaaaaatgccagagagaggatattaataacttacaaggattttaaaattttacatgtcaatgcaatggaatggtatatgcaccaggaattgtgctagagatatatgcatccatttggacactatatgttattattttatagaatctagtcaactatttggtgcaagaaaaaataaattgaccgatgttatttgctttagaagattatatctcttgtatcactgtatgctaatgagtactgacgaatttcttgatagtagattaaaatgccattttatttctgttgtgcctattttcccattgtaaaatggagtgtggatgtgctgtaatctgaattcttgttggatttatgcttctatttcaggagaagggcacagaaaagtggttat

SEQ ID NO: 9235 - DNA, 1921 bp, Citrus sinensis
  Intron number 1 from transcript orange1.1g043836m (locus o range1.1g043836m.g) derived from phytozome v7.0 (chr-ID sc affold00089; pos 202783 to 204703 reverse strand)
gaacactcgtaagagttctttttcctcctctttcggcatgtgtttttgatacttgtttgtatgtgtgtgtcctggtcttttatcatctttatactattcttggtacttgattttgttccagttgttatgcttctcatatcttgtcttggttggggaatttgatgttgtcttaatctttgtatgtttttcatatttgttctggttgggccccatgaaactgatattgatgttgctttaatcatagttttggttaatcagtgtaaaaatattctaaaatctgaatagtttcaaaattatgggcatgataggtgtattgagttagagatgctgtgatacgaaaccttcccctttgttgtatatttcacgtcagtcaattattgagcttctagagttgatctaactggtaatatcgagttcttaggatagagatatattgatggatactgtcattcacaagttagtttcttcttcaggttgtttcttcttcaccattaattatgttgtgttgatacccaggccaatggaaggaggaaggttaaggactaaattaaatacttgaatccagatgtgtcttagtgtttattatgagtcagcaagctatgcaaatatttttgtgcagcatcacttgacccttagaccctcaaatgagggtagccaaaagaatctaaacaaaagctgattcacatgcatttgtggaatataaaacaaacacattagtacgttgcaattatggtggatgtatgatggtgctaaaatttccctatttctggctatatttttatattcttatgcactataaatgttgagttattgaatatttttttattggatttcctaatatggcatcagaccaaagtgtgtttataatgcattgcaaggttattcagttaaactctttgcatggatatgattctatctacaataatcctagaagctaaagttattatgaacgtgtgagaatatatttgattttatttcgtcataactgtagagttaatttattcttaaactttatttcgttataactgtagagttaatttattcttaactgtatgatcaacaatataccaatgaaaaggaataggcattatctaaattaaattgaacatttgaaaagttttgcaaaaataattatatatagtcacgttttaaaacactccttatcatatcaaagcatactagatatactttactggttatttctcgttaatttctctcttgacgtcaatagatagtccgtctgttgctatgacgctcttttatcaggtgggaccactatgtggttacaacactgtgttcgaatggcagaataccatcagtaggggaaatgcgactaaatgataattatttgttattgagatttatattagattttctaagtgtattgatgctagtaaataataatatttctttttttcgaatttatactaactctttacactagcagaaactgtcaccgtgaatattaaaatgttcttatttgaaatttctctggtagcgtaaaataagatatgtttgacatacatgcattggatatgttttggtagtagattggtaattctgaactctagattctggatatagttaataaaactgtatgcagatgcataaacatatacacgtaactacggggagaatcatattttgacacagatattactctcttattgatggatttgggcttcttaggtttaatagttggcccaatactgttgtagacctttgttaattgacaatttgcctaaagcatagtcatctctacttcatgcatgtgctgatttttaagttaagcatagtcatttctactttatgcacgtgctgatttttataacttactgaagccacagttttaattgccaattattattaggttaatcttagtccatatttgactcttctttttttttcttaactgccagaa

SEQ ID NO: 9236 - DNA, 6053 bp, Citrus sinensis
  Intron number 2 from transcript orange1.1g016173m (locus o range1.1g016173m.g) derived from phytozome v7.0 (chr-ID sc affold00109; pos 185438 to 191490)
caagaaaaaggcccctcctatcagcagctgcaagggtttctccaagaaactgctttggctaagttgaaacaaatcaggtgcatttcaaaggttttaaaaaagttcagcaaaagaattggcttgtaatataatttgcaatggagaatttactttctatttgagtatttgtcttcagcttcacagtttacagcagcatgtgttttgatttcttatcagtcttgggttttatttattttgttttggttgatttttctaagaggcaccgactctgtgtgatatctcgaaacacaaattattttgatttgatgaagcttcgtttgttatgtcatttttggaattttacgctgatggagttttcaatataaacaaaataatcgaccaatgttttagtttgatgattgagatttcatttaaaaataaatagacaacattaaatcaaattgttatattttccgtcagttaatggccaccaccaattcataaagtttatattagcaaacagatggttaaaaaaactccaaccgtcagggaaatgaacgtaaaataaatgcacaaaaaaaaaataataaaaaattccacgtaattccaaagaagccagataactacttatcatagttgatatctgagatcttcccatatttatctagaatgccaatctcatagctttaatactttttaattcgcaaaagtagatttaccaaattaccgaatccgaagaaaaatgcaatacgagaatctacgtttcaagtttcaaccataaatggtgtatgagaaacgtctcaataatttccaatatttgaaatggtagtccggtgagtatcacgttggacacgagataattgcggcaaatacccccataatatatctaaaattattttaatatcctaagggtgcgtttgacacattgtattataatatattatattgtattattttaatataagtatattgaatgtattgtattatattagcactgtattataacaatgttataatatgtttggtgctatcactatatcgtatgaatttttatttatattatgttcggtgctccactgtactttattaattttcttgtgattaattcaaattatatttttagaatacaacatttattagtaattagaaaaatactaaatataaaagtcttaaattttagaaacttaacattttttaatataaatgttaacaaacatcataattctttataaagatcgaaacttatagtcttaaattttcagaagcataatatttatttttagtattttctaaatatataaccagtaaaataaaggtcgaagcaaataatttaatcaaataatctctaaataatataacaacataaataaatagttaaaatctacaagattagttaaaaagtcaccttaggacgatagaatgaaagtttatatatgctacaagataattacaaaataataaagcgatacaattattgtaagatattcactaacgaaatgaattgtgataaataattcaagtaagagttctgtaatatatatattaatattttatatcattattaattttaaatttatagcattcaaatttattcatatttagatatttattattagttatactaaattgttgaataataactaatttttatatattaattactacaatataattaaataatacattatctagttatacttttaatataataaaaaattaactatagtataatattatttaataataaatttattaacttatattaataattacaataaaaaattaatattaaatgaaaaagttatattccttagtattagaaagtttaaaaaaaaaatctacttgcaccaaacatgaatccaaccctatgtaatgaggagtaccaaacacccctaaaaacggaatttgacgaaaatgtcataaatactataagttctcacatgaatttagtaagtatccttaactcaaaatgactaaatggattaaatgactcttacatgacttacatgatctatatggctacatgactaagggcccatttggaattactttttggaggtctaaaagtgattttttgaaaaattaaaagctaatttgatgttctgtaaatttttaaaaattcatttttgacaaatcatctcatcttacagtaaattttgaaaagaaaggaataagtagctttttgaaatatgattttgaaaattacttgtatacttaacatatttccatatatactcctacgtattataaaaatctaaaattatccttattaataagaaaataaaatcattaacttgaaagagattattatcattattatcgattatattgagacagcgaaataaaaaataaaattaatagaataaaatatttattttagttatcagttattatataaacacaataaaaaaatattttatatacatgtttataaatttgtaaaataaatttgattaaatattatgcccaatttagtcatttatattcatttagcagtttaacaataagatttagtaaacacatacgactgcttttaaaactcatagcacttttaaaaataaattttaccaaatgtttacctcattttctttacaattggttatttctatagaatagctaacaacaagtattttaaaagttatagcataaccaaactagtccttacaagatctatataactatattacttacatgacctacatgattgcataacctatatgacttactacatcagttaatcaacttacatgactacatgacatacatgacattgaaaataatacatgacattacttgaaatattttcaccttaaacacatgcatgttcactaagacatcttgttaaaaatgtaatcaaacaacctacattgcatgcattttgacatataaggaaaaatagtgaaaaatagaaaatagaacattgtaatatgaggaaaatatccattattttctagaaaatgtaaaacttaaagacccaacaacattaacattctttattgggttgtttaacgaggaatgcatctattttcaattgaaaaaagtataggagttaaagatttgaataaatagttatatttgtaaaagaggttttgataaatttttgaagacttatttgagtgtaagaagagagtgagaaaaactagatttgatgtatttattaagagtatttttgaactttacatgtatttcttaaggtatccacgaaaatcaataaataaaagggtatttaaataatttttgaactagtaaaaggtatttaattaaaaacccattagacattaacttttgatggaagggtccagctatgttacccattttttgtcttttcctaatccaccgttaagatctaagccaaaactagttcgatggtgagatgtttctgctgggttattaacactatagtccctattgtttgctacaaaactagaaaagtaaaaaagttcagaattttgacatataattccataatattttacattttttccactaagatgtatttatctagttaatttcaccattaaaatgacttattcatatatttgagttaatatattcaatttaatactctttcctattaattaattaatttaatacatagtaaaaccattattaattattacaaaccatattttgtgataaaatgtgaatatgaatttaatctcttgctctgattatagtttatatatttttttcataatacctattcaatatacagtcaataatttcaatatgtaataaaaatatattaatttaccaattaatgctatgtttttttattgtttaatatgaaagtatcaaaatgtgcactagagaaaaaaaaattactcttcatttaattttagatttacaagcttgatgaacaagtttggaaactttctaacaagaatttggaaccaaagccattttatactccatacctatttagaatttttttccacatctcgtgtttgacaactttgagtacgtaatagaattcaattgttaattgccaaacatatgaaactgaaactagtgggcatgtaatcaatttagtcaatttttacctattatttcaattaatttatttagtaaaaatataaaatttattttatcaaggatatatttgatacttgggtaggtgtacaaaataatttttcttcttgaaactttgatgacgggtatgtaaattaataattaaaaaagtagccccatcctttgatttaagttaaaaaattaaaataagtaggactaatgagttaaattttagtatcatctgattttttttcatttttataataaaacaggaattgtagtgcaattaaccaatgagaatcagaaaatgagtttttttttttacaatacattcaaattttcagtagtttcctccaatatttaaaaataataaataaaaatttttaaataattatccggcaaaaaattatgggccaaaaaataaagcaaagaagagaaaatatactgttaagaagcatcttgtgaatacatatatacttaaaatgaaattcgatttatactattcattctatatcccatggagaagggggaaaaaggtcaagacaaaacatttcacaagttttatgcctttacatgatgagagtcataatgcgtgacagactaaccgagattttgtgaaaaattagaaagacataaaataaataatgttctaaaaactgtctggtaataaataatatcaagagataactcttgcatcccaagtaaattatcccgagaatactataatctacctagatcaatacgaagtgacagtcataataataataataataagataataattaaaatacacagtaatcggaatttcaagaaagcataacattttctttctgaaacaagagtcaccataccaaaagttgaaactcaattgttactgattaaaaaaacttattctttgcatgtcctccatacacacattgactgtgcagcaagcattaacacgaagctttccaaattcctctcctacctgaaaatcacatattttagacaaggagaaataagtactccgcaagaatgccgttgaattacctctttcttttgttattccatccatgccatcaagtgcggctcaagcaagctataatctttctcatcctattgttgcgcccatatatacttgttccactcttttaagtttttccaaattccacatttcgagtacaatgtagcacgaaagaatatattgcaggagaagcgatgctggggttcctccccaactaatttgatggattatagtttattaaagaagcaagagttgacaatggagtccccttaagagccatttccaccagaatttttcactggattgagatggtggatcctgaaaaagttcagttacttttggattcagcactaaaaaattaacaaagaaaaatatcacggaatggaaattaatacagaattgtattagggagcttgtacttaacctaaagtgtagtttaaggactcaatacaatggttccttgagaaatacccacatttaaaacctcttacagttacagacaagcgcccacttttgctatatattgcaatttttgtctactttaatcccccatgaagtgtgaaaccgagtatttagtatttaccttgaaaatttatctccattttctcatagaagcggcgccaccatcttttagactctcccaaaatccccaactagattatacaacgaaaaagaagaacaaggacaaacccccaactagattatacaacgaaaaagaagctgaattcacaaccagctaaaatattctttttacagaatccttccagagctttcaaaatatctgattttcaacccaccaaaggctcaaaataaagtgtacgtgggctggtaaccacaagagtttgtatcctacaaaacaagttcctcaaaaaagcattgtttgaaaattatatatcgaaacaagttcctcaaagatataataataaaccaataataataaataacgaaaccgaagcgaagctgagcaaagcagctggaaattatttatcttaaaaacgaaaatgacgcaatctaatcgtaatcctggtcgtcctaactgtagtccaagcccttgaaagaa

SEQ ID NO: 9237 - DNA, 2932 bp, Citrus sinensis
  Intron number 1 from transcript orange1.1g046773m (locus o range1.1g046773m.g) derived from phytozome v7.0 (chr-ID sc affold00077; pos 127430 to 130361)
tgtttcaggtatgttatgttatatgttcttgccctagtaaaattttttgatggttaaaactttaatttgtttgttgccttgaaataaggttatattagcgatgattttgttaatgaaattagaaagatattattcaaagaaatggacaaattaaatcctgctttagtcaacaagttgttttggactttgcagtgtactcaaacataataaattccaaaatttaaatattgattttattttattttttgttttttcctctatttgacaaaattcaaatcactggaaacgagttgaacggatgctggtttcttgtacgtgtataatattttcgatttacataagcatccaaggagaaaattttgttccttgcaaaggcttcaccgctttttgataaatgggtccgtttctaacaaaatttatgtccctttcaggtttgagtagttttcatttgggcaatgttagttccttgagtctcctttttattactttagaaatgtctatttttggaccccttttgaaatcttgaagaaaggggctcttttttgtatttaaatttctttttactattatttttgaatttttttccctttcttggcatgatctttttcaagctttaaaaaatagaaatcccataactttttgactgaactttcctagcaatctagctagatataatccatttgaatgcttttcttacactaaaatgcagatagtgagaccttgaaacctactttatttgagctcttttggcaagcaagcatgtaggatacagcataattgaaggaaatattcagactcagttcttgttagcctataacttttctatatatgttaacaataaatagatgtaggaacttttgccttttatcatctgttctatagattagctcagggtgctctttaaaagtacaagcctgcattgcttcatgcttcatgcttcatgcttcatgcttctttgtcatgcaataaatgatgcctttaattttagaattcttcttcgaatgaaatttttagtatttatgtttctggttaactgctgggcataaggcatagaacacagtactacttttgcaaccttgcatttttaacatattaaaagcccacctagctttctttaggtcccaattcttctcttacatgcatcttgagtcaaaagccagcatgtgcatatagccaaaaagcacatggagcccaatgctggcacagtaagctcctgtctcccatgtcacctcagagataatgtcttctgatcttctcattctgatcgcataattaaagccaggggccagaaccagcaccccatggtgacttctgttttgttctcttttagtttgttcgttgcatacacttgtaataaaatattttagaaaaacaaaaaccaacatagcaagggcgtaagggcagtggggggttatggggaagcaaatacagagcaaaagcaaagccagagggaatgagggatgttgggagtggaagccataagaaatgagagtcaaagaaaggcagaaaaaaggccagttgggtgatagattctttgcttttaacgagacagacctttgccaagcctttcttggaaatgaaagagagagatttaaaaaaaaaaaaaacacgcttgtatgttttatgtatcgtatgttctatatatataataagctttagctttccatgataacaactctagagagcatggaccacagctaataagctatataatctttttgtcctcttttctagattcctctcatcgaacaagatgaaacaaatctcctctccactttcaagtttcatcacaacacattttctttgtacttgaatgtgtaccttttatatgaatccttttaataacatgaattgatgaacaaaaacaaatgaaggagctgtcacagtcccaagctatatataagctttctccctgatggtaggatttatgaattgagtcaatgacgagagagtggggtggggtggggtggggtgggggtgtgattattaatttgtacccaccaagtcactgctactggtactagtacaacaagtctataggtgctgctacaagacagagacaagtctgcatcaattccatctacttcgatgtatcaatatcatcatcatctctcttcttctttatttcctttctgactgactgactcaactgagctctttcctctgacgacatccaaaagcatacacatctttctcttttctcagtactgtcttgtcttacactcctactacctctactctgctctctagtccctagtctctcctgcctcctggcaatggctccaggctctaccttcaagttttgaatttttcaaacatttaattttattttattttacaagcctttactcacatagtcacgtggactattctcatagatctttagattcatgggctgcggcatacatctgctttcttcccttaatactctcatgtcggactccatttagtaactgtaatattgcagtgacaaaacattgttcactatatttagtttttagttttaccatttgcaaatatttaattgctagctagctaggaagcaaatggaaatgggtctaaccaaaaaaaaaaaatggaaatgcgcatttgagaaattattaacaataaaacgaagagattgtgccaaatagatgcttactgtacagtcggtacccatataatatttgcatatcttttctttttaccaaccccatgatttcaagatcgaagaccaagtttagggacctatctgattatatggattaactatggccttatatgagaaattgtataataatagggactccgaagtcttcacacgaaaaaaaataacatttttacttatcgaattccacagttacgtgcatgcatgaactatctcatgggtgtgtatgtggcgttttgtttgcatgcaggtttgttccacgtggcgagcagtctcacgctctga

SEQ ID NO: 9238 - DNA, 1770 bp, Citrus sinensis
  Intron number 3 from transcript orange1.1g026620m (locus o range1.1g026620m.g) derived from phytozome v7.0 (chr-ID sc affold00490; pos 22915 to 24684 reverse strand)
agctcttaaagaagtacagcatagaagaaaagcaggtcagcatttacttgagtgaaacatgtttagattaattgatgtttcattttacttttgtttatgatctagtatgatgaatatggacaatttgggggcattaaatgtcttagaagtagatcccttagtttgtataatatttatctgaagtcgtaatgacaggcaaaatatattttggtttgactgattagtttataaacattaccagaaggaaattatcaacatagcattactataagtctgcttttagatatgaaaattcaacatgtagacattgtggttgatgacaaatatattttcaatactcaatattatagtatctgtaagctgtaagaaacttttagggttaaatttaaatctcctgttgtatccataagcactcctgaattttcctttctctctctttcatcaccattcaccactgttatgaccactattgctgtcacctccacattataaccgtcatcagccataaaatctcaagtaccaaccataataaaatctcttgtggctcttattaacattatcaccattgttccacaatcactatctccagcaattatccttattgctatctccacaatagcatcaccagtatcctaattaccaatcataataagaactttttttgcatatttctatgtaacaatcactgtcaccttatggctgttattatgattatcaccattgttccacaatcactatctctaactattatctttattgctactccacagcagcacaatcgccatctctgttggactaccaccaaacaatcaccatctctccaaccaccttggctcaacaaccatcctcataattatccatgaaacttattacttttctgcttttttaaataaatctgagaattgagataacttagatcatcataatttagaggacttgtcagatctcagttatattattaactaatcaaatctaaattttttcagcattacattttaacacttgttaaaatgctcttttctttcccttctcttctttaagtttgtagtttatggctaacttttaagtttaatgacacaacatctcagtcatagaagacaattaatgactttatatagaatatttggactctgaatgaaaaagttccaaggtagctctaattccatgctttgccaatgatagactttatatagatattattcttaatatttatacttctattggcaggaaactaggggaatgaacctgccatgacagatttgaattcccaagcatatagctataataatattaggatgactgctccatgctagcagatggttataatattaagaataatattaacacttcttgcaaaagaactgaagcaacaaatttgccttcctagttgtttcagtttctcctttccctcgtaaaacagtggtgaaagtaaacaaatgatctcctgtagttataaagaagaaagcttcttagtgtgataacatacgtccttgtttctcaggtgattgatatggggttatgtatgctaaactgaggtctgtaagcatgtgctgatgtgacttgaacagtttgtatgatattttgcataatcaaacagacaactctatgaataacatgaaatttcatgtcagttagtgtttgtagatcatagtgactattgcaaacaattgttctctcgctttagaggtcagaaaatatagttgtgatttacttcactattttttttttcaagaaactaataataataattttttttttcagcttcctaga

SEQ ID NO: 9239 - DNA, 961 bp, Citrus sinensis
  Intron number 4 from transcript orange1.1g000832m (locus o range1.1g000832m.g) derived from phytozome v7.0 (chr-ID sc affold00006; pos 814633 to 815593 reverse strand)
acagtaagtgatatagaaaaagttcacagatcatccaaatgcatgcttacatgggtaagcactcaagttgtttcatgtaatctactgagaagagctgttgatgcctaggtttgatattgacttgatgctgaaaggaaatatccttaatttcacttcttccgaagatggctaaagttaaatttgtagataacatgtatttgtattgatacactagacaggtttttcgttgaagactgatacacatatctgttggtggttgaccgacactttctgttacaccagagtttgtgttgtaaacttcttgaaagcgctggtggcactcatatatagagaagtaagaagcatgttattctcagggtcgctggaatggtcatataaagatgcgaaatctgcgcatgcttctctagaatatctattggcttaattggttctcctgatagtatatattgtggactatcattattttgctttgacaagagaccatgcttttgtttcacaactagaaggctaagctacagaggtagcttactttgtcaaaatttacttgatctagaaaagataattttgcatttgtttaaaatatcatattattccacttgaggatacctaagataattttgcatttgtttaaatgtcttattagtccacttgaggataccaattttgctgtattcttttaaaaagataagccaggagagaccatctattttgatgctaaagagattatagttttaccatatttaggaccttggtgctaaagggatcatctgattaacattccaattctctgactgcttcagtttagagcaattgtgcacccataattattagctcaaatcatcttgctagaaaagttccacattttctgttcctcagcctttttcattcttatagctcaaagcaataattctttgacatttatgcaggatttgtctgtactggacaaaaaattacatcaaag

SEQ ID NO: 9240 - DNA, 799 bp, Citrus sinensis
  Intron number 2 from transcript orange1.1g039178m (locus o range1.1g039178m.g) derived from phytozome v7.0 (chr-ID sc affold00656; pos 77920 to 78718 reverse strand)
ggcgtgtgcttgaaagcaatccaaggctgacaaaggttagtatttacagcctcattaaagtgttcttattctaccgttttgattagatgtggatgtgtggtgaattgtgaattgtgatgttctggaaagtcgcgtggccgcattctgcttttaactcactttaactaaatttgtttttcatatttggatgaattattccagtataacgacaacctagttagaagccaatgaatttgtgatgattaatggtttgatgcgaatatcgctgtaacttattgcttagcatagggttttccttttgaactggttttttaactttctggttggtaaagttgatttttttttattattttattgtaagagcatagtctgaagctactttatccaaggatttggactgatgccctgcagtttttcttaggcagaattgtggtgtctcttgatgtcctttgacagtgtaattctattctattgtgcacataacctgacatgtaatacttgctctcggataagattgaagcgatgatttgaactgttatcaattaaactataccctcttttctgatgttggtgttttgcatagtacaatgtagtgttggtttcaatacatgttcattcttcacttgattgaagtttgaaagttgtcaggatttatagattttaaattttcaagcctttcagcggattttggttttgtagttccgtacttcctgagttatatgctctgtagtgtgatgagcttacaattcggattttgtgtgcagctttgcgtgcctggctgttctagactcaccgttga

SEQ ID NO: 9241 - DNA, 3017 bp, Citrus sinensis; identical to SEQ ID NO: 8939
  Intron number 6 from transcript orange1.1g020485m (locus o range1.1g020485m.g) derived from phytozome v7.0 (chr-ID sc affold00264; pos 22011 to 25027 reverse strand)

SEQ ID NO: 9242 - DNA, 1438 bp, Citrus sinensis
  Intron number 9 from transcript orange1.1g005411m (locus o range1.1g003194m.g) derived from phytozome v7.0 (chr-ID sc affold00625; pos 56468 to 57905)
tcgtgtgagtttcttttgtactatcaggattctaaggaaaaagtatagttatatatttagaagaaagtaaaaatgtacatattagtttaattagtaaaacctcttggatggtgtataaaagtctggggttcaagtcccactcacatgggtggggaggagatttattttccaatgggcaatagttaaaagaagtggaaaaagaaagtttaacgtcaaactgttgtcagccagaaagattttcttaatagtgtctttcgtgtctaagtgctgtggtgttgaatgtgaatacaaagttcctctttctctttttccccccttttaaatgtttttgtgaccattaccctttttacgaaggaagtcctttacagttgactgcctgtctttggttcccatattggccttgagtgcctaaatcatcgaatgttatttatatataactattatgtagcatagaagcaacaacataacagtgaccacacttaatggtattcatgcattacctaagttataatctgtgagaataaagaaattcaatacttaatttttatatctttaaatgtaagttacttgattctttatattttataaaccaaaaaagttctttggtgtcactggcttgtcattttgtctcatctctctaaatttccatgccaagcatcatgatccatgactgttctcatttaggatgcacagttgtaagcttatgaaaggaatttgtttgataatatgagtttggtttcatgtccgtttcttgtagatacaagaaaaggagaaatagagaaggaatagaagttaaagaaactgttttgttcaggtcattttctattaaatgatcgtgcgctgaatgaaagtggattgttgctgtttagaaggaatgatacattggaaaatgttctttgaaaaaagtatcagtgagatgttttaaggtcctttttggagcccaatgagctcaaaaaatttaaaaacataatactattgaagaaccttcatattgggaattgttgattaggttgttctatacttttattactgccattttgagtacttgaaattaatatgatgtttggaaacagacaaatccatctcaaagacctctttgattctagtagtcaatgattcaagtttaattgtatggcttggcttgaataagatttgcttgttatgacaggtaattatttctcagtttttactattcagataatataggttcgggcagttcacagatatttcctttaggttgactcttgtttcttgcagttaactcaattataatatgttaggtacagtgtcatttctgttgtagactttagagataaacttattgaatgaattttgacatgactatttagaaccaatgaggtaaagtttagactattttgtttcatagaatctcaaatttgttgtatatactttcaggttgttccagtaaagcgcttca

SEQ ID NO: 9243 - DNA, 1643 bp, Citrus sinensis
  Intron number 5 from transcript orange1.1g002413m (locus o range1.1g002018m.g) derived from phytozome v7.0 (chr-ID sc affold00010; pos 403468 to 405110 reverse strand)
aaggtatgttatcattatgataatgactggcagagctttttgattatgatgatggttatgtgtgagatttctcctctttcctttttctttttagtacttaaagtagcagatatttgtgcaagtatttctgtagcatccgaaatgtgatacagtcataatctttaaatgcttcttccctgaatcaatagttttataggctaagtcagataatttaaacttgttcttatttcaaagagttgaactattggcaccccttcattaatcttataaactgcttttctattataattacatttaaggataaatacaagttgaattaaccccatttataatttctctctctttactttattctacttgcacatgtttccttctctctctctctttttttttcacacctcttttgtagtttcatctatacaattggtttgcacatacttaaaacattaatctttattctttttctttttttggaaactataatagagatatcaaaattgtaaaataattttatgagtgagaaagtcactctggaaattgaaagatttaaaagatttggagatgaaaatattttttgtttaagaataagttatataacagtatcaatggatgaaattggtcaaatcaatgtgaggattcaacccaaaaaaaaaaaattatagatgcaaaagattgcaagaagcctgcagtataaacttaaatattttttattcatcatttgggaattttattgtgcctatggttccaactacaaaaaaaaaaaaaaatacaagtagattctttgttctcaattttttttttaatacttgttatgtaaaattgaatgccatagaaaaaaagagtatttttgacattatggacataattaaaaaatgtggtttcaagaggatcttgaaggggtgccaatagtttaactctattttaaatcctaagggcatataaacaaatctccactacttttgggctaaccagtccatgtgtaatattgtttgctatctatattattatagggagattttgaagatgaattcattggaccacaataaatataaagtaaatcaaatgcatgttgatacttttatttgaatacattccaatctttgttaattgcaactgggaaagactggtggctattaggaaaagaatgtatagttgatttttattcttggaaattacatcaaataagtctttgtttattgaaaaaatagaaatagaatttaaaataggattcaaagcttttcataacagtcacccttcatcaaggaaaaagagatttttaatgctgttttgatagcaaatgaagcggcagatataggaaatggtgattgaaattgactaagagattaaatttagatgttctgttattgtggtatgatattcaagtttggactgttcttcaaaattggcacatgtatttctgctggtaatttgaactacaaatgcttaatcgtgttgaatttatgtaatactttctttggcctaacttgggggtgtacataactgttggtaatttacttgtgttcttttataattcaaaactactctatattttattatgtcaatttggagtgacaactaagtgattctttctgagtgttttactttcagggtggaggaccatattatctcattggtcgtgcact

SEQ ID NO: 9244 - DNA, 3422 bp, Citrus clementina
  Intron number 3 from transcript clementine0.9_007378m (loc us clementine0.9_007381m.g) derived from phytozome v7.0 (c hr-ID scaffold_5; pos 1868395 to 1871816)
agattggccgttgcttgagcagttcacattttcaggtaggtagttctctactttcacaatgattctccctgaaaagtctccctattcttaacatttcatgaaaaagaatctttcttggtccaaattaaatgagtctccctccgacttatattgtttcattataactgacatttttgtttttaaatcttcaccctagctcttcatgattaaaggctttttgcttttggtcaatgtggcatcaaatcatatagtgaccaagtattttaatctatattcagtatagaagctgggtattagtagtttaaaaaaataacaatcactgaaatactgatgcagcggaagcttaaagttcaaaatattccattgattctagagaatgccggaataaaagaacaattaaactcacgttgattcaaaagaataccgtgaatttaggggttaagactcgttgattccgcagcttaccgagaattaactgaactcaaatactcacaaagagatttgaaaattgaaaatattattgaaatcaaacatgccttcaaaggctacaagaggaaactatttatagtagcagtaactatcctaaatcactaagggaaaacaaaattctaaattgaaaaggaaacaaaattctaaaatggaaaggaaattaaaagtccttaattaattaggaaacatatcctagtataaattcctattctgcatcaaatacattgtcaaactgttagatgtgaacaataaagcaaatctactcaaacggtaagcacatcgtcctgtattaagtattgcagttatggtccataccaatttcaaccatttgagaatgcatgttagatctatttatatcttttaatattatatttcaacactcccttaaacagaaactgggctaaccttaagcctgcgaaaaatgtttttgaataatctgcttaagttaaatgatatggataagaactgtggctaagagaattgctcataaactttaattggtggacttcacaaagtgaaagtgtctttaagttctgtgtctccataagcaagatgatggactcagtgtgattatgcaaaagcttagatcaatttgacatctagcagtctttgaccggtgaaaaagtgtaacttaatcaaggtggtgacaagctgtaaatagccataaatgagtaaaaacacaaaatagagttagttactactgataaaaagtagaattgagacagtaagtggttgttaggacggacagaaatatgtccaccagatgaaccggtcattcttctcgagattgggatcaaagttgttagcaattactttccaaagttgttgatgtttactgttcatgtcatttagtaagtttattaacagcttaaatatagtattgggatgaataatgatcagtttttttggtgatatcagccagtctgagttaaatttcattattttggccacaaataaagattttggtgaatattctgggactgatgctatctcctatattattttattctctcctgaaagattttggtaaatattctcgttcaaatgatatttacaaaggctgtcttgtaaatatttggctgtttaagtttgctacgtgtctgttggacaagtctggatgatatatatatatatatatacacacctcaaaactttttgagttgcaatatatacacacacacacacacctcaagactttcaaaggatttgtcgactaggtttttgaatcctttttagaggaactctgtggattttgagatcatctaggctgatttcggctgactttaaattgcggcatgtatctgtttatatatttatatatatatatatatatatatatatatagacttgtcctatatatcgtccagacttgtccaactcaaaaagttttgatacacacacacacacacacacatattttgcagggtgtatatatatgataataaattgcagcatatgtatatatatatagacacctcaagactttcaaaggatttgtcaactaggtttttgaatcctttttagaggaactctgtggattttgagatcatctggtctgatttacaactgactttaaattgcggcatgtatctgtttattatcatttagaatcaagaatcaagttttctatccaatttttgagttgccctaattatttttcgttggaaaacttctttttcttagtcctcacacaagcaatcattggactgacgtacttggtgaattgttggactattcacagtacaaatattttatggatattgaagatattggcgttgttgctgtcgtcggtgatatgtgttaaatccgttgtaaatctctgtgtggatgaggtataaaaggcatggtcaatgtttttgtaactattggaactatttaagttaactcatactgcaggattttgaattgaagaaccaggataatgtaattatttatgaaaattttgaaatatgattgtctatcactatcatcccatgaattatctgtaataatagtgtagtccaatattaggatgtaataaagactaagagatcccagaggatcgaaacgacttgtgagttagacaatgtgtttagcttggtttgctcaactacttttatttgtctttcttggtgtggtaaactatcttctggtctctcctgaatttgacttaaatagctaggcagtacacttagcatgtcctcaactccttttttttaaatctttttagagtagttttagtctttagagtaccgaactggtttggtgatataagatgtgtggatgtgtgagtggttgcatggcagttagactgtttggatgtagaaatgaagataattagccacaccttgttgcaggcgttgaggtgctgacaacattggcagaaatgatgtgttgtggaatttctagtgtgtgctcagctgtgactggtcttgctagagattatagtgcggctgagtagcagcaatctagtgataagtagtcaccgtaatagcatcaacctttgatatctgggcccctttggtggttgggttttaccaccaagttaggagtcatggatattttcctttgtctatgattaatctttttttttttgaatacttgtcaatggttaatcttaatatcaaaaagctcaaaacagtgcagatgtctccgacaataaattgctaaattcgtgagatcacttacttgagatgtcaaatcccagaagtgtcctatcctcagtttaaaactcaccgaattgtagaaaagtataagaggctgcaggtagtgaaaaggaatttaaaaaaaaaaattggtgattgtgttgtggagtttaacatttttgttccgagtgagcagtatcgctgatgtttactgccctttcactttctatgccagtgatctcttcagttttctcacgtatttggtctctaaaatctaaattttcaggtggctgagagagcattgttctt

SEQ ID NO: 9245 - DNA, 692 bp, Citrus clementina; identical to SEQ ID NO: 8909
  Intron number 9 from transcript clementine0.9_015147m (loc us clementine0.9_015147m.g) derived from phytozome v7.0 (c hr-ID scaffold_28; pos 851263 to 851954)

SEQ ID NO: 9246 - DNA, 1443 bp, Citrus clementina
  Intron number 1 from transcript clementine0.9_025281m (loc us clementine0.9_025281m.g) derived from phytozome v7.0 (c hr-ID scaffold_6; pos 2004185 to 2005627 reverse strand)
actcgcccttttcttctttctcttggcctttggttgtcgaagccagcaaaaataaataactgctctaaataaattgtgtatagtgattgagcatggtcatgtccacagagatcggtaattatttaaatccttttaaaatgtaaaacgtaaaatgggggaattgttgacaataataaaaatcaaattaaaataataagaatgcaaattaaagttgtaattcaaattggagaaagctctggttgaaggaattaactcagcttgattcgactactgatcattgattcaaatataaattattactacttatgaatagaccgattatacctactgagaccctctaatagtcaatctcttcttaactagttgataaccaaggtacgaccgtttgttatttccctaatcaatagacaaccctagatacgatcataagatttaattaattgatagcctaaaaaaccagagacacccaaatcctaatcaacaaacgcatacgatggttcatttaaattagattatttattctcataacataactcactgctatgctatttgtcacaaacattaaaatcttcataccatgaatcctttaattgacaagagattaagttgataattaaatagtggccagttatctaattaacaaacataatcatcaaaataattcagagaataaacaaatacccaaaaagtaataaaacaattaaagtataagaaagatctcacagtagtgatgaatcaaagcttcattaaccttcaaccagaataatagatttagttcttcatagagagaagagaaaaatttagatctagggtttctttcttttcttgaaaaatcccctctttttcacaatagattcctcccttaaatactctctctctcttttcctctagagttcttttaaaaataaaatactaatatatgaaatattaaattcgtaattacaaaaataaccaaaaatacaaaacatgttaaactaaaaactgctggtccgcagttgacagcacgcgtccacgctttatcaataaagtttttctgacactcaaaatttctccaagaaaacaatcatccttaaacatcatcttttttaaaataaaatactaatatctgaaatattaaattcgtaattacaaaaataaccaaaaatacaaaacacgttaaactaaaaactacaggtccgtagttgacagcacgcgcccacgccttatcaataaagtttttctgacgctcaaaatttctccaagaaaacaatcatcctcaaatatcatcttgtaactcaattttagcatcaatcaatagaattgcacctacaaaaataaaacacaagtaaatcactattattaagtgcaaaatatcgatattaaggaaagtaaacaatgcaaaactagtgcataaattgcactctaacagccttcgccgcaaaaccctctttggccgctcgtcat

SEQ ID NO: 9247 - DNA, 1522 bp, Citrus clementina
  Intron number 7 from transcript clementine0.9_002199m (loc us clementine0.9_002176m.g) derived from phytozome v7.0 (c hr-ID scaffold_11; pos 3709609 to 3711130 reverse strand)
gacgattattgttcacaggtaagactgtccatatttctttgattgtttgtttttattttattttataatttttataatatttgggcaacagagatatgggttttggagaccagttgagtgacacacacacacacacacacacatgtaagtattgttcatgtttgctggtctccttgtttgctatgcagtagtaattgggtacttgctgactgccatgttttgctagctggtgggaattgggaagctaaccagctaacttctaatcctcactggaaaattgtgtagatcaacataatgaaggatttgcatgatactataattttcaggtcattggacttgtgccgaaaatatgaatttttaagtgaagtgcaaacgtgacccaagattaatgttatgacggataacattattttttaaatgaaattctgggtacccatttttttttaagtccttgacagatctgcacataacttgctgatttgccaaatgggaagttatcttttgttccttgtgtatgatggcatttgttttttttttttaacctgaaaacttgtttgtcttttcaacttaaagagtctgaaaaccagtacttctacatttttgcccttacaaattttaaatgctaaataaataataaatatttcaaggaacacaaatatgatagtattttatcacaacataaatcatgttcaagtgaatgcctttaatattctaaataacgctaatttaaataatataaaaggataaaaataataataatctattattatattatcagttatcataagttatggcataagttatggatatgaataataatgctaattaataagttttatttaggtaacgatgaaaataattaagtagatagggttatttttagagaatattttttcctaatgtcattcagtctttttagatttaagtaccttagaaaattgacttaataacttaatgacttgatgactgaaaattttcattaagttgaaaaaacaaacaaactttttcagatattttttggtattcattttagtgattcttgaggtcacaatgttgtgaactttacagtttctccctgctaagctcttgaaattttgcttctacaaaaccggtgtgtgagaacatttgttgttgagttttttttttttttggtaacttaggattttagctactagaattaaatgtgggattctgattgttatattccacaacatattttattagtagtgtatttttttttctcctcgtaatgctttaaagctattaaattgaataaatgactgcttttaattgtctgctagtgaatgtataacaaatctggatgctttgctgctcttctgctcttttattagatatttataatagtgcatatcttcaggtttgcaatgttctttatttacatccctatgttctcatacaatcaccatttttcagtatcttaccagactgtcagttgtgttctcaaacagataggtgtaatcttgtactattgatgtaggttcctgttagacacctagtcttt

SEQ ID NO: 9248 - DNA, 741 bp, Citrus clementina
  Intron number 4 from transcript clementine0.9_016973m (loc us clementine0.9_016572m.g) derived from phytozome v7.0 (c hr-ID scaffold_29; pos 982066 to 982806 reverse strand)
atttactatcctttctgggtaatttggagtacaaggtaagttcagcctccagcgtaatagacaccccttaatacatgttggatttctcaatatcttatatatcttacttacaatagcacagaatcggaaacaataatgtagctgagtgtccttggaggacaagatactacttgtagtctcattcttagtaggatttgatgactgatttatgaacctccctaaactatattgcaaatgaagttctggaaaagtgaagatacaatacttaaaagaatagagaaaaatttacttgagctaatttttgaaaccattactcagcaagaagatcactgtatggtttacttgtaaacattgttctattaaggcagctcgacaatgttatccaagttcttgccagcttcttcttctcaatctaaatttatgcagctgtgattgattgattatatcatagagaaagatttgtaactctcttttttatgtactgtcttcatttaatttaaattagtaggactagaagaccatcaggcatacctcttgtgtaatccaaatggcatgacaaatatttagtatacccatcagcatttatggtcatattggtagttgagtgacatgtgcccagtgccagtggtgaccttctaccgtacaatgcagtttacatgaaaaaatttcttgcattccttgtccgtattggttcaaagtagtataatctccgcattttctttttatctctttatcacagct

SEQ ID NO: 9249 - DNA, 1461 bp, Citrus clementina
  Intron number 7 from transcript clementine0.9_002944m (loc us clementine0.9_002944m.g) derived from phytozome v7.0 (c hr-ID scaffold_21; pos 3433459 to 3434919 reverse strand)
gccaaatttgatttaacagtaatgttgcaactcactatatacattggcatttctgtttgtaaacttagtttatttcctttcaatgaacatatcattggcagttttctgagtagtcattctgcattaattggaaatagatatttttcgctacagttgagtgtcgacagtggctttcttgttttagtagttttagctacttaattctctagcatctcttttggaatatggtattttgctaatttaatgactcagttctaagatgccatgagggggcaccatcaaatcaaattacctttgagttttcgaattatagcaaatattgcgtattggatatactttaactactcaatctataggaacattttcttgcattataaaagtctagttttggctccattttggataatataattcctgtatcatcaagttaacatttatagtagaatatttgggatttttgccatctttaacagcagtaggaatactgactttggagagggaacttaatttggtgtaggtatgtttataatttagtatggactgaatatagaagttaactgaccatgatagagctattttatttttttgtagcattttagcctttttaccaacctttattacttatacaatagaagcttaaaaaaatgaaggaaaagtaaaaatcccattaaggacagaaccacaagagcatggtggctaataggtgagcgaaaacaagcagaatgttggctaaattatttgatcaaattagtatgggtgcttaaatggaaattatacaaaatataaacagatttttggtgaccatccttcaagtttaattaattggaaatctattatctcttgatacatgttgaacttattgtttttggtggtcagtacacgagtcttaatttattagaaaccatatgtatgtataacttctctctgtcgcatacacatgcaggtttgcgtctcataatgatggcctgcttaatcagttacgcaaacatctttgaagttttcacgcttcttttttttttttttagtcatctttgtgcatatatgcttgccatcactttggtaatataaagaattgtatgtttcattttttttttaattgaaaaagtaatatgaattgtatgccatccaatttgatcttgtactctttgtaacttataatgttaggatgcatattctgtagtactcaatatgttcgtttccgctgttccccagggggagttttcatgtgaaatgctattctaacaatggaaccaatctgtatttttgcatgataacatcgttttaagaacttttgtggaagtccccttttctcttaagatatggttgaaacaaatctgatttttatttttacattttttgtggattttacttgcatctttgataaagtgactacagggaaaagttttctatgtctttaacactttcatatgtggattgtgattgtcactttatctgtgcagc

SEQ ID NO: 9250 - DNA, 3271 bp, Citrus clementina
  Intron number 2 from transcript clementine0.9_027748m (loc us clementine0.9_027748m.g) derived from phytozome v7.0 (c hr-ID scaffold_104; pos 594757 to 598027)
tatatattttatagatagagtattttatacttataatatataagtaaatgattaaagtttcattttgatttttttatatgtattttatagaatatattattttatattagtaattatgttgaatgattaaagattggttaagtggagaaatttggtggagtggaataataatattgaatggttaaagtttggttaagtggagaaatttgatagagtagaataattatgttgaatgattaaaagtttaactaagtggagaaattagtggagtggagtgattgtgttgaatgattaaagtttggttgtatttttaatttaattcattttattattattttctttgggtgtggcttatgtgcaccttgatgttgtataaatacctccctctcattttcatttaaaaatttttcaagaagtgtttgagtaaaggctttaagtttcaaagtgtagtcttgagggaaattcttcttggtgaggtaaatatttattatctttcaaatttttaattttttgtacgattctaggtaattaattgaatgattttgtgtatatattttatcctgagattgtgaacagtatagattaaggcagcgtttggttttttatctgaaatctgaatagatctgaattagtatgaattcttaatagtgctgattgtctgaatctgaatagcatatttttttttgtctaaatcgctaaaaataagtattaagttatttttttaacttaaaaaaatctgaaaactagtatttttatatttgtatccttataaattataattgttaaacaactaatgatgtcttaaaaaacataaatgaaataatatatttttataacataatcatgctcaattgaatacaaccttctaatattctaaattagtatatgttactcaattttattgtttttgtgatgatttataagaaaaatattcattaaagattataaagataaataattctaatttaaagaaaataagaaataaaaataataatagtctaccactatattatcataagtcatagagaagagtaataatgctaattattaaacttatttagatatggatgaaaattaattaattagatagggacattttcgagaatttttttaatgatgtcatttagacttcttagatcaagtaaaaagctaaaaaaaattatcttaataacttaataattgaaaattttaattcggttgaaaaaacaaacggacttaatgacttaactgattgcaattaagccaattaaatcattaagtcaaaaataaaaaataaacagcacttaagtgcttcatgattattattttcattgggtttcatgtatgaagctttatagtttattaaactagacatctttatctttctatccatataattattgttcaaaaactcattgtatattaattgttttgatttttcgaatttaaaacactggtgatgaaaaattctgattttcagcagcaattctcacttctataatttatttcataacccaaacgacttttgaaaattctgggaatttttattgccatatgaatatatgtctagcttttgtctatttaatttagtaatttttggctctatataaaaatcattaaaaatcgtagagctgggctgccgcaatcttggaaactgttttctagaattgcgaaggagtgatattgaagtgagtttgggttacgttttcattagtaaatgtattataaattttaattctgattccctattgtctcctctgatggtcaaaacttgaatcactatttttgaacatgtatatctaaagttatgaatgtttgaatcagcagtcctctgtttacattgtcactagacagttttgatgcttttgtggaaaatcaaatttcagagatgtttataaactctaattaatcttgttaacatttatattgaatgtcaacatattcacagtagcttttgtaatattcgtgatctttccgacataattataacttcttaaaaatcagcttctataagatagtcgagtggagtttggtgaattgatatgtttaagttagagttaatggtttaaggatgttgggtctcctattaggtcaaaattgaatatgatattgatgagaatctcatcttgataattataggccaaaagtgagctcgtgtgtttggggttattgttgggtggttccgattgagttaagcgaattcatgcatatatttattatatatatgtaattatgtatgaaaagaataatattgttcatatggattggcaatttaaggttttgaagcattttattgttatagtttataataatgagttacattttgatttaaagtttatttaaaatgtttttcttatatttgctttaaaaatggctttaaaatacttgtgttccatgcattgtttttccttaaaaataatttttaaaactttgctaattaaatgttttgtaagagtttttattgatcgattattgaatgattgatattaaaagattgaaaattattttaatattttgtctcattattcgtagttaccgttattgatatcactgtacagttaactgtattgtgcgcacctattgatgattattgcgcggtaaagtaccctcattgaactactagccaggacacggggattacaggtaatttattgaaccactgaccaggttaccaggaatacgggtgacattatgagatataagcaaattgaacaaatgaaatgttttattgataaataatttcttaaataattatttattgaaaaatgattattatgttatgacataattgattttaagttttaccgcacatatgtatgagattataaaattattactaatttctaatttaagacacttcataatgattattatgtactttattgttattaataacttatgcatgattttacttactaagttgacaactcacccctcgtctccaatattttgaaaattaattttaaagatgtggaccttttggtttagagaagatgatttgttagtcaaaaactttggacattttcgtgatgaataaattgttgctattttagttttttatttaaaatcgaatttagtattggaagattattgttatattcattgttggagactatgtttcacctatggacattattggacgttattgatttttttttttttgggaatagcaataagtttcaatgttcagagatttcattccaaattcctcttgggttcttgggtgaatttgaggtgttacagctgtcttctcgtttttggtcattttccatttccaggactccatttttgg

SEQ ID NO: 9251 - DNA, 4468 bp, Citrus clementina
  Intron number 5 from transcript clementine0.9_016267m (loc us clementine0.9_016267m.g) derived from phytozome v7.0 (c hr-ID scaffold_17; pos 1934330 to 1938797 reverse strand)
tttctctccaaatcattctagaattgtcttacctggtatcttggactacaacttattagacatagatttaagtttgaactgctagtctgttatatcatgaaagacatattgggagattttctcttcattatgggtttctgaagttgtactttaattatttttgtttcatattagctttgaggtgctatgtactgttttcattcggtatcttcttctgcaaacatttgcaacccaattctccatgttagaattacagtttgatagaacttctttttgctcttgttcatattcatgaaactttgctttttgttcaaataatcatatgaagagatcagatatttcttcctcttatggttttcagattcaagatttttgtttaatatctgtcattgtggaagttaaaactatagaaaatgccggtgctttcactggttttagcttttgtggggatatgaaggcaggctttgttgatcatgtttaccaaacattggaattgggtatagagcttgataaacaccttaggattataatgagagttgactttggctttctggtccttaaggagactgatgttcaaatttgttttccacactcatcattagtgtgttaggtcaatcttcccaaactgcctgtaatcatcatggatgataatatgttctgaagtctctattgcagcttagaacgtcctcatgtagggtgttgttgtcacctgtattggtatctggcctcgctatagcttctctgttttaacctatatactcttcttgtctctcattacaaaaagaactgacggcctgtggagaccagtcctctctttcatacttgtgtgtagttatgaatcattattattacctccaaataatagtcattggagaccagtcttcccctttctatgtgaatataataataatgtatttggttaattattacatttgatcaatactcgtacattgatattcattatgtaatctccccactcacacaaatgtgtgtttggataaaagaatatgctagattgtgttcctttttgtattattattttagttaattaatcatttcatggtttctggtaagtatttttcatctagcagataaccactggtgtaacctgcaagttagttatgggttttcaaacaatattgagaatatagtagatgaagaccataacaccaagggaagtagttgggattagatgagagccggccagcaggaagtaaattacatgtctatctcctgaatttagctttagtttgaagaccttgtcattagtgcaggactgcaccctgaagtttataaaccttggtctggatgtctaatatgcacatgatacttgtttataggttataatgaatactagttggtagttgctaccatgtctatgatgttgacttctggccctcatctaagattagatgcaggtaattacttttggttatatagagcatgatatgagattcatggcctcatttatattcatggaggatgttaaaggcatcaaagtttagctatatggatcactgacgttatgaaaatcatttcattatttaaaaatttatatcctgatagctagtttttaaaaatttcagaccatatgattttctttatgaattttaaagttcactgcctaactgtacctatgtattggtgtttagctgtcccacattagctactttaaggtggtcacattttcctataattaggataggttagtccacctagaaggcaagtctttgggttggatatctagatgttcgaggcccaccctgtaacaagtagcatcaggcagttggtgttgcactggccggcaagggtttcattcgaaaggaggattgttgagttgtccgttattggctataaaaaggaagagaaatggacacttatatataagatgggctggtcactccaactgaagggcagttgttgtcagatacctagatatccaaggcccgccccctaataatttgtagactgttaaatgaaatgcttcagaaaaatatttcttacattttgaagctcacaattcaatatagtaatctgtgttgtactactgataaggctaatggttagaataataagagcaagaatcatcgtcattttctctgttcagcatttatgcaattaacactcaatagaggtggacgttcaagtctttagtggttagaatgtagttctcttcgttttgctaggaggctagttgtgttatttctttgggaggcatgcgtggctgcatcctagtgtgatgaaggttttaattcgtattcattattcaaggaagatctcagttttttgttctttgacttgacatgtaatattttttatttttcaccagtggtgttgccttgagatgttaattgtgtcttgattttggtaaaaccaatattggaggcttgtgttcggtgcaaataggcattcagttttgtctgatttttactgattagatcaaaagtttctagcaagtggaaggcttagtttgttcgtgtgctaagtactttagttttagatggttctaaggcctaatctccctctttctccccaccttttgtttttcgtatggcaagtgtcgggagagttctatttcattttcccctagatgatatccatgaagatgttcttcagttattattcccccactgcagtctgttcagttcattggcatggtactatgagtactgggaatgagtaagtcgcagaattatgggggtaagtaaacttttagttatggaagcttttttttctggagttggaatgctttttgattctgccatttgaacgggagtgggactgaggaaaaactttcttaaaggattacatgttggttccatctagaaaagctgccgccaattactgaaggaagcttatccattgcatgaagttagcggttagttggcaagtcatgctatgaaacaaagctgcgggatgaatttctggtcaagtaagtgacgctatgttctcagaatatcatctccttcattcgattatcatttgtgttttccttcattggttgtgaccaatgtatttcttttccttttagattggtgccaactcctcttgctagtagcaaatgataggtaggactcttgtggtccgtgattgagttggtagtttttgtaattataaagctcctaaatttttaactttgtttggtcttgatttaatatcaagaattaatgctattcaaactttgattttatcatctagaagtatcatgtatgagttgtcacatgaatgcatgcttgcatcattgcagctatttagcttatgtccccaagcttatgatgggaaagctttgaatgagtgagtggttttccaattcacttggtttctgccatacctgtataattggtttgggttagtgcttcttcattgcaagtctcaatggaaatccagtgatcctgagtggcaaagtattgtagtatgatacggaaaaacaattgaagcagattgctgaggatttgatgtcagttttaggtacttgtggcttcaaatagaagcgaagaggggtgtttgtttgccataatcaaataaattttgtgaagttgaactactgtcattatactgcattgacgtcatggtgatggcaaaacaaatttgacaggtttaccaagttagaggtttaaaggaaattgaacctcaaaatggaagtatcgtcagttgttagttactgtacttgtcatccttcttccaattgttgttttgaattttcccttctgtcctgcaaattgaatgattttaatttgttttgtatttgatgtattatgtaacatcttgctctctatctctacctctctctctctctctgacacacacagacacacacacacacagagaaaatactccttttttgaattgtggtttaatgtatgaattgacttaaaagtttgtgctgctctttttctgcttctgcctggaatcttatgctgtatagatgtaatcattatgttctatgctgtttttttcctttcgtgtgtgtgtgtgtaagtatttgcatgattattttacatgattatgcatactggtatttgattttatctttctagtctcctgagagctttatattcaagaaatatggtattggtatttttgactggtttcatttttttttccctcccactttttcttcctagagattgatagaaatagatgtgccacaaatgatgtgaagctttattattcattaattatttttcattggagttctttttcacttttgaatagttatttgtgcaatatcactaccctgattgatgtggttatttcacttgaatatttttgtttgaatctaatttcctttccttgccttcataatcaaataaatgaataagcattattctgcaatttagttctatattattattattctctaaaatttaccattagttgtcttgcctcataaataatttgttctcatgcccttttgtgttttatatgtctaggttcaagatcttttgggctcttcaaagtcgctgct

SEQ ID NO: 9252 - DNA, 1067 bp, Citrus clementina
  Intron number 13 from transcript clementine0.9_003476m (lo cus clementine0.9_003476m.g) derived from phytozome v7.0 ( chr-ID scaffold_59; pos 1134048 to 1135114 reverse strand)
aaaggttacttcaaggtatttctgtctctcataaaactgacaactttttagttcacaactgatgcattatcaatttgtcatagaaaaagtttacttttgcaccttttttagtacaaaacttgcttaaattttttttttcctttatctagtcatttaaaccttttggaaatatacatttgaagtagatatggaaattggcccatggttgttacattactattatcgatatgaaaaccatttccccttccctcgaaactgactatttctcggcattggtctaatgcatttgtcttgtatgcattagtgaatgtggtggtcactctgcatgtgtgtgcattccttataatttgtattttaccatatccacaatgtttagattatcatagtggcactgattttggtagataagaaagcataatgttatggaccgcccaattttgatccaagaggttaactagacaagcatgcaagtcttgattctaggatgttttaatctagaactctctttaacttgtaaatatctaggaactctccagatagtggtacaatgagagctctctagcattttgtagatagaaatctctacagtttagtagaaataagggttctctaagtcatgggaattctctggaatagaaggttctagaatgttccaaggcttggcccttaggatttcattcaagcaattccaagcattctctagacactcaagcattgtatggcaactcacttgtacacacgcactcttgtgaacaatatactcccttatctttggcttaattgcacactagtcatatttcctctctttctcttcccacaagcaaagaagctcaaggcttactgagcaattttgagcgagagttgtctaactgcccatggtgtactgcacaaaatactcatccgtgaccataagtttgagtaaaaggatactcaaatattatcacagttttaccactaatacaaactagtgtagcatctaatgtttatcttacattgatcattatgtctaatttgacgatttatgttattgttggactagaatccgtctgctacaaagcaagccttag

SEQ ID NO: 9253 - DNA, 1446 bp, Citrus clementina
  Intron number 1 from transcript clementine0.9_014961m (loc us clementine0.9_014961m.g) derived from phytozome v7.0 (c hr-ID scaffold_26; pos 1736363 to 1737808)
agtttcttgcaaccaaagcttgaaattttagctcggtatatattaacacacacgtaaaaatatccattctagtcattttgtttgtactgttgtgtaatgtactagatactatgtttattgttaattatgatttttgagtttcgtgggttttgttgtgatattttttcatgcgggttgctctataactagtgaaatctctgtgatttgacaagtttatgggttgccaaagagtttaagaattatttttcgtgtcatttttattattatgaattataatttatttggtgtttctgatttatttatttatttcttttcagttatgtatgtttatggttatctgaatataaggattgctatatatttcgtagtgtcttttggtttgagctgtgtttgatatggtcatggcaaaactactttttgcaaaggtgatttggtgtccttttctttagttgtgaaattgtagtgcatatttaaaaaattagtgattgattccacaaataaatctttggcaactgtttttgctggacttatcagttatgctttgcttaggggtatcaagaatcttgaatatttttcctcatttttatgtgggaatattccaccatatataccctttggattagtcttagtgaagattataaagtcagtgcctgatgctttgttctttagttgaaaatcatattttacttaatagttttgtatttccttgtaactaagaatagttcttttgtcaatgtgtccctaaattcaatgtaaatgatgttttctagaatatgaaaatcaacctgacctttagttcagatcctcactcggttttgtagtatatgaattttctatttctcttgcaatttttgttatggatcttttgtgtctgaatatagtcataaatagtgatgattttgtatcaccagagtattaaattgttacaagttctcaattaatgtataccatgtgtttgaatgatggtgagacctaaactggtgcaaatcatagtcacatgatataaattttgaccttgtactatgtagcgttataacgttcaatcatggcgacggaggtgatggatcttcctcgaagaacttgacatgtttaaacgttgcattaaagttctttaagattttcttgatttacataagacaaaggattttagttaactagttttatgcttttaactttggagcagtaattactaggaagtcttttctgctgttttgttgataaacattttcttgcacttggtttttactacgttcttttgagttttgagaaagagaaaaaatttagtgagttgtttattctgagtgtgaagttagataaagttaattactttgattgattaacttcacagaatgttgcctattaatttagacagccaataacaatcaatgatttatatttttgcttggtgcagaaataagggaataagttttgttgccattgatcaga

SEQ ID NO: 9254 - DNA, 1798 bp, Citrus clementina
  Intron number 2 from transcript clementine0.9_003035m (loc us clementine0.9_002803m.g) derived from phytozome v7.0 (c hr-ID scaffold_20; pos 1849409 to 1851206 reverse strand)
tcggtcatccggtgggtatcaaagcggtccatctggtaagtggttaactgctttttaaccgctacagtttcaaatttatgatctgatttggtcctcctgtactccaaatgttagtactgtttttttaccgagtaatttgttaaatagttagcaaaatatgcgatgaatattctttgcatttgagttttctgaatcatctaaattctcaaatacactggtgttgttctatatgcatctctctcttactcaccagatgaccctaattaggagatttcatgcgaaagggaaaaaggaaaaaaagaaaaattgaaatacttgttttatgggcttgcttttattgctagtctgagttttttatgccaaaaaaaaaaaaatcacatctatactaaatgatattttgttggccaaaggagcatgtaatttatacctaattgacgtttgtcagaagagcattggaaaaaggtgtcctattgtaggagtgtgcacgtgttttagataaggaacagactttcatagaacaattctgtggtttacagtgcctttgtttaggcatgttcgttttagcgtagtgaccaatgttagtcctggcttgatataatcacatagatgatgtgtgtatgtatgcatgggtctggttgcatgcttcttgttgcacatattttcaatttttcatatgttgtgaaattttcttatcttattggtcaactccttttcaaagatgggtttgtcaaattattctggttagtgatatacttaaaatggacctaatcaagcatgtctgttggacatggcacgcacatataaattgtaatgtgtgtttggatctttgacatggagcatctactttggttttcgactcaaggcattattgctatctggtgcaacatacacctgtagttagttcaaattggtggtggtgctgaaacttattcttgcgtgcttcgatatggcataattttgaaaatatcgacatgcggaaactgttatgtgacattctgaacgtagatggtgtaggattatatggatatgaactaccctatgatttgtgataggtctcctattgagatttggtgtatacatttaattgtatgtccttctgaccacatatatacattttaactatatgagaatgaaccttcatttgccatgaacgtgtagaaagaaaattgataatataagatttcggatcttatatgattacatctttgtagcattcttggttattagtagcttgtatgtaatattataaatatagcttttatggatatgcttggggcagagtgttgcgaaatttcctatcacagttattattaaaatacgtgtacagcatttgcttctgcaccatctgtaggaatgagaacatgttaaaaaatatctaaggaattctgttgcatattgcaggccatatgtgtggtgctgatttgacagatgccatagtttataatctaaatctcgttgttattagtagctcgtatgtaatattataaatatagcttttgtggatatgtttggggcagagctttacgagaacagtttgattttaattttctatcacagttattattaaaatatatgtacagcatttgcatctgcaccatctgtaggaatgagaatatactaaaaaatatctagggaattctgttgcatatcgtaggatgtatgtgtgattctgatttgacagatacaagagtgtatactctaaatctcgttgctgttggcaatttctgtagtggtgcagaaatgtatatagcattcatgtttgtttttctagtagaactaattcggttacttttgcaga

SEQ ID NO: 9255 - DNA, 3035 bp, Citrus clementina
  Intron number 6 from transcript clementine0.9_015711m (loc us clementine0.9_015744m.g) derived from phytozome v7.0 (c hr-ID scaffold_149; pos 196843 to 199877 reverse strand)
atctctggatcgtaattttagaccattggtaactggtattctctctctctctttctaagatttttttgtttcctgctgtagcggatttgttgtcatattgtgagctcaaattagtgaaacgcttctctactttatttttaatgggtcaagaattgtttatccgttcagtgatcagctaagctaactttcctgtctactgcctgttttggatatattgaactgcttttaatcttacaatgaccttgcctctgatggatttctgtgtcctgtcaattatccgctgctgccttctgtacatgtttcttgtagtttcatgctcagcatgtgctttataggttgggacaatggactgcataataagaggcaaagattgttctaccttagtactatttcttatcttaaaatgtgtttcttttttttttttttggtggttgggggggtttaaaaaaaagaaaaagaaaaagagaacaggtacagatgcttctctctggttaagccaagtcaattactatatcctttgttacagtgaagacctataactttggccgcaggtaggggatgggtatgctgtacaccatgaaccccgtacctaattttagctgtggttttgttaaacagtcaaaatactgttgtatccatagttaatcatacaattggttgattacattgaaattgtttgtcactctgcactttctatatgattcgtgagttgcatgcaaaaaaaagttaaagataagactaagaatgactgaggaaaagaagagagaaacataggaaatttagcagctaaagaaagaggagcattggtgtcctgtcttgtgcaattatatatgtaagcatctataaaataaaatatagaaagatagccccggaataataaccaatactcatgtatttatatcttggaatttcgaaaatatctctccctttttttaacaataagcaaaccttattctattaaatggttattgattaaagtgggaattaggatactggcataaagagaagttgaaaacctaagtgtcttctaagatctcattagactaagtgccttaccttataggaagcatggtgtcatggatttttcttctatcgcgctcatctgtctgtgtgtctcattctgtttctagtgtttcccaattctactcactttttagctggttttagtaaatatcaatcataaaagtagccttataagacattgattaccttcccaatattctattccaatagttttacatcacctctgatgaattcacaccactgccaagacttcacttcattcctatatatttcttcttaattcattctttgactctcaactgatgtgtaatgctctatgagctctgtttttgaactcctaataagtgctccgtcctggtaattctgtactttgatttgtgacattttggcaaatatatctctatatttgtcgtggatgagagtaaaagagcgctggtatcggtgctttatccttaaaatttcaaattgctttttcagatttgtgcataagagccatgtgtgttccattgaaattctttggatagaattgggtatgtctcttctttgctttataggttgtcttcacagattttctgccctgctgtctctggtttactacatcagaccaagtccaatgccagttttatgtcttatgtcttaagtccttgcactccgatttctatgtcagagggtctaatttcagagaatctagaggtcttggtaagattttgacaagtatttgtagttggcttgtcatgatctgggaagtagtgtcagcatttgatgtggtgaatgatctggtagctgatagtgtaccgcacgctgatggtctattagatttgacataagaaatggactgaatggcatcaacagctgggaagatctgaaagatacattaatttctgtctcaatgccaatacaaagctagacgacaatagaaaaaaccctatcaggtcactgtagccatattcatgcttgccttatacatggttgaggaaggataggcactgaataatttgcgaattcaatttgtgcaccaattatccttcttcttcttattttactctttaattttaaagcttccatttaggtttacgctagacctaggatatagaagatcatgaattgaaaaattacaacaacataacagtttgttaatgatcagttgctttaacaatgtggtagaaaatgagtagacatgtatgatttttacatgctaaaggtggttgcattgagttggattcaagcgttcatttattaagcaatccatgttccagttttacctgcttccgaattgaactgttaattccatcaagtgaggcaaaatgccatgtgattagtggaactgatagtagattagtagctatgctacaatcataaagtttaatcccaagtatttgaggcaaagtgacacagcatttgttcatgaccattacgtaggtgattggataatgaaattactgtactgaaatggcagtctgaatgcagcaccacatcactatgatccaagactttgggatacaaacattgcaagtatttatcattattccatagattagttgtagctctcctgcttggaaaaggttacacctgaaaatctgttcttccacaaggagttagttgactattgaatcatatgagaagagctttgttttaaggccttcattatttttatcattttcttactacccatgccatctgctagttgcacttgcacaaatcaatggaaaaaacactgtaagtttgtagtgttagcaaatcctctaaatttggggagctgtcattttctgcagtccatgtttcctccattcattgggggatattttagtgttgtctgttagaagaattttccatgtagcttgttatggttagaattttgtgcctcagatccgtgaacaaatgtgtatatatttgcagtgtaaatattctgttgtaagcactatactggttttattgtccttttgtatgaatcttattggtacctctttcagcaattaagcagtaatgttgtcttcaggacctgggaatatttt

SEQ ID NO: 9256 - DNA, 1037 bp, Citrus clementina
  Intron number 2 from transcript clementine0.9_006920m (loc us clementine0.9_005105m.g) derived from phytozome v7.0 (c hr-ID scaffold_24; pos 1929339 to 1930375 reverse strand)
ggtggtaagattctttggatttagattcaatattgaattgagttgtactgattttactattatctttagtcacgtcgaggcgatgcaattgaatcaaattaaaaagttgaaccatttcaggtagtttcaaaattttcgaaccaaatggttcaatattctctttaatttttgcaagaatcaaactgaaaaaaagtacaatgaagaacaaaactaaatataaatcaagtccaaccaaattgaattaaaatttggttccaattttctgaagtgatcgggttgggttcgattttatgcatagaagtaggcacttagttcagcttagaccgaaccgaacagaattggattgaatcaaaggaaactgaattaaattaagtctatgtttggtttaaaatttttcaaattaaatggtttagcgttcagtttgattcattttggctcttgaggaaagaaccacattagttaaaaaaagaaaaatgaaaaaccaaaccaaaccaaaccaacaataaactcaatctaaccaaaacaaattaaaatccagttcttgtttagttcctaatttttgaacagttcaggtttggtttgaatttagtttgattcctatttatactgttatacggtttagattcaaatacatattatttttctattcaataactactaatcacactattaagaaagccaagcataaagttcaagttagcactaaataagctcttcagttagaatcattacacatgaactctttttaattaagtggtaatatttgtatttctaatcaaagtcacagtaaatttgcatatcacttaaatatgaattgctataattgtatatgtgaacataacgattataaatgcacgcaagccaaaagaactttaaaaaaattagagtacaaaaaaaattagcactaatccaaactcatttttacgttgcccaaaacacttcattgtcatatattacctacaatttctacttgatttgtcatgcatcatcaaatcatcttgtgatgaagttcttatcattgcagacaaaagtttata

SEQ ID NO: 9257 - DNA, 1592 bp, Citrus clementina
  Intron number 2 from transcript clementine0.9_016138m (loc us clementine0.9_016138m.g) derived from phytozome v7.0 (c hr-ID scaffold_19; pos 2604358 to 2605949 reverse strand)
cggaatttgctacacccatcctgagaagctaccaggttttcctcttttatctatttatttatttattcgctaattcgttaaactagttttagttttagagaatggtcgccacctgaaaattttattattaatttgttgggttcattgtaattcgttcagaactagtagttcctcttgttttgggtggcaagtctattgggtatatgcatgatttttactttttcagacgaccgctcttagaaggcggcacacggatgcgctcatcaactccaaaccaagatcattttatttctcaattaccaaatgtcttgattccttattcgcaatgagggtcatctagcacattaggagttgctttcacatatgaatcattttttaccaattcccgaacattactctcttctaattaaagattttccttgtatcattaaatttagacccctataaaagaaggaaaaatttaaatgcaaactcttgataatgctagctcaaataattgatctcttattctaaggataacatacacatttacaaaccttatacatataattcttctctaatgaggacattctcactttataaaagtgaggatactgtaaaaatataaaaatatatagatttcaatatattagagactatttttttaatctatatattagtatctttactttgttaaaaagagtatgttttcatttgagaaaaattaggataatatttgttaaaatgagtatatataattcttttttaaggaaaacattctcactttgtaaaagtgaggatactacaaaaatatatagattttcatatattagagactatatttttttatttatatattagtatttttacattgttaaaatgagtatgtcttcatttgagaaaaaatatatatgtgtgtgcgcgctcgtgtatgtgtggtgacaaatgcctagtgtaaatgaaattgtaattttttttaacttgaaattgcttaatcaatgctctcttctggaagccttggactgactgtacgcatctgagatttcttttctacaatgtaatcgcattcttccacaaatcatggctgacatgcaggagtttaaaatacttcatgctgttgattctccaaattttttaattagtttacagggacacaccaaatttgtccttttctttttattactgttaaattatgcatacatactcatattattagttagtcacttagtctcttttaattactgttaaattttgataaagatcactttcttgtgaaatatttcattgtgttgtttttttttttttttttaaagtcactgtgttgttgatctccgaaatttgaaaaagaaaattaaaaataatttcaaccttttgttggataaaggttgaatgtatcagctttttaattaggagttttaatcgaaaaaatgtgcatactcacgtcattagtttcttttagttagtgttaaattgttggtagacaaacttttctttgaaccttttttattcccccgccacccccctccccccacaaaaaaaaccctaaaaaaagcaatatatctcacttttcataaatgtaaataatcttcttgttgatgaaggtgtaagcaaag

SEQ ID NO: 9258 - DNA, 406 bp, Citrus clementina
  Intron number 1 from transcript clementine0.9_003579m (loc us clementine0.9_003579m.g) derived from phytozome v7.0 (c hr-ID scaffold_6; pos 3146308 to 3146713)
acgccatcgagaggttaaaataataataataataaatcatacaaaacaaatatgtgcacatatttatagcttaattagagtattcttaaacggtgaagctactgaaactaaaagcataaaaattttgaaatatttccggaaaatttggattagaataagttaattttgcagcctaggaagcggaatgattgatttttttgttacgaaatatatctaagtttgaattaatttttttaaatacagtgaagcgggttggaagttaaaattttcaacttaagcaatttgcattagtgtttgattcgtacagatgacactgtttctttttagttctaaattttgttatttaaagtcgttattaaaattgattgttgtcaggtccagtgaattggttaattatatatccgaa

SEQ ID NO: 9259 - DNA, 969 bp, Citrus clementina
  Intron number 4 from transcript clementine0.9_018360m (loc us clementine0.9_018360m.g) derived from phytozome v7.0 (c hr-ID scaffold_1; pos 10090626 to 10091594)
aggaaacctaagaagcttcctggtaaatctttacatctactttagtaatctcctgcttggctgtgtagttttctggcttccagagaaattctggataaccaaagaatctataataatttaaggtgtgaagtgtggctcaaagtcacatgctttagtacccgtttcagtgacagaacaaatcacagtaatgtcaaaatgcttagacgtttggcaacacttgcattcatactcttcagtgtgcatggtattttactcggttttgttggaagtctgaatatcccagatgacaacatttctacgattttataatattttgcactagtttggtgttaactggcctcacatgcttactgttgctctctacttgttcccacaaatattttatacttctgtagaaattattgtgcacggttgaatctttttgaagcatactttctccaatttcatatgttattttcccaccttgataaatggacaatggctctatgaaaccaactcaacagattcttattatggaaagtgtgaatatgatcatattggtggttgagtaaccattctaaattgtagtattctcagttcttttgctctaattaaaatgagaagaatattaagatttacttcccatgaaattgctacaaaaaacatgtaacttaaaataaacggaggggttgtgttgtagctgaaaaagtatgttccaatatttaaaagtttaataaagagtagaagtgacttcaagttggaattgcaggcaccttagctagagtcaacgcttagctataaagcaacatgattacttttggctgtggtactcttaaatgaaaattttggggttgtttcacttaaccaaatattggttatgcaactcttgttacgaggattggtacctttatatttattgaatgctaactgttttgccatttgatggtctcatcaggggaggttatttccgaagagtattccttggaatat

SEQ ID NO: 9260 - DNA, 2896 bp, Citrus clementina
  Intron number 3 from transcript clementine0.9_005822m (loc us clementine0.9_004949m.g) derived from phytozome v7.0 (c hr-ID scaffold_12; pos 3253809 to 3256704)
gatctcgagaaaagggtcagaaggtctgattttacatgtttttatttttcttaaagtttatccaatttgacgatttatttttatttacctagatgtttttaattcttttcctaaaatttctatctatccaatttttcgatttattttctttgacctaattgatgtgaatggaaaatgggtatcatatgggtgctgattcagagggttttaacctaattgatttgaatggaaaatgggtatcatatggatgctgattcagacggttttaatattctgccttttacagaatgggaagtcttttatatggccagatactgccattgcagctgttacagctcttgagaaggcttcacatgatactctttctttggattttcagaagtataaccaaaaactgcggcagcttttgtttaatctcaaggttagaaggttttcttttggcttgtttacataattaagtacaagaagacatgtatagagacctagacttatttgcagcttgaatgaatacaatctatcattacattcctgctgcctgtggatacatgtcattataggggtgttcagaatccaatccgatctgcttaattcgtctgatccgtagaaatccgattcgtaaaaatctgatccgtggattggtggattggattggattgaaaatttgaaaatccgcagttggtagattggatatgaatttacttttgtagatccgtaaaaatctgctaatatacaaaaaataaaaaatatttatttaataaaaaagtaaacgtgtaaatagtggcattatacttactaataaataaataagttaaaatatagttatattaacaccgtattgtattttatccgataataatataaaataaaaacaattaaataaaaaaatataacttcctaagcaattaattttcatgtacggattgaaataaatgagatctttttctttttggtgtgttatattttgaaactttgaatctattttgtaactttatttaaacaattaatttatttaaatcttatttaattttgaatttgatcagtagtaaaatcatttttatattaattttttttatttacttagtttgtggataagacataattaaaaatttttctcctacaaaccaatccgcaaaatggtggattgggtcaaatccgcatccgatccgcagacttttggattggattggattaaaaatttataattcccaaaatcatggattggatatggattgatatccaatctgtaaaatttgatccgggaacacccctacatgtagggttggcaaattaaggacttgggttggactttttcaagcccaagcccattagataagaattgtaagggctgggcctgggcgggattgttgtaaacttgaaatgagttaataataatcaagttgttataatcaacaatgaattaagaaaaataaatatttcaaaataaaataaataaaagtttagagatttaattttttagtattggattctctaattcaagcacacttttaactaattaacacttaaaagagagtttcatattataattttaaattttttggttcattattgatatataaattaggaatttaagcttattttttttattgttccattatttttataattttaatttattattctaatttataatttttttttttttttttaaaatagagggcttgggtcggacctgggcttttttgcctaagctcttgtccaggccctcatgtgcgaagcccgacccgagcttttttgctatccctacctacatgtcaaccttttctcagtggtcggctacaaggctgagggttatgcaactacatggtttcttaattaaataagatgattgactgtattttactaccattttttccccctcaaagaatgactatacaatgaagataggttttattaactgtgaatgtcttttagatttgcctactaaatactatgaatgtcattagatgtagtgatggcaatggtacctgcaaacccatccaaacccacctactgtggataagtttgcggtttgtaggcgggtttcacattagaagttgaaactcgcactatgttgcaggtgagtttggtattaactgaatatctgatggataccggcatggatatccgccaaacccgcaatttttttatctcaaatatttttcatgtaattttaattgaaaaaattattaaatatataaatatataaattaaatatatgtaaagtataaacatgtcacgtgtggtgtgtacaagttgcaactcataacctaacctaaaagaaatccaaattatttctttttcgcctatgagcagcagctgcaaaacctatcattccaaactatttctctttcacccgtgagcagctgccgcacacccatttacctatcacttgtgagcagcagccgcacacccatttccctttcacccgtgagccacagccacacacccatgagtttttcatggcatttgtgttttttttatggatttatatatttcatatttaaatttaagaatttgtattaaattgatgttgaaattttaattttctatttatattgattaaattgagaattatgttatgtggaattttagcttattaatataaatttacatattggacgtttgtgattttaaatgtgagaactcgcaaaaaatccaccggataccattgcaggtttggtaattgtcacaacttgcagtgggtgagttttcttaaaaaattaaaaaccacagcggatgtaggtacgggtttggtaatagcaaatccgctgcgggtggtacccattgtcatccctaaattcatatgggtgtttaagatactattttgattgtttaatttttattttttgtattcttggcagagtactgcactgctagcccgacgtcttctaaacgg

SEQ ID NO: 9261 - DNA, 1818 bp, Citrus clementina
  Intron number 3 from transcript clementine0.9_012202m (loc us clementine0.9_012202m.g) derived from phytozome v7.0 (c hr-ID scaffold_1; pos 6072110 to 6073927 reverse strand)
ggcatcctgactattgcatctctggttattcctctgtaagtgtaactgccatctttgagtgaatgtttgggctgtttgtctaaatgattgaattgaagttaacagttagctcagttttgtagcttatttctttttctttgtttagtttcttaccaagaaaaataaatagataaatagcaattagggtttttgctattacacagatagtcatgtgtgtattcctctaatttggaagtagcatttacatgcatacatctgtcttgtgttttcttgtacatgtatgcatgtgattgtcacagtatatgagaatgcatgttctttctaagtgcatgttttttatgcatggttgaaccagatataattgggtcggagtagagattatatttagtagtgcttgagttcatgcagtacatctatttgttcttttacttattaaatattttaatttataattgaaacattcatctccacaacatatcccaaaaatggaggtaaacatggtttatttttcactccacatctatttattcttttactaattaaatattttaatttgtaattgaagcattcatctccatagcttatccccaaatggaggtagacatagtttattttcactccatatatcctccaattcttaatattccaaaagatggatccaatcccatgttttctacactgaccaaaaatgttccaattgtgcattacaaaatcgtattcacatggctgcaagtatattcctaaaataatttatgatatttagggcatgtttggttgtaggataaattaaaaaatggggattatatcattttttttttgtgcaaaactatttttggaaacaccaaggagacgaggataaattcggtgggcccacccaccatttttttaatactcttttcatgggatactcataggataacttatccaatgaatggggataaatatttttattataaatgataattattagttattgcagtaataaaggaaagattattttttgtagctgaaataatatattttttattggcctataaataaaatattcatgagttatttgaattgaaaatcttcaaaatcataaataataattttcattcacattgatttgaataattattaataaaaatttgagttaattataatacataatctattataatcttatcatatttatatttaaatcttattattataaattattaaaatgtttaataattaaattgaattatcgttcaaatattttaagtagttttcagttgaattaagtaaatagttaaacaattttctaaaacgttaaaattattttatttaatttctgaaaaaaattaaataaattaaatgactaaatgtaaaattctttccaactgaatcatgtactactcaaaacataagtccaatcttatccaatttagtccacaggtcatggagggcacatagttttgtatatctcacttgaaactttggtgtaagaaagaataaacagaacataggccgcttgctctttaattctgtcaacttcaatcaacagcattcattagagaaaatttgtttccagtttcgagatcttggtcctcgagactttggtatttctaatgtacatattagagaatatttgttctttctactgttcatatcagagaatgtattggattgggcattgtctagagtactgtaccttcattgctattttgtgtctgtaacactttctctgtcaaggcttgttatttttttctttctgattgttgtattatgaattttttttatttgatattgggattattatgctcattcccgtgcacttttcttttaaggtgg

SEQ ID NO: 9262 - DNA, 755 bp, Citrus clementina
  Intron number 18 from transcript clementine0.9_001064m (lo cus clementine0.9_001064m.g) derived from phytozome v7.0 ( chr-ID scaffold_28; pos 490376 to 491130 reverse strand)
gttggaggggagaaaactattgatattgcagaaaggtgagaacagcttctttctgagtttaaaatgaaatgatatccatctgttgttccttttctccccatttcccaaaaaagtttagatatttgcggtaaaaattgtgagtgagcaaccaagctagtcaaaaacagtggttgatgaaccaaagccttacatgttttgctgctcggattttagaaaccaaaaataattgccatcaatgtatcatcagcgaataaccatgaaaatttaaacattcagattatcaaacctttttattattattattattatttagcctaatggcatccaatccgctccccaccgtgtgaatgggattcgaaccatggaccttttgttttccacccaagagattttaccaactgagctagttgacacctactaaattcggatgatcaaactaaataagcaagatatggagatgtatggctggtattattatattctgcattcttgatggttttaccaccaaaaaagcattttagttgtcaaatcctaattatggaagtgtgaaaattttgttagcaaataggtcttggagtacttcccatcatttattgtctggacaaattcaatcaaattcagtatcccagtgctaaatctccagtcttacatatattaagtgcctcaatttgaatgaatgcacatgaaaatgattctgaatgtttattatttggttgacaggaccacccaagcaattgcagcactgttgagaaggc

SEQ ID NO: 9263 - DNA, 607 bp, Citrus clementina
  Intron number 7 from transcript clementine0.9_027636m (loc us clementine0.9_027636m.g) derived from phytozome v7.0 (c hr-ID scaffold_88; pos 151767 to 152373)
ttgcagattcctgcaaggaaacggtaaagacaaaactagcccttcaaaaaatatttttaaagaattgacgtagaattattccttagttatagatacaattaagtcttgttcacattttgcttgatttgaaacttttatcatctcttactgtcgttctcatgaggtgcgaaatttcgcacttttataaaccacggatttgagctaattattgataactagctagtgcatatacgcattttgaaaaagaataatggtagatattctaaattttttatcctaaatttcatcttaaataatgtattatttattgaatggttgataaatgaattaattatattatctaactaatcaattaatgaatgccactttatttaggatagttttttggaataaaagttttgggatgtgtagcgttattatttaaaaaataggacgttgcattagaaaatatttgactctacatccaacatagtaaaacatttttgtctccaattaaatattccgatttctatatatgttttgaattagtttacacacataaatatatatgatattgatacgtgtaattttttttttcttatgttaaaggacactggggttcatatag

SEQ ID NO: 9264 - DNA, 1272 bp, Citrus clementina
  Intron number 2 from transcript clementine0.9_012641m (loc us clementine0.9_012641m.g) derived from phytozome v7.0 (c hr-ID scaffold_6; pos 6494450 to 6495721 reverse strand)
aaggccctcaacgccctctgcgtcgcattatccaggtaatcctctttcgccaattataacacaattaactttcctcttctttttcattaatccacaatttacaaaatgcgaattgtagcaatacagcgcccttagcactaaaccgaagcagtaaaatagaatcatacacactgcatatttggcaccgaaactttaacttagccgcaaagaaggtaataataactctttctatttagcgaacgtctacagtttaatgagttatgggattgcagcaatacaatcctgttgctcttctgttcagctaaattattgttagaaaatcttaattacaaatttttaggaacaaatcaaatatttgttgccccaaaagataaaataaatgtcatttcatataaaaataaatcaaatttataggttgaaggactaactaaggtttggtagattcgaaaactttaacaagtaaagttataattcgtgttatctcaataaagaagcaagcttctgtgtattcaaatttctttagtgccaaacaaagatagcgatagatagacgaatgacgggggagaatcccaagaaatcaaataatagtgagtgagctgacaatgatggagaaactgtcccatgctttaccggacacactcctttcttgaataatcaactcactgagttaggagtagcacgtgattatcttttgtgatgtcatattttgatcatgttccacaaattacagtcatacatgggttttaagtattttttgggattgcaacttatactttgctttgctttttctttttggaactttggttcatatacagggttggatttagcgcattattgccccttcacttttcctgtcttttttcctctactttgttcgttctctaatagttcttgtacccaccccctgtatttcttttatatcttttttatttaagtgacgatcccaatctttgaacttaaggccaagtctctctctcttttatcaagctttaatggaagagaataaaaaaaaattttaatcgcctgaattactgaaaattttaatagaacttaagtttatatgttagtttataatatataattatttacatataaactcaacgttggattaaagatctaaatatattcgtgtctacaaaggataattttcaccttaacaaataaaaattttttatttaggatctagatatttgttattttataaaatattattgatcagtaataaatgcaattccagggcctagatccaaagatcacagccagcttatttgc

SEQ ID NO: 9265 - DNA, 1244 bp, Citrus clementina
  Intron number 1 from transcript clementine0.9_002014m (loc us clementine0.9_002014m.g) derived from phytozome v7.0 (c hr-ID scaffold_3; pos 161281 to 162524 reverse strand)
agaacccgttcttcccctcttcggaggaaaaaaaggtatgatttttctacattttttcttttaaccatcgtttttatgtgtgatttgttatttatttaattaattttgttggtctcttacctaaccatcagattttagtgtttgttgagtggatttattagtctgctggtctgggcatgttaagacaatggaaagctccctttctttttttggtgtttcattattgattgtgatatgcgtttgttaaatttatatgctggtttgtttcttcgtgatgaaatgggcttatatttgactagaaactttgattccgttgctactttaggactgtaattgattggaaattctgtgctagaaaatgtcatatggatgtagctttgacctcttacaaaatttctcttttgagaaattattagttttatgcttttcgtcgcttttttgtagtttaattgttcttaataaagaggatggtaatgcgtgttaaacattgcagattcttgagttgtgtgcgcgtatgcatgtcaacgtgtgttttttcataggtgggttgttgcttgtggaaacttggaagctacaggtttttgttagtgctttgctttctagttggtagtaaaatgttagctgtattgtcttgaatgaccatctgatactctactagatggccatcgacctttgaaactcttagcttccgttccttcccaatcactgctttagaagtaaaaattatttttattaatttttttgtggtcaacaccaattgttttggtggtggcttcatactcatttcatggccttgtgtgatctctgattagtctggttagagatcctattagcttcttttctgaagaataggaaaaggaaaaaagagatatcttgttagcttgactagaacaaaatgacttgaaaggagactgtgatcgtagtcatggctctatacgtaagttcttgtttctgaacttttcgttgactgttatactgtagttaggcatggttgaatcttttgatgatatgatttctggtttggatgttatgaagaggggccctctggaaaagtcatttctcacttggcttgttctactgatttactgataatattagaggaactaaatgttctctgagtatttttgttattaggtcagttgcttttaataatttattttgttgtttggccaacttgtttgaactctgttttccgttttgacattgcagattgatactgctgttcttcagtttcaaaatcaaaa

SEQ ID NO: 9266 - DNA, 1744 bp, Citrus clementina
  Intron number 3 from transcript clementine0.9_019593m (loc us clementine0.9_019593m.g) derived from phytozome v7.0 (c hr-ID scaffold_27; pos 1653147 to 1654890 reverse strand)
gagactttagaattggatttaccagctgtaatcacgtaagtactctgacctgacttttagtgttccagcacttgatatttttggggtatgcttgcttgcattttatatttctcctcataaaagcatgttgccaaggagaatacaacaatattctcttgttttctatttctgacacaaggcagtttttatatatggtcatatatgtaaaatgacagaaggcaatagtgtctatggtcctctaagtgaatatcctcttcttgaattacgttctccaagatagtactttctgtagttgttgagaaactaactggatttgttttcgaaacttattggtgggaatgaaaagtgaattgattacttgaagaatctgaggcctttctacggatgagtacttgtaggattgttaactaaaagtcattgttcctaagaggtaatggcctggccagagaataatatttaattgtagacagaagaatgtgtatttagtttgcctagaatactatattatttcatggaagtctgatgaatatttcaatggaaccagaaaggcttttggatcctgtgtatttggcaatactggcaaatatgattgaagttgattgtatgggaagtgatctggcttgtggacattggttggttttgaatttgatttggtctcacttgtgaaacattactaggaaaacctatttaccacaggacacagcttttaagggtgaaactaacctcctgttctcccagtgtttcatgctaccctaaggagttcctcggaaaagcattctgtggatttgtatctaattattttggacagcagaatgattacttatattgtgtgatgctggtgctatgtgagcttaatcatgagtgccctactgagttgatcatataatcacttgggaattaacaaatagttttattgaagacataagcattggaaaacaagtaaaaccatcctgaattcccgaatttgttgaaagtactatgataaaaaccaagaggaaaccccatttctcattcaggagctccctaggtctttagttgtagtggggatcatttactaagggtatgtgtggacaggttgggaaaattttggttgtatttgctaaatctccagcagttgaatgacaagtttaggattccaacaacttgagaaacataaaatcatattttagttcatcttgataatgctgccattgagcccttccctataaacttcagcttttactttagaatggcaactgaacatggtgtcactgccaatttgaccaaacagtctctgtttgaattctttttcaaattaattgaattataataaattgagcttgtgcttgtgtttgtagttggttctgtgtttatatatgtgacttgcaaatgagggggtgtgtttttatgtatgtaacttgcaaatgaggggtgtgtttgtagctagcaattttcacacagttgccctaaaagctgtaaaatcagttattctaaagtttgcctttcctcatcctggatgcatatatttttctttccatcaaagtttgttcaactcatgcaaggattccaaatgcttttattcttgtgagtatattgagatataaggcttcctgttgcactccatgtatatgtcttcccccaacatgcgtctgtctgcatgtggttgttttagtttgatccttttctacattgattacttttacttaatttgcactgctcatctcgtgcagcactgatttgagactcaaccaaccgaggtacgcaa

SEQ ID NO: 9267 - DNA, 464 bp, Citrus clementina
  Intron number 1 from transcript clementine0.9_029979m (loc us clementine0.9_029979m.g) derived from phytozome v7.0 (c hr-ID scaffold_29; pos 949108 to 949571)
cgctaataaagtcaaagatccttctcatctctccggttcgtcctccatactctttcaaatcttattttctgaaatttcaatttcttaaagctacgttcttttggatctgtactcattagcttgaatgtgagaggattctgccgcggattgtgtataatttgagtgaattttgactgatttgttgtaattatgtaatttagaatgaagtgcacttcatttaataacaagatatgaatcataacttcttagagtttgattttctaagaatctcgagaaattagatatgcgcaattgtcttttgtaagttggagttttatttatttaagattcgtagctgttgaatgaaaatgaaagtgaaaggaaaagtgatctgaatctctggaagtgtacctattcattttatcaatgaaagtttatttagaatctgcaaggtgtgaaattgacattgataacttatcgtgcag

SEQ ID NO: 9268 - DNA, 1563 bp, Citrus clementina
  Intron number 8 from transcript clementine0.9_000506m (loc us clementine0.9_000506m.g) derived from phytozome v7.0 (c hr-ID scaffold_29; pos 517500 to 519062 reverse strand)
aagctcgttatcggagatacaaggtttgcaaacttgcatgagtataccacatacgtactagttatgtttgtatgagtagttgtgatgcagattaggaatccctgttctatttaacttggtttccttattgtctaaagtttgttgttctatttcttaatagtttaagactttgttttctttttttctttatggtttaggataattactagtaatataaatagccatttcttgttgcctttgaaggcaaatttgagttaaataatattttcagttttcaaagtgtgtgtgaattttttagtttagttaattctcggcattttatggaatcaacgagtcttagaggaacctctaggttcacggtagtataaataatcatctcttgtagcctttgaagacagatttgagttcaataatactttcagttttcaaagctctgtgcaagtttatgagtttagttaatttttggcattttgtggaatcaacgaatcttaaccctctaggttcactgtattcttttgaatcaacgtgaatttagatcgtttctttattttggtattctcaagaatcaagaaaatattagaacattaaacttctttgcttctcttgttgtaatataacttacttttaaaggtttctttggccattgcgctagtgtttattgggaagcttataggttattgagttgttataatattttcttcttatctagtgtccaaatctctttagcacatgtttgggcgttagattaaatggcattctatgaaattgatcagattaatttatccatctatagataagaaatctgaacttaatccaacatcacccaaatagctgctatgcctcttagcccattaagttagtatagttaagacaacagtgagcaattttcatgttggtagatggtagtgcaatattaaaccgacctaatcatattacttcctaatggccaacaaacgaacttaaagtatacctgaaaatccggctccgaagatacgtaaattttggtcaaaagatgtataataagacataaactctggtcaaaagatgtataataagaaaggaaatcttatcaagtggcaaggttatgcaagatttctgagggcaatttgatttacagcttggttattgctaatccttggtgaaaagataaaacatgtttgatcaaaaagaaaagcaataaaagaaagtatataagaaatgtttagaaaaagagattttaacatgatttttggaagtcagcttgtcaatttaggtttcctattttaggcattcccggtgttatttgtggggagtgcttatgtttgggtgcttgacctgccctagttgatggaatgctgacataaatcttgttgctcctgttcacttggaaaaaccatcatggccaccaaggttctactcttggataagggagagacttggagttttcatccaattttctttaccttatcctttaacaataataatgcattatcaattctgtatttttgttttccataaatctctttgcaaattgacaactcgacttttcaaaattgtaggcaaattgtgctgtttgcaaagcag

SEQ ID NO: 9269 - DNA, 3005 bp, Citrus clementina
  Intron number 6 from transcript clementine0.9_003751m (loc us clementine0.9_003751m.g) derived from phytozome v7.0 (c hr-ID scaffold_25; pos 543825 to 546829)
gatttgcccggggtgatctatttcaggcttttcaggttattaaatatttgttaatttactacatctaagacctttttttatgagtttgcgttatttctttaacttgtatccatcttcccataccacgagaatatggttatagtttccgtactcacaggtaactagtagcctggtgtgtacttaatatatgttatagcctgtgaaaatggttagagatgaccattgggccgtgccggaacggcagctaaatttgaggcctgacacaaccaggagcatggcacacgtgagctgtggggccacaattttttttccttgaataagcctcaatttttatttaaatttatcagtttatttatttattttatttgttttatttgttttatttatttatttatttttggtacttggtagaagtgtagaactcaagactcctagaaaactagttgtccgtatccactaggctaagcaaatttaattgtcaagaatcataatgaaaatatataaagactaaactaaactataatgcttttaaattaatttattaatttgaaacatataaattgcttttaatggaacaaataaaaaattaaaaacatactataaccttaataagagtagaaaaacaacaaatctttcattaataatgcaaatttaaatctattttgatagcatgatttatagttttagaaatataaaacactaactagttatacaaatccaatttaaattactgaaacaataattaggatgacgatgtaggtgtcctgtaccatgcttcaaaatttgcaaaatgatacaaatgttgatgatgaagacaatgatgatgtcatgatgttcatgttgaagttgatgatgacgacagtaatgacattgacgattaaaatttaggaatgcttttagtgaataaaattgttgtaatatgcaaatgatagatagttcagtcattagtggtgccaacctagttaagatgtgctgtaaactatagtaatgcaaattatgccatatttcattttatttgtaatttgtagcttttcatttcataaaaataaattttattttatttatctttcaaataatgttatttctaattcaattgagtaatatttgtagttattctttaaaaattaaattatcaataatgattcaaatcattcagttaaatttaaattaactcagttaatagatgtattggtttgagattagaaatttagaatacaaagcaaaatttcaaatttaagttttaaaatttgaactttaaattgttaaatttgtatttcatcctataacaaaacaaaataagaaattaacaaaaaaatatttcaaaaatattgaagtgggcacatgggctcttaatgggcttgtgcttctgtcatgcctgaccatggcatggctcatgggccaaaatgcttggcttggcacagcccattggtgggttatcctgtgttgatgtgccgtaggaacatgggccgtacccgtgggctggcacagccccttgctcatctctaaaattagttaacatgacttatgtaatatgtattatttaaaatgtgagagcgtgtttggttctctattgtgctcattcttcttctatcaatattccgctacatttgaggggataatctatatccacattgtcaaatttactcttagtaagaaagtgtgcaaaggaaagaagttttgtttcttgttccccatcacctgaaacattttttagacattggtcggattaatcatttagatcttgtctctttatccatgtacttattcctgtaattttgttttttggaattggaggcctttatggtgtctgagcaggagtttaagcttttttgaatgtttttaagaagaatatttccgatcaaccatttccaactcatgaatttttagtgtgaggtttctgcaagtataaatacccttgcttttgcattacaatattaaaacatatgatgcagtggccttcattgttgcaataaatggttgttgtatcttatgattaagcactcaacctcaagaggaatcttcaatgggatcttcataaacatctttccatataccctaacctaatttgccaggtcgttccaaaattcatttgtatctatagaactgcatatccctttttgcatttgttctttccacatttgaaaggatgaaattccaagagtataacagaataattgctgattcatccttttcaattgaaaatgcagttggtaatctttatgaacttgtatcactttgacagttacttaaaactggtgctttaacaaagagtcaatttctcatgaggaagccctctctttattaaagtgaggaacaaggtaaaagactagaaaaacacacattccaatgcagtgttttttgtccgttagtgcattggaattttcttttttaaatttgttaggccacaagtgcgtttcacatatgcaaggcgcaagggtaattctggaaatacccatcgtggctgacgtggcattaagtagtatagagaggagtttgttatgcatttctgttagtaataagttgatggttttcggttttgataattagagtttttctgttattctattttggcgtagaagtgaggaggttatatgggaggagctggttttttggggaggggatccagagaattattttgtagtgagcttgctcattttgggagagataccaagcctctcgaatgcttgggtgttttgggtttatttctgttgataaatacaagttttcctacttccaacaacactctgctctctactgggttgtttatttaaccatttcagttctgggcttatcaaaatttttgggccttttagcttgaccttcacttcattaatgaggtcttcctcattagagggctcatttgaccaattaactatcttagtgcaattccaaacaactaaagatgggcttcttgagggacttgttttatacttcattttatcaacttgagttggctggaatacactttgtatccaattttaactgatatgtgtttttattgcaga

SEQ ID NO: 9270 - DNA, 1819 bp, Citrus clementina
  Intron number 4 from transcript clementine0.9_017922m (loc us clementine0.9_017922m.g) derived from phytozome v7.0 (c hr-ID scaffold_95; pos 823805 to 825623)
tcgcatcgatcttgtcctagttttgtccaatccaggtaacaattttttttattaattttaattttatcagtagtagggcttggacctacacctgaacctttagaatgcaaattttcctatcggacccgttcaaatatgatgaggattgaggcatgaacagtcgatgacgtttcacataatattgagagaaagtctaaaatatataacacgtcattctcacataataatttaataatttggacttatcttttattgtaaaaatttgtcgggctagttggcaacgattatgacttttatgcaaaattagtataactcaaaaactaaaaaaaaaaaaaaaacatagcgaacccagccaaaactgctaaattgaccgagttgggttgcatttgggataagtttgtattattttattaggtttagtagcttctaatccactaaagggcagttgctgtacttcatagagttagatgaaaattagtttcaataattatccgattgtaaatatcattagtcttgtggttaatttggtaatattataatttttaaaataattattgttaattacgctgtaaaaataatcaaaatgaaatgaataagttaaacattaaataataatttttattttgtttataataactgataactaaaataatttttttattttgtgatctcaatttaataggtaataataataatcttttaaatttaataattttatttcctaattgaataaggataattttggattttataataaatataaggatacatatgaaattatatttattataaaaatgattatcaaaatcaaattttaaaaagttactcattatatgcttttcaaaatctactgtagtatagatgattttgccaaaaaatttttttaaagaatttaccaaactccgcaatttgctttaatttttcaaaatcaattttgaacctctcaaaagtaattccaaacgtgcccaaaataacattccatttccaccaggcataattttcctttattagtggcaatttttttaatttggtgattgatgaaaataattctttatatatatatatatatatatatatatatatatatatatatatattcaagtacgaacgctttcatttttttaatgtggacacgctattaaatcatatgatttaatagagttagtgttcaattcactataatgctatatggtttaatagtgttatgacaaattttattaaactatatgacttaatagtatgtctatattaaaaaaaaaataaggacgcacgcatgagagaagattataaataatatacatgattttgctaaattacaattaatgcaactcacagcccacctaaaacatgcataaataagtataatggcagtgagatccacgtgatttttgtattgtttaacaggaataaaattcgctacaaaggtagcaactaatgtctgttaaattttcggttttgatattttgaagaaaacttttaataattgttaatttgcagcttttttttctattatcatgtaataaattttatttccagagaattgagtaattcgggttaatatagatttttgtcttatcaggatttcgtaatttagaagattggtaacttaattcaatactttttttctttttcgctacctaggaaattaaattcaactatacattaattcgaataaaactcgctacacattcttgcatgaagcatttttctaactaaatttgatggtatcaaattaatggatgatgaactttagtaactcagcacgaatgtgtctttttgggcagctacatcatttagccggtcagcgctgcaatccaca

SEQ ID NO: 9271 - DNA, 2169 bp, Citrus clementina
  Intron number 6 from transcript clementine0.9_001336m (loc us clementine0.9_001336m.g) derived from phytozome v7.0 (c hr-ID scaffold_6; pos 272474 to 274642 reverse strand)
tttggagattaaaccaggtattgcttacttctattaatttaatatttggagatgatttttccttgggtttctattttctaagttatatcattatatcatttgttgtcattcacaagagacctgggaccccattgctgagcctgagtatcagttttgaagtgaaagttttccttcataaagctttattttattgctgcaactcgtgtttttttttttcttttttccttttttctggtttctatcctatgttctttggtataagaagtggctccattgaactaaaaaaacctgaacatgcacagacatctgacctttggccattatttgaatagattgagatataatatttgctaaaattgaaattcctttgttgaactcttagcacaataaaatttggtaagaagaaaataaattattataagttggtgttttatggcacaagggtattggggattgtgtaggtcttcttctcttacaatgccttttgattggtgttctatggaaagcttagtgttttaggttcaagacaatcttagcagtgttgattagttggaaaatggatgagtggtaatggacttagcttgatttggggtctttatgttgtactcgtctgccaaaaaatcattttcactcttccttttatggaatttttagagatcttaagcactaggctttagtttggttctgtttcggtgtttcttatatatttcccatgtaccacggttgctccacaattttggtactgcttttgtaataaatttgttacgtataaatagaaaaagaatagcgctcttgataattggcatgtaaagtgcttattgattgttaggtgccgatattatggtacaaagggtggcttaagagttgaaattatgtgtagaattttgaattttgaaggatattggtcggggtagcatttgagaccaaaatatcaggttaagatagtgttacatgagctacttttacttggatgtgaacagtaatccaagaaagatgaataaatagatgtattcatcacatgtaatgtatggtgcctcagcatcaaatttttcccatacacttatatcacacgattctaaggagtgcaactgatcttcatttaaaagcgtttgcctggaatgtatgagacttgccagttttcctgaagtcgccaaagggttgaaattctaaataggaaactgcaaatactaatgatgtggccccaaaataaaaaaataattaattaattaaaaaaaaaagaaaaaaccacagaggacctcatgcaaaagccaatcaggacagttataatagagaaggactgatgttctgttgtgaggcctattcaatcaaacctagatattaactcctaaaatatgagcaagctaaaataatgccaagtgattggatttctgttgttaagcttaacattgaaataaggctaaatggaaattattgccaagtatcaaatttatatataggtcccacataattttagatcaaattttgtagaattcgtttattttcgaaggcctgttttacaacctttgaaacttccttggagaagaaaagattccatctagatctttgcattggtaccaagagattttactaagcaagtatcttgtttttgttgttgttgttctttttccccctttttaatgagaaataagaaagtaatttatcttcattgatgttgtcatcattattgcttttaacaattagcatcatcatcaatcgacctaaaagtttatgctaatagattagtcaactatagccttaacaggccatctggattttatcaactatagtattaacagaccctctgaattttattaacagccttgtcatgtggatcaagctaaaatagaaactaacttagatgcagatgataatgcaaatgcaaatacaaatctgaatgcaattatatgggaggtttcaaatataagacctcttggtcaaattaatgttcatatcatattgattttttgtttggcttaaaagcataaattataaagctggtcctgacgattgtgtttgagttccagcaagttaattatgattaaggtgttatatcttttgaccatagtagtcgttttggtagtgtttctgtgagaaatgactacctttatgttttttttttttttaatttgtacagctgcggaaacatctaagttcagaagatcatccata

SEQ ID NO: 9272 - DNA, 951 bp, Citrus clementina
  Intron number 17 from transcript clementine0.9_000740m (lo cus clementine0.9_000740m.g) derived from phytozome v7.0 ( chr-ID scaffold_8; pos 2703447 to 2704397)
agggtttgatagttttctttcctggtaggaatttctgcaaattaagtggtgtcaatttgagcatagtaaacttttttagtgattatggttttcaatttaagtagtacatcatacgtaatagcttgtaaaaattctgtggattggaggaatgaggttattggcttaggtttgttgagtcttggggagtagctatcaattcgctgcattgctttgatgatcaaataaacagggtgtttgtgagggaaacacagctactcaaaataaattcggggagttaaactacaaacttgaataagcctgatatatgaaaatgcaaagcttatggaaagattttgttgtatttgaatcttttatgataccagaccgattggatgcccttgaaggtttgcaattcaggctcatacttggtggaaaaaatgctactgcttgatattctgggagttttaaggcaaaatttgttgattttgtaacatgttcgataaaaatataaaaatatattgtttacttctctttctacattgtctctaatgtttttcaaggcagttctatgggttaattatgttttattcatttttcataaattttgggattgttgaactgtctggggtataaacattcagattttgttccgtattttcggttggtaacctacatggggatgtattttgttgcccttgatatctgcatcatttttcctttcatttcaataatagtattttgtttcgttttttttttttaaagaaaaaaatcatagcaaaatttgggaaacagaaaaattaatcatgtaaatacttgtccaacaagtttttctgtccatctacaacttagttgctttgaacttgaatgttttgttatctcttttcaacattgtggaacttcaagctatgtcttgatattggttaattttcactttcaggaatacctggttgtgctaagtcagcactttgcaag

SEQ ID NO: 9273 - DNA, 1282 bp, Citrus clementina
  Intron number 1 from transcript clementine0.9_021653m (loc us clementine0.9_021653m.g) derived from phytozome v7.0 (c hr-ID scaffold_122; pos 480151 to 481432 reverse strand)
tccttgtaaagccaattgcggtcactggtactgcggttagtttttcttttctattttttttccttcttttaatttttaatcagttgaaaacttatatgaatcttattactattatttttacttgtattttacctttgtttggatagaggcgtacttttacgtttgggagagaaagtttgaattgaaaattagattattgctctggtacctgtacttagggtttttgttttgttcggttgctgagaaaatgttggacagtagttgaaattacctcttattattttgtaatgttttttcttttcaattttcttaatttttttgaaattatttatttattctaaatttagggggtttagtcgtgattttgttcaaatgctggtcgggcacgcacaatttagtaactactgtttttgtctcgtctatgaatgaaaatggtgaggtggagctgttttcggtgtttattcacgatttgtttgttatagtatgataattaggaagcttttgtcagtgtttgcacatagtttgaaggcaagaatatatcctacttgtgaaatgctagcccatggtttttttttatttattattattattagcatgtatcaaagtgcaaattggaaagacacgaggaatagaggactctgcctatgtcttggtattctgttctatttgatctttatttccgcttaagtttgtgctaaaagggaattaactttctgccttcttttccttttaacagtttttggtagttggattttgtggctatgttattgaagattgtagcttaccaaaagaaaaaaaaaaattgtgtagtttacaattagtttgaaatgcttcttctaatctctgagattctaatctccagaaggggtgtgagatacattgcgtggagttggtgttagtctatgtgtagtttgaggataatttagtgatttgctatcacaatatgcatttgttgtcaaatagcctggtgattttgtcaactttttgatggtgtcaagttggaggagtgtcttagagaaacctatatttgcggaagtagtagtgtctttaacttgtgattgatccataagctcaagataaatatagaacatctttttgttgagagtatttctaagtgaaaggactgaatcctcggtggactttatttcttgatttattttgggaaaatgcaactggtagtcctctgatttaaccatttaatgaaatattgggcatgagttgtcttacgattggtgtttgttctgcagccaattgcattttgcagttctggaattattcttct

SEQ ID NO: 9274 - DNA, 4993 bp, Citrus clementina
  Intron number 4 from transcript clementine0.9_015607m (loc us clementine0.9_015607m.g) derived from phytozome v7.0 (c hr-ID scaffold_15; pos 622352 to 627344)
gtagggtgttttgctgctcaacactgtgcttacaggtaacgtctattattaacttattgttttggttcgattttggttagtcctaaagcattatgacaagttgcaaaaaatggccatcacgagatgatctttctggtttatgggtggagtttaaggggaaggacgcactcaaacctgcaagaggaaaagtagcattagaggtgatgactggcaacggcactctgttgctgcagttagtggagagtgtgaagaatactaggtttctaaaaactatcaaaccaaggttgaagatacattttttgtgtttagagagatcttacctttaaggttttaccttactttatatttaaggagtgcccctgaggacgttcttgtgtctttgtcgacacttgcaagtcatatgtggttgttcccgttctcgagcagggacaatcacataatctttagtgtgaatttaccactctagtttgagttaaacacatgacatgcttagaggagagtcgttttggccatgtgactgtccttgtaggacaatgggtgtatttccattattagctctttttgaataggccaatgggataagagagcacatgaatttgttggtgttgttactatttattttcttctgtgatccccttttatggttttaggatcgtttggatgatatttggagagttgttgggatagactcaataggcttggcaattttggagcattatgagagactttttcatttcttaggttattgggtgggtagtgttcacttttggagatgttactactctacccttagctttgaatttccttttcaggtccattgtagtttaatatgcgtcatgtccttattgcttgccctacctaaaaacacaatttttgcacagtaaaattgaaacgaatggcaaaaattccagaaatttgagatcggtttcattcaaaaacaagaatcaagaggaaagactaaagtttaattactggtagtttcagaaacaacttcgtgaggtaggagaaatagaccaaaaatagaaagttacgaacactattcaagaaatagaccattgcacaaacatcttatatttttgtgtgatttgaaatccttaaagtatctcaattgtgatacccctaatcagtccacacttagaaatcttataagaattcataagatttgcaattaccaaaagtttttgttttaaaatgagaaagataatgaataaacattaaagctagttcatgatcattcattccaccaagtcatcactatcttctcaataatggcaacaaacattattatgagctagacccatccactaagccattctttattggatgtgatcttatcactccaataatttatttaatcaaattaattttaaataaataaatagttaaattattaaattatctttaacaaattaaaaatattttgatcaaatcaaatggctaattatgagcttattttgtaatgaataaagagttattattaaaatagttctattaccttataataaagaacttaaaaggtcacacacctaataaaaatgaaaaatgagttactaaaaaatgagaagttaaatttcttaattttaggaaaattgttatttgtgttataattcattaaagaatgaatatgcattttaaatatgatttaagatagaaattttaatgatccataaatggtttaaggaatgaaataaatttcataaatccctaatcaaacattaggttaagattaagcatgtaaaatgatcatattagacatgtttctattcataaatgattatggacttctagaccaattttgtgtgtttattggacctaatatagattaggaaaaaacataaaatcatgtcacaaaataaacccacaattagtcatttgattttatcaaaataggcttaatttgttaaagacaaaattaagtaattagactatttatttattcaaaattaatttaattaaataaattattggagtgataagatcacatctaataaagaatgacttagtgggtgggtgtagctcatgaatgtttggtattattattgaaaagatagtgatggctttacttggtggaatcaatgatcatcaactagcattcatgttctattttcattatctctctcattttaaaacaaaattggtgatttcaaatcttatgaatttctataagatttctaagtgtggattgattaaaagcatcacaattggggtgctttaaggatcccaaatctcgtagaaactagaagttgtccgtgtagtggtctattttctgaacagtattcgtaacattttgcttttgttattttcttcctacttcacgaagttgtttttgaaattacaaatgaggtaattaaatttcagtctttcctcttgatttttttttttaaataaagtcgatccgagatttctagagtttccgtcagttgttttaattttgcaaaaattacattttcaggaacctcatggacaaatgttgtccttcaaaattttccctccaacaaaatcccctagtcttctttagcaaaaaaatgtgatggagattaaatttacctcttgcagaagtgacgtgtattgatcttccttccgggatcatctttgttgagtttgatagatcttctctttagggcattccctcttggggctatcccctggtgacattctttgaacggggagcttcaaaattaataacaataattataattaaaataattatttttgtagcgaaaatggtgtaaaaccaacattgaaggggccttgttgatagtttccaagtgggtggcatcatggttgacgtgatttaaattttttgttttcccaacatctcctattcttctttcttttaaaatttattttcttctttcacttttaccaactatgttcttacaaatcctcttctccactctcaaatcaatctctactaccttctttcttccaatttattcttttcttttattttttccatccacttctacaaagttcatcagctaccctataacctaggaaaattagaaaatatctctcatattactctaaaattgtcacatgtcctcaaaaggaccaccatgattaagatagagcctccactagatttatgacaattcgcctgggatgggaccatcccatgaactcgccaaatatcatcctaactgttaaaaaaccatgaagggtacacattccaaacatgggtaaatcatatcaaaggtgtgggtgattgatacatgtgtacgttttacgagagctcagatgactagataattgcacgcacacctttggactaggaaagttcctttttgaccagtcctactctctatctataactcattccatcattctcctatttcgaagctgagggttgaaactcaaaatctcaaaatcaaaggactattctactaaaaagaggttggacgtgaccttgatgcggagctggagctccctaggtcaaggatttgcacgccagtgacaacaccaacaaatttatgcgctttcttatccctttggtctattaaaaaagagttaacaagagaaagacaccctcctgcaagacagtcacatggccaaaaagggatgctgacctctaaacttgtcatgtgtctaactcaaacaagagtaataaattcaaatgacaataagattaggcgatagccacatatggcctgtcaagtgtccaaaaagacacaaggttgtccttaggggcacttcctatatataaggtgaggtaaaaccctacacaaaaaaacttatcttcaaccttggtgttgatggtttttagaaatccagccttctttacaccttccactagcttaagcattggagtgttgccgcctctaatgttatttttgtaggtttgagtaagtccttccattaaactccacccaaaaagatcatctcctgatgcccatcccttccaagttttcataatgttttggggctgaccaaaacaattattatacatacaattggatcccaaaagcttttactcgttaatcatttttccattagtttcaataccaaaaaaacaatagaggttttaattctagaatggtcttcatactgttgaagtgctgctcaacataatattaatttaaacataaagcaaccagtagcgacttctggaaagaatgaaataatttttttccttcatatatgatcctcccctgctagtattaactttcgggacttttttttttgtttgggagaattaacatttccaattaaaaaaaaaaataattaagggtttgacaaagttctacaatttacttttctttttgtttctttaagagtatttataaaaccatattcttagccatgctagcatgggtgaaatccttgtcgggtacatctatgctcgtagaagattttgccactttcgttgagccattaaagcttctgtttcatgacaatcattgtagtggccggtttttgagttatttgcaaaaacaaatagtagggtcttttgaggattgcactgcaaagaacattgatttattttgatagagtgccttttcacttctttgtagattcaatttctaattagtttagagaacatattcactttttcatccattctaattggttttgttctctcttaatttttgttcctcttgatgtggtttggttgtcagttctttcttgttctctctttgctcttagtggttgtttatcctctctgtcttttgtctgacagaattctgatctatgcattttcatgggtttctgttgcatttttttggacatatccatcttttttattcacatatgggagagtcctttcagttatttttgtacatgaaaggttttattctttatttctgcctttttgggttcatctgtattgtaaaataaaacgcaaaactttgtttaataaaagtaaggaaacaaattactctattcatccttttttacctttttattttactattggttctagaacttacataacttccttttatttgtttgttcagttaggaggcatcaagctaattctcacgcaaagaaa

SEQ ID NO: 9275 - DNA, 570 bp, Citrus clementina
  Intron number 4 from transcript clementine0.9_009487m (loc us clementine0.9_009487m.g) derived from phytozome v7.0 (c hr-ID scaffold_10; pos 4325601 to 4326170)
acaaaaaccaggtgagctttgtctctttcttgattttattctttgtatatacgactatatgtttttgttttctgtaaatcatctgttttcttttatctgcacttaccgtgaagtgggaatctttgggcttagccttgatggtgggtcatcttgttaattgagaacctacagtgaatttggattgtagtacctacagactttttgtagatgtacagtaatccgatttctgttgggtgatgttggttatgacgttataaaatttgatctctgggggcacaatctgatttggggtatcaattcgttagtatatgctgcattcattttgctaaagaaatcttcaaactcatgctgatgggactgataagaaaatttagctgatgtatcatattattaatagttaatccccattgaattagctgatgggattcaaagcatatgaaatttggccagccagagttgcatactaaatgatttatctatgcctaggctgttatgctaatattgtgtttttattaccctgattttgtgggattcaaatttattttggtatttggatactgctgtaggtta

SEQ ID NO: 9276 - DNA, 858 bp, Citrus clementina
  Intron number 6 from transcript clementine0.9_015237m (loc us clementine0.9_004978m.g) derived from phytozome v7.0 (c hr-ID scaffold_32; pos 1609825 to 1610682 reverse strand)
ccaagttcacatttcacagttttatcccagaccaggtatacaatttttgaatttggatagcaccgaacttttgtctttgctatttagcaattacaaattcactgtaatgctcatttctattttggtcaagctgcactacttttctttggatgaccaaagaaatgtcctgtttggaatgacaaagcagttccatttatatcttgtggtaactcatgatgaatcatactcatgacgactctgagatgatggtcagaggtgcatttcagtgccctaagatgatgaatgtttttctcttcatccttttttttttaatatataattttcatctgtaactgtgtcagactatagctgctctgaaggtgtgtagctcttcttctgggaaccctaactatgataatttgtttagatccctaagtattgccctttggaatgactcttcaggtgtgaaacttattttttccttggcaaaactaaccatgatcttgaaagttgctgtcttgagcttccctcaaattagacaaggcttgggatatacccctcttcaataaagtttgaacgatttgatgaaatgcattgcattctctgatgagacataatcaagtctgtaactttaatctaaatttgttttcttctattaatttgtcagaaacacacctctcagggcaatagctctagcttgagcatatagcagaattatttctttcattatcgtagttgatataacttctgagatttcaactcagtatgtgcagtctggaaaaataaaatactgacagatgaagctttttactgaaactgtttgattaaccagaatcaatatttatttcctttatgaaatcagggacacctgctgcaagg

SEQ ID NO: 9277 - DNA, 3840 bp, Citrus clementina
  Intron number 1 from transcript clementine0.9_002730m (loc us clementine0.9_001178m.g) derived from phytozome v7.0 (c hr-ID scaffold_13; pos 3377856 to 3381695 reverse strand)
gttccgagggcgagaagaaaaaactcaaaatacaggttctctctctctccaatcttactcccttctacttcattcattttatcattctttttttattttctcggcaaccaaaacggaaatattagaaagagaaaccaacattctttgttaatccttgaaactttttaaatttttttttcccatttttccagattagggcaaaattttctttgtctctctctctgtctttttcaattcaaaaaattttagttttagtgtatgtccgttggcagtttgtttgcagatcctttttgtttaacaaaatttctaagtatagaaataatcgccgcgccggagatggcgcgggctgcatctcaaaacttcactgagctgtttttgtcacatatacaatgtttgcattttcatatggaatgcaccagtaggtcagcaaccaatcgactcttgccacgttttaacgcggtagatcttaagtctcccttcttaaaaagtcaaaatgtgcattcaactactcgtctactgtcccctaccccgcttcacatggaatcccccctcattttgagaaaaaaatactgactttggcaagaacagtaaataccattataacctcacttttaatagaagataacagcactttttattttattttattttatttatcaagttggtttttagtaccatgggtaggtgcaaccgtgcaagtgctatacgatataacagtgaatttcatttaattgttttggaaattttaggaatttgagttttaaaatctatggcccttaggttgcggtggttttttatctgttgtgaaaaaaacaccatatagattgaaccacaagatcaaatagagcttacgtttattacgtcaatgcaattatcttgaaaaaaataaaataaaattatagtgtgttttgttcccatttctcattaatagtatttgttaaaaatataaaagaataagaatgaaaatggaagttgaattgatatttttatctttaaacaaaatttattctttcttacctcatttaaatatttaaaataataattctgataattatataatatttataataaaataacagtaataataatagtagtaataataataataataattatcatcatcataataagttttattctgataatgttattaattataatcattagaataaataaaataattagaatattgctattgcgattataattataattatagtcgtaattattttactaatattaaaataataatttctattattttattatattataataataatggtaataattaaatattattttttactataataattgtggtaaagataataatattaattatataaattattttctctttattttattagtgaataaatacataattataattaaagacattctactaatttactataatttgttgtaactaaaaaataaattaaactcaaaaataaaaatttatcgtttggataaataactactttgattcttattcttgatgcaaatattaatttattccaattcctcatgtaatgtcaaagttttagcggtcattagttgtattgaaatttcagtcaagaagggtttcgccttttgcgtgttcctttgagccacccttgaaatttgaaaaataaagaaatagctttcatactgagccagtattattaaattcactttcatagctacctcacatctaggaaacttccttgaagtttcccggtgcatcaagcattaataacatgatagagatgcaatgggaaattttgtctgtgttgataacgacggctcacactctgtcacaatttttttctcaaataaattctctctcttaataatacttaccttctgcacttccacatttttcttatcgataaaaatcatcggtttgccacctagcttatcagatttgtcctgcttctcatttattggaatcttttgtcataattgattaatttgaaaatgaagttaaacactatggtaaattttttttgctagaaataatgataatggggtatgttcgtctgaaatttgaatttaatgtttaattgaattatattaaatttttttatactcttgtgttatgtctatttataatcgtattagattaagatttaattatatattattttttatgtaataacaattatattaaaaaaaatcctcaactaacaatgaattcaaatttagttttcctactcagtccttggctgagttgctagagcctcacaattatgaggacaacggttcgagcgtcacaattttttcttcaattataaaaagtaagtgggtgaaggtggataaaatctgagcagtgctatataaatacactaatcccagtaaaaaaaacccagttttcctatctaagaactttcctaagattctgttgccgatctcacacttattaattatttctttaatgatttcaacgatgcacttgttgtcttttagctattggtaattttatatgttcacctaacaaagcgttcatagaataatgcatgcattatctggtattgataatgacagaatataatacagtggttaaacactgtttgaacacggttttggctgttgtaattgtactagaataattttgtgttaccaattaattacattttgctagtcatagaattaagtgatctagccagtcatgttaagttggcaaatttaacattctattttaatcaaattcataaaagaatcattttagtggtggaagaaagtatttgaaagtgaatgctaggttgatggttaagaacttgagatcatcatattggattactttttgtaggcagaatgcactagatgggcaggtagatggtggccatcatcccagggtatacgaaaactgatgaatatagaagctaacttttgtaatttatgtcataaatttttttcttcaaataaccagaatataacgagagaacacttatttgcatcccactagacactccctcagctcaaggaattgtgtgaattatatctattgcataagaattcatgttatggagcatttttggctcttgattggttgaaactactatggttaaattttcaaggtcattgtgatcttcattatgttcatggatgaataatgaacaaaggataagcgcttcaggaatttgtgcagtatttttgcattgcacacatgcaacctggagttaaattcttgttaccacaaatttgcaggacaggttttgggttgggggggggggggggggggagggacagaaaaaagaaaaagcaatgaagtttgtatgaatattgtaaatgtagataacaatatattggatgctaatattttatacatggtaatttaagtccttgtaagttacacctctctggggctttaggcattgttcttggattttcaagtagttagggaagaccacaaacattcatatgaactgatatgtttgatatttacaacctaggtgagaacaatgagacctttgtcaatgcagcttgttccatcactggtgtctcagttgcaaaattacataaaagtaacaactgcggaaatataaagcagttacacatttaacggatcatgaagagaaggatctttctcctcagaaaaattgaccctctattagttctgaatttcagttttagccaccatattgaatgtaattgaccatgcagcaatatggatatgctttgaaactaatcaacactagaatccagtgaaggctagggtgttgctgcccaaattgtatcaagcttcatgatggggttcatgagttattatgtgattatctttgatctcatccttttctttttcttctcttttccctaggaaaaaatacgagttgctctttacgttcaaaaagc

SEQ ID NO: 9278 - DNA, 342 bp, Citrus clementina
  Intron number 17 from transcript clementine0.9_000256m (lo cus clementine0.9_000243m.g) derived from phytozome v7.0 ( chr-ID scaffold_30; pos 2457814 to 2458155)
gatttatacaatttagacctggaggtataacttctcgtaaatcatgattaaattctacatgctcttatgaaattagctgtcgtttgaaccaaaacctagaaaaaagttaaaattctaggtaaattttattagccatgagcaaattagtttcttgctttagttttatctgatgcgaattagatttagtgtaatgaaatcgtgcctgtccagttgaaaatttaaatatcgcttgtagttaacagaatttaattattcttgtttatctgtaatgttgtgagactgtttgaacgtattttctaatactctttcatatttttcaatattgctctgaaggagagtatc

SEQ ID NO: 9279 - DNA, 2270 bp, Citrus clementina
  Intron number 1 from transcript clementine0.9_027042m (loc us clementine0.9_027042m.g) derived from phytozome v7.0 (c hr-ID scaffold_95; pos 116273 to 118542)
ggattgttgtgccgtctcagcagccactgagttgaatcccatcgttgatgcactaatgcatactcagttcactgcctaggtcagccccatttgccattttgatttatttgtaatcaaattgacacattatcagctccttcattgaaagccctctactttccacatacattattggagaggaatttgaagaattttatttatgagccagatcattctctctctctctctctgtaattttcattttattacttataaatctcattaatttgattgggcaggtttcatggttttgtaacctagcattggatgactctaaacatggctacttctctcagagattattggtgtgcttgagatcggtgttgagttcaatcatctacgaggtttatttcagttcctatattttgttttaaaatatttcattgctatgtaattttatggtgtgggttttatgaaattgatgtttaattcagcaaactctatttccttttgagtatttagtcccatgactggcacgttgtaagtagagaaccttgaaagggccataacattttatcttttttgttgtttttttaactttgttttgatataataaaagtatcccttcctcccaaactcaattgagcgggtttaattgttcttttcttatagtgaagttttgagaagctttgattgccgctgatttatgaagaaaacagcaactgtaaaattgttctgctgctgtcatgttgctatatgctgttaaaaacagcacagggaacttccaagtactgattttagtaactggacagcatccgtaaaagtttctgggtgcagtcatgcagctgtttgttaaaaacagcacctgggagttccagatgctgtttttattagctagacagcaccaaaaacatttttaggtgctgtcatactgttgtttgaggttaaaaacagcactcaaaagttgcaggtgctgtttttaacacaatttcagcagctaggcagcacccagaaaatattctaggagttgtcatgctgctgtttgctgctaaaaacagcacctaaaagtttcaactgctgtttttatcagctagacagcacctaaaaattttttgggtgctgtcatactgttgttttaacacaatttcagtagctagacaacacccaaactactttagggtgctgtcatgctgctgtttgatgttaaaaatagcacttgaaagttgcaggtgctgtttttactaatatttcaacagttaggcagcacccaaaaaataatctgggtgctgtcctgctgctgtttactgttaaaattagcacctgaaagtttcaggtgctgtttttatcagctagagagcacctaaaataaacttgggtgttgtcatgctgccatgatataagatatttggaattttacaattgtaaatattttgcatgctgatgtgttattgataacaaggcttatctattttgttttttcttgataactttgctttttcccgtttggggttcatttgataattttccatggttgttgaatcatctatttactatgttcgcatttaaaaattcaatttactgtatttttcatcgagctagaacagcaatggataattccaagggctgttttctgtcgatttgctgtcaaaatagctgctagaagttcacaacagctgttttgctgcttttctgcagtgaaacagcccttagtaatttgcaggggctgttttcactacaaaacagcagcaacacagcccctacagatttctataagctgttttcactgcagaacagctgcaaaatagccgctggaaatgtgcaggtgttgattagttgctgttctacagttaaaaaggctcctagaaatttttttagtctattttgaattgaaaatatttttgaagattgttgaggaaagaggggaatgagagcagtagttttttggaaggcttgatgatgagtttgataaatttgacaagttttacgggactaaagtgaaagaaaattatgcttaggttgaaagtttgagtgcaaatggatgctttgattgctttcaagataaaaactgagaaattggaaggagttatttaggattctatacaatttgatcctaaagaacaaaagcatgaaagcaagttgatttttaaacttgctgttgattattgctttccttgtttctatttctcggtagtttgaaagtaattccttttcttaaattagttttctttcttcattttagtttattcaaaattattagttctatcagtaatatgactttgttaatgcagatt

SEQ ID NO: 9280 - DNA, 1484 bp, Citrus clementina
  Intron number 3 from transcript clementine0.9_034077m (loc us clementine0.9_034077m.g) derived from phytozome v7.0 (c hr-ID scaffold_91; pos 348424 to 349907 reverse strand)
taggtgctaacgttgtcaatgttgttggggcttcatgtaaactgataactctatgaaatgagagttatcatgacatttttagactttaatcaagattacattgagagtaaataacatgtttttattgcattttagtttattcttcataaattttgtttgatttagaataaattatgtgcttaaatcatatgtataattataggtgtttggaagctcaaattccaaggaaggaatgctaatgcaataggcttacaaaagatgagaaagaatttggctacaaaagaataaaaaaaaaactagaacagtgtagatgttgtagtcactgctgtagcaagcgttgttgtagcaatcttagaacaatgatagaaaatattttgcagaatcttgtgatctttagtttcctaatctggaagatgcgagacttaggctttcatttaccttaattttcaaatataaaaggagcacacattatattaaaggggggggggggcgtcaatcacaaacataagaaaacaagaaagaagacaaagaagaagattgaagagaaggaggcaagtctgcaccaataacaaaatctgcagaatatttggaattcaacttttctcattcaactcttgttcttttcctttattctttggttggaaatatgtacttgatggctggaactttgtagttagattttcttttacaagttatgaactaaatttgattgtagttgagtgacaaacaatttagatgggttcttgactgttcttatgagttgctgcatgtttgctgtagcactttgctttaataaatcttattacattcattatttcggttgacttcccatttaatgatactagttaagagagagccacaaaatggtctgtcttagtagaacttattagagcaatacttgatcttaactcttaagtgagattcctggattgagtttaacttgaatcccaaaaggatcacacttgatttaagatttatgatgaactagacatagggattcacattgtatggtagaaagagtatatgtttgtaatgccgtatcttctgtgacataacaactggtcatcgttaggttacataaaggtatggaatgtccaacatgcgatggctgaggatgcaaagtcattctgcccagtactgtagcaatcagtgttagcttgaacaaaacaatcaccccatcaagaaagtttgatcattcagttaccctattcctattgaattctttttgtgcaaaccgtgcaatttaatttcattactgcatttatgttgttaagttgttaatcttattagtcaatcaactttatttattttattaagttaagatagaagaaagtttgcaccgtcgtaattgttgtagcatttttagtagcatcagtccatgtggagacgatcttgaatactcatcactttattacttgttgtgtacacttgcacattgacatcaataagatttgaatttttaccaacgtaaacgcagagatatt

SEQ ID NO: 9281 - DNA, 2770 bp, Citrus clementina
  Intron number 7 from transcript clementine0.9_004501m (loc us clementine0.9_004501m.g) derived from phytozome v7.0 (c hr-ID scaffold_17; pos 489375 to 492144 reverse strand)
gaggtgggaatcactccaggagatattgatttaaagtaagtcattttcttgatatttttattgtgttataaggttcaaagggataatttccattagaaggcttctgtagatttctttagaccagaaaggttaacttttactacctagggggctaatctttttttggtttgggggggggggggggtggttggtggggaagcagtgttgagattcaaaaaggatagtctaagggggttattgagtcaatacttacaacataggttgattctaaaggctgatatgttttatccctgtgggagggggtcacacagttagagccaacaaggaggtgcttaaagccttggggatcctgttgctgcaactgtagtaattgagtgtttgttgctcctgttccgccttattcttcttttttctgtttataccaacttgtgatatttcttcatgctggaatgttatggctgaaaactgggttatttgctttgtgtccggctgagatgggcatgagtatcatcgtatatttcccatcctgctgtggctcagtttaaactcaattcatgtcgttgtgggcattctagttttgtgctggaatgctgtttcaccaaagatattagttctcatacaaactaatcagttaagctttcaacatatgatattatgcaaattatgaacccaaagttttgacttttaaactgcttaaaatttttctttcaatatttattcaactaacatttttgagtacattaattgactttatcctagctgtgtagattttaaattctcattatataaatagttgatgagtagtctggatatgatagtaattgacattttggctgcaattttgtttatagatctggctgatggcttttacctagtttatggacacaaatcctctcttcttttctggaaacccatcttctggttttgatgaaaagtgttttcatccaggctcactggtttaatgggaaaattattgataagcttagcaattgggtactcatgatctaagatgtttatatctagcaaatgatatgtcagtgagttcttttttttttttttggcaaaaaacctttcgaatattggttaagacttaatcaaacaatgagttcaatatgattttgaaatattggttttaaatcatggtatgactcttttttattttgttatatgtaatcatctttaaccgcaaaaagttgaaaaccatggttctacagagagatttcgttttgcaatgctggttcggttatgaatagatgttatggatgagctaaatgagaaaaatgattttctaacctgttgttattgtcataaattgcaaaatctcaacaattattaaaacaattcctctacattccgatgttgattttggcggtgtcaaatagctttcaccttagcatagattagattttggcggtgtcaaataacttcaatgaattattttagctttctttttattggacctacaaatgcctttttgccttaaccaatgcgaaagggagttgttgaagaaaatattctggaaagtatacccttttctattttctgaattggttttatgttggcatcttcttaatactggaattgcatttatgtatattctgtattcatccttttgttgtaccgaatgagcttgaatgtcttctttgtgttctgactgctgactagtggtgcccaccagtcatatccctacatttataggatgtgattgggcatttgaatagagtagaaaatgacagtgcatttatgaacagtgagtttagtttccttagatcatactgattgcctataagtgggtatgaacgaagtagaactacaatttgttttccttatttatttatctatattacttgtcttatattttttattgctctataattttattcctattccagcataagataattcattgtagtatgttagcagttaggtgaatgtcatgaagttttctctgccttccattgaagtatgttagtagttaggtgaatatcattaagttttctctgccttccattctcaatggcctcttgtcccatatgggaagatttggaatagagatagttgacaagtaaaaatagagtagagatgaagtctattggggttgatgttttgttagaccaatgaaaacttatgttagacgcaaatataaagaggcaggggcaatttagtaattttaggggcggggacagtttagtgattttattaattagggttcaggtataaataagatattatggagtcatttagggtttatgttgagttttgtctggtattaggaaccattaggagttttgggagagattgacctacttctcgaattgtaggtcaggattgattgtttgttttcttttgatttaatcaataaaagtcagccctaagtcctatcatgtttaagaggagatattaggtttttggtcttggatactttgagaatagaaagaagatagtaggcaatattccatagtagtacttgtagattgaagaattattgaacggcaacatttcaagtaaaatattctggctttagattgaaggcaaaaagtatgtcccttttgacccaaataaaatattttaaactaatcattaagttcgaacttgtaataagatttatgaacttgtatttttgctaaatttacatacagtcccttgatttatctactatctagtcctttcttttatttatttattatgagacacttgttgtaatcttttacctgcaccaattagaaactctgttgagcctttttttaatgcaggaaattgttgatcagag

SEQ ID NO: 9282 - DNA, 1416 bp, Citrus clementina
  Intron number 1 from transcript clementine0.9_014339m (loc us clementine0.9_014339m.g) derived from phytozome v7.0 (c hr-ID scaffold_70; pos 433507 to 434922)
gccttaattcaggacaaggtgtttctggacagctggtatacctgctctctctcattttaattctctgtagtttatttttatttagaataataacatcacatgggttaataatgcatctatctttctaaacattcagatccaatcatgcatatctccgatcatactccaactcatgctcaacttgtttctaaattcattttcagtcgtcgtagaaacaaacaaacaaaaaatgaactaaatccctatatttgatgcataagtgtatatttataatagtaagcactaaaatgtagaatgtacacttagcaaacttataaatcattactatatatatacttttaatcaaatcaattcaagaatagatgaaatattgttgattgtgttttatttgcagaggataagaagaaaagtgttctccgtcggggaaatttttgtcttttacttgcagagaaaatgagagtagtatgaaaaagacaatgaatttagttctattgagagcatttattgaattctgttctgtagttttgacagaaattcataaaggaaaaaattcttaactttatccgtagaattttgctcaattaaaagattttttttcccggggggttttttaagacagcagtgttgaaaagccaaagtaaagaagggggctcacatgttggattttgaacatattgaaccgcgtgattttcttgacaaaaattggcaaagccgcatgcatttttttgttttttcaattcggcgccaaattgcaggactttttgccaactacttttcagactttttacagtgaagctcaactataaatagagcttcattcatagagctaaagcatcttaaaatttgagagaatctcataaaattgagagcaataatttaagtgaagaattgttgagagagtgagcaattggagagtgtgaacaattgagaggttttttcttttcaagtgtatgtgagaatactaggtgtatttagattttgagaagtaaggtttctactcaaatattgtactattataattgttagtaatacaattattttctcttgctcccgtggacatagacataattgccgaaccacgttaaattttgtatcatttatttttctgtgattatttggtgtgcttgattttgcattctgcgcacaacaagcaggacctaactacatgaaatgtcaatacaaactagatatgaactaatttgtgatttttttacgatacgtatacatcgtcatagttataatttatatgtatctatatgtttttatcaaccacgaatcaatgaatctaaaaagagtaagccaaatgtaaaatgttgatctgatgaatagaggatttggatacgaatctaattctggactgattgattaattgatcgtgcaggtcccaactaaaagaagctattattgaaggaggag

SEQ ID NO: 9283 - DNA, 217 bp, Citrus clementina
  Intron number 3 from transcript clementine0.9_001106m (loc us clementine0.9_001106m.g) derived from phytozome v7.0 (c hr-ID scaffold_82; pos 240007 to 240223)
tacaaggaaaagaaactctacattgtgttgataaggcatgcgatgcatttaattgtgatctcatgatctatgaggatatacggtggtttattctgaattcagttttttattataactataaacagaaatctaggatcttttgattcagagcttatcaattctctggtttttaagatggtttttgtagattttaacatgaaatatttgtgcagtcttc

SEQ ID NO: 9284 - DNA, 1335 bp, Citrus clementina
  Intron number 1 from transcript clementine0.9_023053m (loc us clementine0.9_023047m.g) derived from phytozome v7.0 (c hr-ID scaffold_10; pos 5067281 to 5068615 reverse strand)
cctccttcttcgttcgccgtcgtcagccgcacaaggtaaggaattaaggttatacatatgtttgcgattccaaatggtgatgattgggacagctgtatttctgtaattcaattcataattccatacacacgtatttttttataatggctgtttttattttataattcaatcggggttggcaaggacttatagagactgaaaattgaaaataaacaatagctcatgtcgtagccatgaacctgaagaagcataactgtctgaaattaaatctcgattaagcacatctaggactgtaatagagtcaataaagtgataactagcccttgcgtagtgcttaattaattcgcgttgtggtccttaattatcactaatcttcactctacccaattgcccattaatggagtttgcatactggcccatcaaagctatatggcattttctcacggataatgcttaattaattcttgttcttaatcaaacacgttcagaatgccctaatttgtttcttcattttctgtccgttaatgcttgatcagtggtggttaattgttgctgatttggaactgttgtcttgagtgttgatggtgatggacatgaattattaatgatgtttgtcatttgaagatgtaactttggtagctttatttaactgaagtactcgttgtttatttttattttttatttttttgttttgttaacttttaaaaagactcgttgaaatgttgaggatgcttggtagttaatatttgtttttcattcattgactgggctgagatttgagattttggaattttaggtggctgcctagtgaattttttgaaattgaattgttgtaacccaaaatgaacccaaaccgaaatttagacctgaattttcaaatccaaccgaaggggttgcaatccaaacaaccgaaaccaatacccgatttgcccacctctacacaatgatatataatggtgtggcttactgcatccaatttaagttttttccctaattacataaacccaaaaacttcactgtgaagtgcgtgatatggtaagctctcttttttctttaaatttggtatatgcttggatgcatctgaataccgtgaacgaatcaatcgacttgcttatagtttaaaaagaaaaatagtttgattaaatgtgtcaagtgctgatgcaatttgttaactaaatgaatgaacagttttattctgtgatatttcaaaatataatttatttttgcacaatgtttagcgttttgttgttttgtgctgctagtgctgttgatagtagaaataagtaagctgaatcagccgaaaatgtttaggaaattttccttttatttttagaa

SEQ ID NO: 9285 - DNA, 2051 bp, Citrus clementina
  Intron number 4 from transcript clementine0.9_026732m (loc us clementine0.9_026751m.g) derived from phytozome v7.0 (c hr-ID scaffold_42; pos 828966 to 831016)
caggttattttattttaatttcgtttgcgtttgatgagaattaattttatgcatatagctcatgttgaatcaaaggttcatgtttggagatgaagattataagttttgtattctgtggaagtggatggtttatgtgtgactagggttgagattttcttgtattttttactcgcgttagtctatgttagttttgatatgtagactcgggtttgttaggatctatgtagctgcctttttttccccgtgtttgaagaaaggttttctacggtgtcaatcggttatgtaggtgcaagattttgcatctagttatgtaggttaggactcgttattggaagagctattttcttttttaaagttcggaatattgttgaaaggtttatggaggttttggcatttgtctagtttatgaaaagcatgttctttgttgatatttttcattttgatgccatttttcatcttattatgctctcttgatgacccacttacatgtaaccattactaagaaaaaggttgaagaagaaagtgattagaattagatttaggagttttagtgttgtgtgtcgaggatcaaaattttgcagtattaagaaggaaataattcattgtcatggtcagttcttctaataaccattcatggtcgtttacattgattgtcaccatggtaatcatagggaaaaaataatgttttaaaatcttctcatgagatcaaattaaagttaacattctgaaagtatcgtttcagatttaaccacctcaagttcatagataaacatgagctatcaactaggtgcatactgacaagaatgaatctgtgaatctatggacttgacgaagctgaaaataaaagatgaaaattaaggttgttggtctctaataatgctatctactaaaaccttaaaataaaaactaaatcctattgttaaaatacaaattttagggaaaattttggacttaaataaattcactaacacttaagatttttcaaccctaggactgagtattttgccacaaggtttgacagaggatattgagaagcctaattttataatggtttttcataacattttgacaaacaccaactctacttggttcattctgatatcttcagatgccgcatggtttaacgaatgtcgtttctagattttgggggtccgaaaatcttaggaaggatctaaattggagattggatggaaaaatgggttaatgactttatttaattgcaaattttcctaatttttttttcaaccctaggaatttttatttttattttaaggttttagtggaaattagatagcatttatggagaccaaaaatcttaatttttcatctcatgtttttagcttcatcaagttcatgggtgcaagatttgtgaacttgaagttgttaaatctgagatggtagtttcacaccctttagctttaatttgaacttgtggtctatttatgcctctaatcagagcttctaaaacttttttttattttccttttattgtctttcaatttcactagcgtatgatggtgggctactagttaacttattggaatcaaaagtgcaagtctcattgacattggttgccatagtaggaagcagggtacaaaataattttggaggttaacttgttgaaatcttacttgtcatcttacccaattttcagatgtcattttatttatttattatctcccttttcatcctggccttctccaatagtggttatgactatatactagtttttggatctattttgttgacattatgagttgactttttaaaaatccggaatttttttcattatattcttctaaatatttagattttgctcatttgtggtaacttaagagagattggctaggtttattggtggtcaaagaggatccctccaacggttaatagttggatgcaagaattaaaaatcttactacatgtcattttctattctatttggggtgtgtctgtgtgtgtcaaataactctttgactactattcttgtctgaattattatcttatatatgactagtctaatgtttatgcttttcaatctttttctgcagaaa

SEQ ID NO: 9286 - DNA, 1064 bp, Citrus clementina
  Intron number 1 from transcript clementine0.9_027144m (loc us clementine0.9_027144m.g) derived from phytozome v7.0 (c hr-ID scaffold_2; pos 3233903 to 3234966 reverse strand)
tcctcgtcatcacttttattgtcttcaaagatctcgtacgtcactctcgattctttatttttttatattgtaaagaaagggaaaaaaaaaacagatttagaattttcatgtaaaaggtattgataactgagatgggtgacttatgtgttgaaaaaaaaaagagaattaacacggttgacttgtgtatcattgggagataatacagaaacatttattgaataagattgtagcagatacagtaacatatattgaatcagattacagtgtgtgtttgtaatcctgtcctgaattttttgcaagtgattgtgatttgattctgactccataaagtgttgataccgctgggattattatgtagtagttatcgtttgaatgtcttgggcttgatgtattgaggaattactttgaacttttcgaagatgggtaaactttattgcttgtgccggttgagaagaattttgatatttgtgaatggcgtctgatcttgtgtgagatgcaaaattgttatttgttagttaaaatgtgttccattatcagataacataaaactatgcatagacattctgtacaatttttgcttcattattctcttggaatgcatcaattatccacttattctctgtacatggtaattaggaaatgtagaagagcatccaattcattggcttgtttgttttatgctctttagcagctatagtttgaacccaagagcattaaattgctgagaaacatggcacacgtgcacaatatgattcttatcaatgatttggaggtgtaattccattttgtttgtattaacctggcaggccaaaatctgacttccattcttaattccttcatgttgttttctcacagtctaggaagtacgcttctagcgtttgatttgcttgcgtcttgaattccagtcatcattagcttctatagagcattttaatagctcttgtgactctgattacaacatgaattgcttggatttctcagtatttgtgtaagctacgaattactactgatttgacaaattctgtgcagatttcaaggcctgaatacaatcagatccttgtcaa

SEQ ID NO: 9287 - DNA, 1549 bp, Citrus clementina
  Intron number 1 from transcript clementine0.9_023664m (loc us clementine0.9_023664m.g) derived from phytozome v7.0 (c hr-ID scaffold_26; pos 803996 to 805544 reverse strand)
gttccgccggttccggctccggtgactttcaccaggtaactctttagtttagcttatttttatggcatttgagcttaagcctaccgaagtcacgttaaaattcacaattttttttttttttttgagttgatgatgttagaaatttatataacatgcgaaattaaatatgacaattctctggtaaaagaattttacgctgatgaaccaagcaatgcctgcaaatatatatgttttttcttggcctgattgtagttgtagaaagccataagctgtgtccaagcatttttcttgatgagtatttatttgttagtgactgggcggtatctatgtttaaacctggtttgagaaggaattgattaggctgaagttaaagattgagaactaaggggtatgcagataaggcaattcttgcttgccgtggatttactgtggactgattgcagagaacaatttctgacataattaacactagcagtgctaacttaatgtggggggctatcgttacctcctacattcaaatgccaggctgcatagtgattaggcaattatacatacaataaagtagcgacaaaagtgtaggtgtgtgattgtctgtggtctagatttttggagttaatattgtcaagagctttagtgtagcttaggtttttagagttaatatcataattccagggaagttaatgctttcagataggttgctacttattcttagagataaaagcggaatttgttatagaatggtggtatgccaccaagggaattcatctatcttttaagagttaaatgtctgcagttttagggagaagattcttttccaaagtaaagattgtattctatgcgttacacatttccccctaacccaggcaatatggtgtagagcaggtttaatacagctgctgttcttttctgaggagctgttctaacatgctttttcttatgcatagcttataagcacttatgtcgtgagaatggttgagcccttttccctttttttatactagccgctgaagcaccgatggtattgcacttgattttgttctatttacattcaacttcttttcatggtgttgggtgtgtgacaataaaactaaatgctctgtttatgcttttctaatacatgtgagttatgtggtttttttttttttttttttgaattacatgagactaatgctcatattacaactcatattgtatgagattacaactgatatttataatcagacaaatattgggattagtttacattaattcttatacagcactgttcagattttactctctctaatattcgagggtgtctactccactcatattttgaaagggaaaagactgtcttcacttaattatataccataattaaggaaggaaataagcccctacatgcgtcgcaggggctcgaaccgctgtgagggcaaggttctagccactgggccaaaggccaagtggttgttatgtggttttgtttaaactagaagacttgcttatatatacaaatacacatattggtatttggcttcaatttaacgtctgttttctacagtatcggcag

SEQ ID NO: 9288 - DNA, 917 bp, Citrus clementina
  Intron number 2 from transcript clementine0.9_023024m (loc us clementine0.9_023024m.g) derived from phytozome v7.0 (c hr-ID scaffold_90; pos 909549 to 910465 reverse strand)
ttgaaatattttacgagtcacaagacttctaccttgtgagtgtactggatggttgcaatttatgattgcttgcatattttcttttattatgattcccctttattgcttggattcattacactaaagaattttatatatatatatatatatatatgattggcacaattatgcctgtttactctgatgattgtgccacgttgttgaaagcctcctatttatggaaaagcaactataaatagctaaggtcccattagcaagtaccaggattctttttttagcattggcggtgatcgaactcatttctggcattttggatatctaaaatgtagtttggaataagttattgcaactggataacaaaatggcctttgcctatgttttcatgatcttgtattcttatgatttatttctgtcattatacttggatattatgtgatcatataattatattttttgtcatattattttttattagtgtacgttctttaacagttttggtagattctttatttaatatatttaacagtcactgtgtttccttgtttctgtacatattttgttgataaaaaacctcaaagttcaaactattaactgcaacctacaagaaccccaccagcatatgaaatcatatctaatcaaagatgtatactatgttaaattcactagttcctccagcagagcaaacacaaccaccacaaacctaaaaacaaatgcaagttcaaacacaacttgttgcaattttaaacattgccactttaaaaaactggcttaggtagtacattaaattaccacagcctcatatctctctgaaatctttattccctgtcaatcactttttctgttaatacatttgatttattacatatgttttgtctatttcagcttaaggagcttgagaagttgggccccaagaaagg

SEQ ID NO: 9289 - DNA, 1126 bp, Citrus clementina
  Intron number 1 from transcript clementine0.9_015654m (loc us clementine0.9_015654m.g) derived from phytozome v7.0 (c hr-ID scaffold_29; pos 2758436 to 2759561)
aaagagaatcctctcttcggcccttcttcttctacgtgagtctcattttctttctactttttatgtgttgttgcatggattgctttttatgtatttcccttttacctgccgtttagtgatttcggtttctctcagtggtggggttttttaattcggaaggtgagagtagaaatctgactaatgcaatttgattgggatagttgttttgttccatgaaatttgtgttgtatgttattgaatgtttatttataattcccccaatctaactgtgtctaattttttgtggattttgattagttgaagtgagtttcatggcttaatttgtcgttaaaatacaaaatttgggactagacttggtaggattaggaaatttgtttcttgtttactgatgttgtggacggggcattctgttatctgagtagatccagatgagcgtataaaggtagcttaagtgtgttcgttgattcttctccatcttagtttgtgagtctattgcttatttttgtttaagaaaattgagttgggattaaggtaggttataggggaatgtaggcttgcaagtaatagccactagaggggggaagtaggtctacctgttgctggcctaaaagtctgcatccgatgcaagttgggaaatatgtactgatttgctttatgaatacctccatcgactgtgataagtttgtgccaataatcttgagaacatacctggagctttaacaaatattgaatttggggatttttttttactctttccgttacctcatgtatttgaaaatcaacaactaattgtttttggggcaaattgttggtcaattattttcgtttttctgttgtctgagacttacttagtaaactgtaggattgctttttagccattacaaataagttataatcatgctgcttctttatgctggaagtgcgtggcggaagactgtgaacctagttctttcaatttggtcattctgattctatattctgtcaattggaattgagggcttggaagtgaaaactttatttgttttgaggaaaaccctcctttagaactgtgattctggttgattttaatttatttccacttgcttgtgcagattgcagaagttgggagctctggagtgggacaggg

SEQ ID NO: 9290 - DNA, 1414 bp, Citrus clementina
  Intron number 2 from transcript clementine0.9_004797m (loc us clementine0.9_004797m.g) derived from phytozome v7.0 (c hr-ID scaffold_20; pos 2242903 to 2244316 reverse strand)
ggaggaatattctccctgctgatcagaaacacaaggtatatacatatatatccaacaacaatattaataatgatacatgtacaaactgttttataaattttcttttacaatttgaggtggcggcttacgtgaaaataatcaatcccttaaacattatgtaaatcgccactcagattgtataagaaagtttgtacaacaattttgtagatgtataattattataatattaaacacgcaatctacaaactacttccccaaggatttagccgtatgatttttaacatctttatttaattggctactaaaaatcaaattataaaaaggtcggttaaataatttatctatatgaacgtcgcctacccttctatctctaaaaaaaaaaaaatataccaactacttaaattgaacccaaaacagttgttaaatatgagtcatgaacagtagacagcgggaaaccaaagccaatttagaatgaagttaaacattgattggttttgacacaattatttttggtttgtggttcaacttatttaaatattatatattagatttttgaagcatgaattaagatagcatcattctttttctttttaattttcagtaaaaatataaacagattttaattatagtaaaaatataatttatatttcgtagaattcaatttttttctttttttactctttattgggcgtagtatgacattggattggattgtagataatgattttatcattaagaatagaataattaattaactatttctatatttattcaaccattaatttgcctaaattagtacaaacgaaaactaatgaaatatttatatatttttttcattatagtatgcattttattcaattacatatttatatattttatatcaatatcattttgattttatagttatttaaatcagcatgaaattaaatattaaataataatttcaacaaattagtttttcatctataaaaaaggaaaaatgataattacacccccaaggtttaagaaaatgatcatctacagcaccgagttttcaataagagacaccaaaatcttttcttgaccatgaaaattttgacttcaaaaatttcgaataagtacaaatataacataaatgaagtatatcctctatttggaggcttaaataagaaccctttgagaattcaaatcaaagtttcgacctgcatctcaaagaatttcatcatttgattttgagtcaatgccccagtggtatagaacattcacataaaacatgttatattgattttaaaattacataatacatcctataaatgtaacagcatcgttcaagtacagtaacaataaaaatatatctcatattttaagttcaatctaatcatgactttaatttgacgcagcttctgaaaccagatccattggtagttgccacaaa

SEQ ID NO: 9291 - DNA, 1474 bp, Citrus clementina
  Intron number 1 from transcript clementine0.9_015622m (loc us clementine0.9_015622m.g) derived from phytozome v7.0 (c hr-ID scaffold_20; pos 462955 to 464428 reverse strand)
tggctatactgtcaaggcctctgttcgtgatcccagtcagttttttacttcttttcattctcattcattttttttaaaaatatttatgcgtaaatgtgtatgatcaaaaaatatatctgtggtttaattttctgatggtttcgtgcattgtgtgaatcaattgtttggattaatgtgatgcgtattcatgcatgcaaaattagagcatgcccatatcaagattttgtcttattattattatcatcattattttttatcttaattataaatgtattgattgattggtgtcttacctgatatatccaatttaatcttaggtacacttttaatttttaattgtttgttctttttattgttcatgattggttgcggtgtacacgtgaaaagaatttagtggaaatatttctcaatacttgtatgtattggtacctctgtatgccagtgaatcatgtttactcgtttgatatcctggaatcaacatagaaatgcatatgggaggctctgttatctttgaagattgcgaagatttaattttgacaaagacaagtcaaaatagagatagatcatacatttccagtttgttttgagtcaaagctcaattgtcgaacactttcttaataaatttgcattatacattagtgtgtcgatctttaaacatagtcgacctgtacagctaaaagcacttacaccattcagcactagtttctttagtaaatcttcatgctgtgtaagcgagattgaaacattgaggaaaagaaaatcctaattatatccattacttcatatttaaattctttcccctgctttggaatgctgtatcaatatggtatgtctggttgtagtcatgctttaccgtggcctctgaactaccagaaattgataaattcatggttagttgaggcaaaattgaatagtcattatgatttctgttcgctttctgataaacatgttccttttttctgtccattcagctctgttagtcattagtggtgctgtctccagtgaacacatggattatctttgatctttgaaggtttacaaaagttataaatgttaccatcagattagtgctgttgatttcaaggatcattgaggatccaacagtttcgaggatcagttttcttgcaagtccctaaccttcaatgggagggcgtcaacttgcaagtgcacatataaattttttgcttctaattatttcattatgctgtacttagagacaaatattatcgctctgaagttgctagtttctgaatgtatagtttatcaaaactggatgacttgtgtttttatttttcccttctttcgtccctttttgataagcaatgatcgggattacttttgcattcttcttttcagggaatatgagacctggaaattatttaaactttttcatagcataattttatctcgtaggcactaatttgctatttctggaataaattgctaattttattctgtttatatttttctgcag

SEQ ID NO: 9292 - DNA, 1104 bp, Citrus clementina
  Intron number 4 from transcript clementine0.9_017529m (loc us clementine0.9_017529m.g) derived from phytozome v7.0 (c hr-ID scaffold_2; pos 174000 to 175103)
tttgttcatcaagggcctcaacctttgcctactgggtaaaccttcgctttcttgttgcttcttttttcctttctttattattggggggtggggggccaatggattatatgttactgtatagctcatggttttacttttgcacactgacccattctttttcctgtacatttagttaacttaaattttcatttctctagttctagacttgtggagtatggagttcattgcaattgttctagattaattttataattcattcaagaatttcttctgttattatgaactctgttgttcatgtgagggaaacaatttatggtaattgttgatggactggtatggtataagtctctcagttttgtttataagatattttgcaaggcatgtaaattcttctgatatagtgagggaaaataatagcattggatatctggtactcaacaagaactctgattagcttccatcttatgtaaccgaatcaatggtacaatttggttcaacaatgcctcactctctatagtacctaattatcttttttatcttgaaattgggtagtgatagtctcgttaactgtagttgagaccattcttgaggctttcgctgcttgacagtaaattttctatgtcatttgatactaggggccgaaataatggtccctagcacattacccaatgttcaccatagttgagaccgatctttataaattgaatcatgtgcagtttagcttatgaagaagaagatcaagttccttgcttgttacggacttaggtttttatgtaaagaatgaacttgtcatatggcatataatcattgtagttaaatttcattgaaagcctggacagataatgatgctaatgctattcgcatgcctgtgattaaattacagcagtttaaacgctcatattgccaaacttacctgatttccagattctatagatttgaacggaataattgggattggtatttttatgtaatatccttcttctttttttcttggcaatttcatccttcgacttcactgttgcacaggcttccccaaagactaacttttgtgtaatatattgctttgtagaactccagttcctcccatcaatccagaccttggtg

SEQ ID NO: 9293 - DNA, 4995 bp, Citrus clementina
  Intron number 3 from transcript clementine0.9_021791m (loc us clementine0.9_021700m.g) derived from phytozome v7.0 (c hr-ID scaffold_6; pos 3854746 to 3859740 reverse strand)
caggttagacctctatatttgaatttaattacttttgaaatctccttaggcaaaaggcagtatttaaagacttgaagaacactcaaaatgttgtggacatcattgtgagttatcctatgtgttggcacactgaaaatgctttctcttgttggtcaaaattgtgtgaaaatatatacacgcacacataggcacttggtgcatgttcggaattgtgctgaattctcaaataatcatttatttggtaatgtattcttattttgtttaatacttatttcaatgattgcttgtatattgggtctaaaagaactagtcaaatcaaattatatttgataaaaataatttaacaactcaaacaattatatgagtaaatactcatataattgattatttggaaattcatcacaacatccaacatgcacttgggtgatgtatgataggtggtgaggagaagcgagaggaaagtaatccaaattctttttcctttcctgtgtagttgtccttctttagctggaatttgatttccactagaactctaattacattaaaattaaaaattgaattctttgtgaggaattcaaattcttccctaacggaaaccaaatcttccaaatttattccttctaatttttattattttacttaaaatttccaaaaaaatggattcctaagccaatcaagtcgctctttttgtgacattgtaagcaccaatagatttaaagtttgacgatctacataatggagccatcatggctgacgaagaaggaagaagttctcattttagccacacacaagggtgaaattttaaatgattatcccaaagtcaatattagttatttgttggaaattttaggttggcaatataaatcgacaaatttagaacatgttaaagagtcttcatctcagtcacgctccaacaaccagagttaacaactttttctagttttctgttttttattttaaaacttatttaaaatattttggttcttttttttttgatattttagattattctattatgagtatgaaataaattaaattttttatttaattattagctactaacagatgaaaactatatatactaaatttttttatacactttttagtctttattcattaaaaatattattgtaatagctttttgaggaaagtggatgagtagatagactttcttatagttcagtgcaaaatattagaaaaaaaaagagtaagttttaatactcaaataaataattgaaattttgtagaaaataacttgaaggaaatttggtccaattaaaatatttgtgatttctttccccctaaaaatttgaacacaaatcaaataatgaaattgaattctatgcttctgtccttttttttctctctcttcttcttcctcttttgtttgctttgttttcatttcttcaaactaaacaccactttagtgctttaacttttttaaaatgcattttttcttttttgcaatgtatttagtagaaagacaattgcaaatgtatgtaggaaaataaattaatccaagttcttgaaactaaatacattgaagctaaccttttagttgcgaaagaagttagcagttaatatatatatatatatatatacacacacttcaaataaatactttaagcaaaactgaaaaaaagaaatatactggttttttcagcaaaacaaattagaattggctatatttgtgatgttaaaatcaagataattagtacctctgtactaagcccataattaggccacaaaggtgcagtacatattattattttgttacctttaattacaaaactaatgctctgtttggtattatggtgttgtgacattaaatagagccatacttgtgaaattaaagttcaaactagaaaatcaaagctcaaactagaaaatgaaagttgataggtgtttgataaatatcattatgtgtcaagtgatatattttatatcaagtaatatattaattgatacttctaatttagtatatgacatcattgatgtatatgatctatttacaatattatttaattgtaatttaatttgaaaatgaaaaaggccactattattagtaaggccactactgttattaaggaccgtactttaagaaacaaaagatgaagtatataactatatgaaatatttataaggattggtaggactacaaatccacaaaataaggatgagaagtcccaatctaaacaaaacacttaaaaaactgtaaagataaaaaaatatccccaaaaccaaaaacactagctcactaagaatgcatccctcttaagatacagaagcttcctaattaagtagaataaaaaagaaagagatgtctttgaatcagtagtaatagatgcctcgaggaaagcccataactttactttgtcccataagtgtgaaggatcttcccaactttgttattaaagattctttggtttctttcattccacaacctaaaaaataaaagattaaatatataactaacaatgacattattagtgtccaaaaatctatgaagacaccatacgatcaacttgatgactctactataattcattgtctaataatggtgagttatatgtcacaattttatcatttggtagagcatattttgatctaccaaatgataaccactattagacgacgataataaagtgtggatgcaatttttggattgcacgtaactctttctttgtcatgtttggtcgctattgttggtgattatggcaatcatagctttaatttttactaatattaattcgtattattgttttgtatagtattatagtttttaaacaaataataaaactttcatgacatattcgacaaatttgaaatctgaaaaaacttgaattagtatgaattcttaatagagttgaatattttaatatgaatgacatgtttattttttatctgaatctctaaaataagtataaattgtttttttttcaacttaaaatctgaaaatcagtacttctatatttggcccttataaattttgaatgttaaataaaatagtaaatatatcaaagaacacaaaaaagatagtattttattataacatgaatcattttcaagctaataaaaccccttaatattctaaaccagaacatgttaatcaatttaatggtggttcatgatgttttatatgaaaaatgctcataaaaatagtgaagataaataataatattttgaagaaaataaaaagatagaaataataataatctactactatattaacacaagtcatagagataaatgatatagctaattaataagttttatttaagtaagaatgaaagtaaattaataagatagggatatttttagaaaatatctattgatgatgtcattcagacttattagattaagaaaaaagttcaaaagattaccttaataatttaatgactgaaaattttcttaaagttgaaaaaataaatagacttattgaaattcaatcattaagttaaaaaaaaaaaagaacagccccttaataagagtaataaaggtatttcatcaaatatatgtggagtaaaattatcttagattccaaagtagaatcattaacaaagactcttaacaaatttgattgaaagtacaactaccaaacaccaatacgaaatgaaacctaagtcacttaatcaacactgtatattaacatgtaattaaatttgaagtaaaattaacttagattccaaaataaaattataaccaaaagattttaccaactttgcattgaaatacaactaccaaacagcaatatcaaataaaaccccagtcacttatcaatattgcatataatatgtgattacgttttgaatgcatatcaaaatgtgttatgtggtgatgattacagtagctgtataatatgttgggagtgacacaaggacatatgaaaaaaactgttgtacttttgtttaattttaagaatacaacaaataatgtgtctgttcatatttacttagcaattaatattcgtacatttgatagctaatgattctattccacaacatatgtattagaagccatgacctcacagtgccaaatacttccagatactggcatggttgcatgatggtggtagtttcgatggtttatttattcttgatgattatcagacaaggtttttaatatttagacactttctatttacatgcagtcaggcaaaaatgactactctgctcatttgcatgtgcctaaaatgagatctgagaatgaaagagagagagagagattgacttatgtttaaattcattcgaagattcaaatagatatagaaaagaacattctggtaatatagttttgcaaatcatgatttaacatactccattttgttagacaggaaaatacagaagtttattggcgtgtgttgtgcaagaaaagtgcagaaacttctaatcttattttttcattgttttgtggcttcaacatcgtggaataggttttgcaaagaagccaaaatgttgtgggtcatccctagttcctatgattgtcttatggagaatttctttgtttttgataaagaaataaaggctaaatctctttgaaaaagcacagtggcagcactgttttgggtgatatggcaggaaagaaacatctgtatttttgaagggaaatgcgtgattatattgaagaattatggtatacagtccatccaattactttgctttgggcttcaataactaaggagtttcaggatttatcttttttcttcattcatctaaattgggaggggttttatgatggggttttaaagttggaacagcattatataggggtgattggaagtacttatgtgtagcactaaaaacttatctcttttgcttgcttagtggacaccactaatgcacttttgagttcataagagaaaggaaataaaagctaatacaaaactgtcgctcacagcttgtttgattattacactaatttatagataatttactttttacatcatgtgtagtgattttcttacaatacttatattccacatgcagcaattgaagc

SEQ ID NO: 9294 - DNA, 2707 bp, Citrus clementina
  Intron number 1 from transcript clementine0.9_026088m (loc us clementine0.9_026088m.g) derived from phytozome v7.0 (c hr-ID scaffold_24; pos 3604490 to 3607196 reverse strand)
attgaggtaattatgtgcttgatttcctccatttttgtcatgctttcttttgccatttaactaatttaattttatcattgaacagtaggagaaaaattgtggatgatgaaaatttcaagtttttgatgttgtatgtgtctcttggttaatctcccaattgtgccggtttagttgattatatacatgatttttttaatttaggataagattgtaaatggatggatgaaatggaagtactttggagtgttttgtcactcggagatgcccatcaagaaagggggaaatttgatcagagtagccatggcttatgtttgaggcaaaacttttggcattcaggaaaggacttgtttatgaaggtttcttaagaaagatggaataaggaaaactttttttctgttgtttatcaataatgttaagagttagaagcaagagggaggatgggatcaaaaatcttaaaagagtttggtgatgattactacagaccatcgaccggcattgaggattctagttgaaggcgttaggagagtgagagagatttgtgaaggtcttaggttgatggctcataggagccagatgttctataattcaattaaaatattggcttagttgaccagtatggaaagtagcaaaaacaaaaacaggatttatcaagctgtactaaagtagttggatcatgaaactgcagtctgagtcgattttccagaagtgagagtggaaaggctctagaatttctatacatgtaaaagagattttaccatttttggtagaatttcaagcgagcggcggcaacccccacaacctccccgcccaaaaacttcttgtggcatttccttctctagtagaaaagcctcaagaagcctccctatttataatcttcacacaattggtgaaatctagttttaggttagtagagcttttggatttgtacacaattttcaaccagttcatccttttgcatcctataaatagaatggattcactgaattagaaaggtaagaagaagccagaaaagtgttcttggttgtgtctgcttgcctgctcccagcctcgctcctgaacagccctcaatctgcctgcatacttctgtgtgtctctgtgtgtgcactattgaaactcataatgcgaaaggcaattgagggctgcggagttcttacactggatgattttcaggatgacttcaaacttcttgagctgatatttttctgattgctatggtttgggttttagtgatcgaagtaattgagccattcctaaaatatctaaattagcaagataattgagaaattttgcctgttcttaagttggcaaataaaacacaaaatagaaaaggcatttagtaagtgtctccgattttggagaggtccttctccatgattctgcagaaatttgcatttaaaaaaaaaaaacgaacacaatcttaatgaagggtatgatttttactcaagacctcttcacagtctataaacttgtattcactaacgctgaaagccgataaccttccgatcgagggatatgttcatcagaatcaccaggggatgtgtttctatttaggttttatatcccctttcacccatattcagttcacttgaaattctacagacagacagtttttaatacaaattgtagtagtacattgttcaggctattcagtgtatgcaaatccattttttgctgaaccctatcatgggtggatgtaggatcaacttctgtcaaattagcttgataagaaacatgttgaagtatgtcactctgggtgtggttggtaggttctgtcagtaagggaaaaggaagagatttgatacatattagttggatactcctagtgttcaatcccttgtcctacattaatctagatacaaacaaaaaatgcaaaaccactgacatgttagtgaatgccagtccagtgtgtcctacctccctaatccatttatgatggaaagagagggattatcaactccagattcattgtgctgattttatttatatttcatttcaagtgttttgtaattttctttcaagatatcttctaattgatccaaaatcagactagaatggtttcaattgaatttttcatatgatccttttactactgtatgatcctattaggtacttcattagctacctccttcattaaactgttttatgcggaaaagttgtctagatcctttggtttctttttgttgacatttagaatttttcttttataccacctgcaagctattcaatgttgtttgagattgagcttgcttcagaatgatgcctggttctggaagcttcttccgaccatcaattccaagtacttttctggctagcagcgtattaagtaattcatttcaccttttaaccttaatcatcacatgtagaaattgagtatgcattgaaaggcatgcgcataatggccatgtaattcatgcgtcagcattgtagcaaaagttggatgctaatgttgccttgtgttttgcccttgaatgccttttcttgtgagtctttctctcattactaaccgtaaaaagtaggcaaaactgccttgattagagtacaagtatgccactaaaaactggttttcaaaaatacctgctatacaatctccagaatttaattgctacttttaagttctatgtgcacttctgactcttctgtgcttacgctaaatatactaatttatgttctggtaattactaaccaatatggttgcttgatttaggca

SEQ ID NO: 9295 - DNA, 4877 bp, Citrus clementina
  Intron number 4 from transcript clementine0.9_001942m (loc us clementine0.9_001942m.g) derived from phytozome v7.0 (c hr-ID scaffold_136; pos 298316 to 303192)
cccttttagaaggtaagcatgtgagattatattgaatttttctctgtgaagtttcctttcacatattgcaactgctacttaaaagcttttatgtgaaaataggtagagaaaaagtttatggaacaattctcaattttattacttcatgagactgtacacagtcttaatatagggatacaagagactaagaaaggaaaggaaaaaattaaagcagaatattacacactgatttctaggaagcgataactctctatatttacaccaaatatacacctaaatatataaggaaaaccaaatcacaatttgatttggtcaacctttcaacactccccctcaagctggtctaaaaatgtctttcaaggccagcttgcaaaccaatttctcaaaatgtttcttaggtagtcccttggtgagtatatcagcaatctgctcatttgtaggaatgtagggcatgcagaccaaaccactgtccagtttttcttttatgaagtgtttgtccacttcaacatgtttagtttggtcgtggagtactggattatgtgctattgcaatggcagatttgttgtcacaatatactttcataggtagagaattacttgccttaagttcttcaagaatttttttgatccaaaaaacctcacaaattcctagagctactgctctatattctgcctctgcactactccttgctaccacagtttgtttcttgctgcgccaagtgaccaaatttcctccaacaaaggtgcagtaaccagaagtggatcttctatcggttacactaccagcccagtcagcatcagtgtagacttccacttgtaggtgcccgttttttctgaacaaaagacctttacccggagatccttttaagtatctaaggattctatatacagtttcaaagtgttctggtcctggagcatgcataaactggctgactaagctcactgcaaaggctatgtccgggcgtgtatgtgaaaggtagattaatctacctacaaggcgttggtaccgatctatgttggtcacatcttcaattttagctggctgtaatttcatattaggatctatgggtgtctcggctgctttacatccgagtagacctgtctcttcaagcaaatcaagaacatacttgcgttgagacacaacaatcccatcttttgatctagcaaactccatgcccaaaaaatacttcaggctgcctaagtctttgatttcaaagtcacgtgcaagcactttctttaatctgcaaatctcaactaagtcatcaccagtcaaaattatatcatctacatatacaattaacacggctaatttcccttcaatagaatgtttgtaaaacattgtatgatctgcctgactttgggagtagccgtgtcccttcataacattaccaaagcgttcaaaccatgctctaggagactgtttgagcccatacaaagacttatgtagtttacacactttactgctgccatgatttccctcaaaacctggtggtaaatccataaagatttcttcttctagctccccattcagaaaagcatttttaacatctaactggtatagattccaatcagaatgtacagccaatgagataaggacccggatggaatttatctttgcaacgggggcaaaggtttcttgataatcaattccataagtttgagtgaacccttttgctacaagccttgccttatatctctcaacactcccatcagcattacatttaagtgtaaacacccacttacaacccacagttttcttttcttttggtaaatccataatctcccacgtaccattcttctttagagcattcatttcctctaaaactgctaacttccaatctggatggtctagggcttcttttatggttctaggaattggtatctgagagatttttgtggtaaaggctctttgtttattggacaacttttcataggaaacatatctagcaatggggtgcttagtacatgttcggattcctttcctatgtgctatgggtaagtcaagatcaggaaaaaaaatgctggaatgtttaggagaagaaatgttacctgaattttctgaggaatcagtgcttggaggcgacgattgaggctgtaccgagtttatgggagggtctttactgttgtgatgatactttcgagtataaacacgaagctctggtggtggaattttatcttgtagtatttctccccctgtctctggtacattaacacttggttcctgtagttcaaggtttcctagtttttcattattagaaatatcagtttttcgagtttgagttgaagtgcccagatcaggtaaaaaaggattaggcataggtgtagaagtatgccaaaaatgatcttcactattttctttctccccctgaagagaattttggccaaaaaagggttgattttcgagaaatataacatccatactgacatggaatttctttgtttgaggattgaaacatttgtaaccttttttattaggagcatagcccaagaaaacacatttttcagatctaggatccaatttagatctaaggtggttaggaacatgaacaaacacagtgcacccaaagactcttaactgaatattggaggtaatcctactagaaggatatataagtgtgaagtattctaaaggtgattgatactttaaaacacgggtaggcatcctattaatcaaataacatactgttaaaacagcatcaccccacaaatatttaggaacatgcatagagagcatgatagcccgactaacttcaagtaaatggcggtttttccgttccgcaattccattttgttgtggagtatcacgacaagtggatgtgtgaattataccattttccttacaaaacacctctagataattattaaaatattcagtaccattatctatatggagtaggcttatttttgtttgaaaatgattttcaaccatgttataaaaatctttgaataacccctcaacttcagatttttctctcattaaataaacccaacaaagccgagtatgatcatctatgaatgttacaaaccatttttttccagttaaagtgttgatttttgagggtccccaaacatcactatgaataaaataaaaaggttttgaggcacgataagtaagtgctttgataaaaaacaacttttacactgaaaagtagtacaatcaacatttttaaataaatctggaaacaaatatttcaaataaggaaagctaggatgtcctagtctaaggtgccaaagcattatttgatccctagcagagtttgaactaatactactgttcaaaccttgagcttgtttattccttgataagtagtcatcaaaatagtaaagaccttcttgcaaactagcactgccaatcatcgtccccaagtccctgtcctgaaattcacaatgggagtcaaaaaagacagcacaacaattagaatctttggttaatttactgacagataacagattgcaagaaagtttagggacatgtagcacatttttaagctcaatggttccaaagatttttattgatccttttccagctatggaagataagcttccatcagcaactcttacctttttgttaccagggcaaggataataggaatcaaataaactagaaatactagtcatatgatcagaagcacccgaatcaataatccatggtgcagtagttgagtggctaaatagagcattaataatactacctgtttgggctagtgaaccactaggagtagcagtagttgaaccactaggagtagaggaaatttggtcagacatggtagggaagagatcagaaagaaagggaggctagctctgataccatgtgaaaataggtagagaaaaagtttatggaacaattctcaattttattacttcatgagactgtacacagtcttaatatagggatacaagagactaagaaaggaaaggaaaaaattaaagcagaatattacacactgatttctaggaagcaataactctctatatttacaccaaatatacacctaaatatataaggaaaaccaaatcacaatttgatttggtcaacctttcaacattttagttatgtttgggatatactatatctacacaaagcaatctaaatctcacaatatctgttatttttcatccaagtaaaaaattctcatttcatagacttcacactcgcacactgaaccccagttccaaaactaaagtagaaactattttgcttcataatttagctaaagtaattttgaaaagtctagatattacaaatcaatcatgtaacagcccatataaggacatgaacaatcactttctgatttaaagaactgcaagccttacaagcacagaattgagtaacctataattccctcatacaaatgaaataaaaatatggatactgattaagtttacaaattaggtttcttgtggagtttctttacacagaccatatggggaaaaaaatttaaagattataaagttttgcagttcatagattaaaaagtaaatgattgcgccacttctaaaagaacattcttcctcctgataggtttgaagatacaaatgtcccctttcaaattcttgtcctccgttgagtcaatccactccttcattatataaaaaactactattgcaacagatgttgagagacttcattagaaaccaggttgattgatttgacatccctactaaaaaatttcttagcaaatgtggctggaagatactgcaggaacaaaaacaattttaactaacatagcatttgccttaactaaatatatatcaaaagaaacttgttgatcacactttgttcaaaagcttaccggacatttgtactttatgtcccttgactacaacataaccatggatgtagggttttccagattcagtgatctgacaattttgaga

SEQ ID NO: 9296 - DNA, 2015 bp, Citrus clementina
  Intron number 2 from transcript clementine0.9_011111m (loc us clementine0.9_011111m.g) derived from phytozome v7.0 (c hr-ID scaffold_60; pos 749109 to 751123)
gaggagaggtactcatcatatagaccttgcaatttgccatttgcttcatattgtcttgtattttggttcaaatgtcaagtccttaattttatttttataagcttcttggtatttcatttatgctttcgattgctttcttctgcttcactgagatttctttttgagtacttttcatttcttaaaatggagtaaacttgtctgtggagattaaggaatctactggatgtctgaatctgttaatttttctcttttgataagtttaatcaaagctagcaatatggaacagccttaaaattttgatgtgtagtataagtgcaaaatctgcagcaaataaatgaaacatcttgtcagcttatcatctccatgaagcccaaattatttcttgtaaaatagacctagcttttgtcgctagataacacttttttttttttaaacgtcccctgctgtgctgatttaagtctttatcttttcaaagtctgctctacatctatatttttcattttgatattatatgcttttaatattggtgtttttagttggactacatattttgttaatttgtagttcttgggtgtgtaaagcctgtcagccttttttttaactgtaagcttgtaagttatttcaatatagaatatgtttttaagatttaagcacagaatcaaaaaaatataaataaatgttaatctaattcagtcaacaaggaaactaggatccaccatgtgcatatttatgcatgttttttcattgtgattaatgaatttgtgaacttgtctagaaattaatttatatgataatttatcattaaaatacttgaataactatatttgctggtgaggtggagtcatcactttttctttttgaaacattacatggaatttttttgggtcttccttggtgcaaactatttgatgatttaatcatcatatgcctcttattctgtaaactttttgccttttagacatactttttgtaaggtttttgttccgtttctgtctcttggacaatctgtccttgttttcgtagatttcttgtctcataatctgtaaatccttgtaattgacaaatattctcttgtttctcagctaaatagatgaataaataaataaagttttatttagtatccgttgaagatcacagccagccaaattctttgtaagttgatttttatagataacaaacctagtgatgtcacacataaacttctcaagttacaacgttcaacttaaatggcttgatacacactttggagcccataaaattataatttgaatggttgtattgaaaatacaaattcgtattaaaaaaaaaacgaatttgtatgccatcaaattgaaaagatattctaggaatcaaataaaatttattttctctaacccttaattctgccaatataacatcttttttttttttggataggagacagaaacttttatataatattggaacggaataaatattacaaaagtgaaccagaggtccacaaacttaaatcttccctacaatgtataacaccaaaaatctatacaaaactttgaaaaaagaaacccttgaaacccaagacattggaataagaatccaacccaacaaaatcaatccaaagctgcaacccaatcaagctgaatgaaaaagaatgaggaatcttgagaatccttggacgttgatgcccaaatagaagaactgatatgtttacacataacaattaaagcacacttttagtgattcaaaatttttacacgtaacatgcttccttataggatacaaacatatgtcatgtgctcaaccctgtgaaagaaattattaagtatagatgtctatcagtgatttggtgggtaattagtgtttagttacaccagcaaatttgaaatatgatttaatcatcttcttggtggtcagctcatttgccagaattccggaatggcttggttattatatataaattccatgagatacttcttttgatctaatgcttgaagtactttctaggctggcccttgttagtggattaaagtgggtgg

SEQ ID NO: 9297 - DNA, 1753 bp, Citrus clementina
  Intron number 1 from transcript clementine0.9_001941m (loc us clementine0.9_001916m.g) derived from phytozome v7.0 (c hr-ID scaffold_21; pos 743406 to 745158 reverse strand)
cttctcgcatactccaactactacgaagcctctcggtacgattaaacttattttgcttattttcgcttgattattctcttccttgctgtttccatttttgaacttctttgttgcttcgattttgacttctttctgcttgagccaagtcttaatcgctgttttgcgattttgtattttgtggtttttgtactgcattgtttccacttttgtgttcatgttcgtagatcgtcttctgtactttttttttttaattcatttttgttcgcgtatacgaccaaatattcgtcatatttgttaattacattttgtatttttttttccttttaaacttctgttatgaactcatctggtagcattttttttttcctcgtgtaatcaatttgttttacacaattttttcgcatggatttttgcttaagttttttgtgcgtgtgtatgtctatgtgtgtgtttttcttttttattttttttttacaatatttaaattcaccatagtcgtgagtttaattttgaactagcacgtgtggacgagatttctttcgttcgattttctgtatttttttctcaagaaactgattctgcttgttttaactttttttttagctcaagtgttttgtgtttccttttcttttgaaaatttaagttcattttattctcgagatgtttaattttgaactcacatgtgtagatgagattcacactgtttggttttcggtacttttcattaaccattaattttttgccatgatgtgaatttttccttttttaattttaactatattgtctttcttatgttgtccttggcagttcattaaccattggcactttgtgcttgccccatttttccttgctaaatggaggtgcccatgactgtcctcgtggactccatcattccatctctttttatacttttttgttacatatatttattatgtatatgcaatatgcttttgtatgttagtacgtatatatattcaaataacacgtgaggttggatgaatttgtttgtgtttatgtatacatatttttttatatatttaagcaattaatccatagagacacatgaaatttgatcaaaatagtatgggtgtccgcctgttgtgcttacatgtaatgagtgtacagcaatttaatctatgaactcagattatgtaaattatgaaatttctgttctgaactcatattacaatttcaggattccactacttgaaacttcggtctcacaatgagttttcccgagagcatgtattcaagtattagagctaggtgtactgtaattatatgttcatttttctgcccttctttgttggatctcggtgtttattttgtttttggtttctggtaaaggcatgcaatgccctgttatgatacacttaatcaatccttgtggtttctgttttttgttttatttttcagaataatactttaacacgacattcacaaataaatatgttggatactgtgtttgtactggatttgtttttgtatgagtttcagtttagttactttcatatgattgaggatatgacttttacaattactttctagttgttttacctcgaagaatcctgccttgttattttgaagcttcttcacattgggctgttttctttagtgatctcatgagaattatctccatgttgccattatgtaatatttctattggaatttatgtgtgtaaagtccctttaagtgtttccttaattcataattagcccattttttcaacttatttctctctctgtagtagaag

SEQ ID NO: 9298 - DNA, 1156 bp, Citrus clementina
  Intron number 4 from transcript clementine0.9_011432m (loc us clementine0.9_011432m.g) derived from phytozome v7.0 (c hr-ID scaffold_26; pos 1899771 to 1900926)
ccgcaagtgattgtttcaaaaggattcataccaaggtatgttaatgcatgtatgtgcgtgattttttcccccttttttaaaattttacgggagagtgacactttcatcctttgtggaatttttttgctacttaatttcaataaaatgtaagcataagtattacatcgttaaaggaaaatatcataatttattttataaattgatattagacaaaaatttgacatagatacaaattgaaactactcaatttctatgtcaaaacactacgacatgcatttttccttgaccaatttgattttctcgttaatattttatcactaagtaaatgatcaaaacccactgttgtttgtcaaaattaatcattccacccctcatgtttgaaaatccacgaaaacttagttgccaaatttgttaacttgcaacttttttgtatcttttattactttacccttatgaatttttattataatgggattattacatcaaggtaaaatagtaaaataaacaaaaagttgcaagtttgcagaatcttttgaactatagagagttttgaaacataaggcgggtgagaaataattaatttacagaaacaatagagttatttggctattttttcttttaattggggaaaaatcaaagggtggtagtatttttagcccacaattttcttcaaccaatctactcccaagaaataaatataaacattcacattatttttaaaagttacatataaagaagaagtttatagatttaattaaataaaattagatatctaaatatcatatacaagagctcatgttttttgggacaatttgatcattttatgttgttaaaataatgcaatcaaataagatttatttgaaagcaagctttgtggtaaaaaatacataagtgaaaaatattataagaaggatttcatttaaactttttattgatttttataatttaaaaataatgagaagttattatcattattttttgaaagttaagtatattataaagatagtggggtggaaatattctcattcaacaataaaatgaggtgttaaaaaatcgtaagagtggtaaagtttttacaaaaagatgaaaatttttataattttgccgttgacgccctaatcatattgattctttacaggcaagccctcaatctgct

SEQ ID NO: 9299 - DNA, 2317 bp, Citrus clementina
  Intron number 11 from transcript clementine0.9_003152m (lo cus clementine0.9_002893m.g) derived from phytozome v7.0 ( chr-ID scaffold_9; pos 4219440 to 4221756 reverse strand)
actcggacatagcctggattgaattggttagaaccctgtacacatatgttttacattcatgtaacgattcatcatacactgtatatcattctgggacaaacaatggaaatagcatctactcaaaactttattttattttattttatttttgatttatgctcttggggacgggggatggcatagaacttaaccgcatgaatgttattgtatgtaggaagaagttaacaaattgcacatgggatattgtaaaggctaatactgacttttcttgccttagccttcacttctctcttcaaacaccaatattcatgtataagaaactgcacatgctcaatctcctctgagattctaattatcaatatgattgggagaaaaatgtaagaaggaaatttaatgtttttgaaagtctatttcaatcaaattctttggagttctaaatgagtatgtagaccactgaccaagacataatggattcagcgcaaccaacctgatgaagctttgtataaatgataagagctatagcagcgtaatatgaaaattagaattaatatgtttgtagttgatgagcttggagactgcattgcccataagattaatttatagacggtgtcagatattgtttctagcatttctgctatcatggtttagtcaacttaaatggagaatttactaggttaatttaatttcacaagatagacgtaagattagctatcttagtcggttatcaagtcataggttgtcatactgagaatattgcaagttagaaagacgatcagctgtgtttgttggtggcaatattttccagaagaaataatgaataatagtagtgaggagagtgtgctaaatattagtaatattttggaaatattttttaatgttcatttagtttacagattattaattatatactgaattaggtgtttcttgtgtggtactgaattatagaataaaactattcttgtggtactgggttatttggctctacttctgccttctatatctgttagtgtttttgttattcctttgtggttgtaatggtcctgaatcattctatgggcttggtccacatgacaagcttgttagatatcagtctttgcaagtgaggtgggctgctagatcttgaatgcttaatacgattttctctttacctaagagcttaggcttttaggcaaagtagttacttaacatggaagaccattgtaattttctaattcaagcttttgttaggaaatgaagctgtctatgagagatagatttccagaatttacatataatgatttgctagggctttgtgcaatattgtataagctcaatagcatactgggtttaaaatttgccatacttttgcttgtcccacttacagattttgagtccacctcttcaaataattcctgtcaaacactattaatgtgctacttggagttcttggcatataatttgccctttttcttgttggatgtaggattctgagttggatgtcaccattgggccttatgagacatatgaagatgcaatttttgggtacaaggtaaaattttataaagaatcagtggagtgtatgtgtatgattttcaagcaacaagaatagaaaataaattacaaaaaaaagggtcacctgtacttgaaattagagagatcaaacctttttatgatttttttttttttggttaggtgtactaacaactcataacagcgctaagacccaggctatagtcaacttataaatgaaatagcagaaaatttgcaaaagcttccagcagttagaacttctgagatgttttaccaactctgaacaatgctgagacaggttgtgttgtcttctttagcagtagtaatacgtgcagtgaatcaggtttaatttgttgtgtagtttgaaggtttgtcgtacaccagtgagcttgtattggaggcaattagcattatgcttactgcactgtccaaattggcggtagaaatgtgaaaaacgtctttttactacattattagtcacataactctgaactgtttagaaaaacttttaacatttgctgactgtggccttttaagatttctagctgaaaatttatttggttcaaaatggaaattatatgaaataaaaatggagaaagttgactaggagtaagttgactagaagtattctttcctataattttcatttttacataacatacatcctagtgcgaatatttatttgaaaagaaactttgtgactgtacatccttgctgctgttcatacatctattgtatcaaacatgtagctcattagttgtattatatttatattaggcaacatttgaagcgtttattgggattcggg

SEQ ID NO: 9300 - DNA, 621 bp, Citrus clementina
  Intron number 2 from transcript clementine0.9_032173m (loc us clementine0.9_032173m.g) derived from phytozome v7.0 (c hr-ID scaffold_75; pos 381662 to 382282 reverse strand)
atactctttcaagcttttctttgtggattatttgggtaagttgatggaaatatataatgctgtattacaaaaacctgcaaaaacctacaaaatccctagttgtctaaacatttttgtcgagcaaaaacttcatttagtggattgaagggaagaagagggctcaaatcaggaaataattctaattttgagattatttttggtaattgaataaagacattaaaagtaatgtgatgcatacagttggtggtagacaaacacagtagccagctgtatcacggaaaatctctcctatgcatggccatgtagctgctgacctgctgtttaatagctttaagttacacttgtcacttctgtttcttttggaatccacaaagcatgcaaactctttctttaccaactcaagtatcttgaatgagacaacgaatcctaaacaatctttggtacgctgcattagtttagttaattaattttatcaaatataacagttatctttacagctaatttattattcttcagattttatttatttctttttaaaataatttaatctacgtttacaaattggtttatgtcaatctgcatgcaggggatcactatctcaaaacctgtacttggagagct

SEQ ID NO: 9301 - DNA, 1801 bp, Citrus clementina
  Intron number 10 from transcript clementine0.9_005540m (lo cus clementine0.9_005534m.g) derived from phytozome v7.0 ( chr-ID scaffold_1; pos 4079537 to 4081337)
aagctcttcgtgagatactattttcttgagtttctcttcttgcatcacttgtttccatattggaacaaatgaatctagctcacactaattttggcataggcatttagtagaggaatatttatcatgtttgaggtccaatgtttgtatgtgtgtttggtagccttctcccaaccgcctatgatcaatgaactaataaaatgcatggtgatatatttagtcttgattcactaatgtcattttagtgtctttccaccacaacaaataaaccatagactcatcattgatacctcggagtagagcatcaccaaaagccttttcaaatgagatttcactacttatttgaagagtcacatcaccataaagagttccaaaagactcttccaatgagattcttaaaataagattgtccttctctgaagagagagaagcactatctcatttgaagaatctcatttggagaatctcttggagcatttaatttagtattatattatttatctcattattcttgaagagagagaagtgttataattgctcttattttgttagggaaagaagtttgattaaagtaatagaaacttatttttatttgaggagtcttttgggaaatgacttatttttttaactcttctacttgccatataggtaagtacataagtatttgaagagttaaattagtttggtggtgctcttattgcccaatctgataaattttagtggtttggatgcagagcatgagaaggaatttttagttttagaaagatcagttcgacattctggaggtgttaaattattacttgattaatgattgtggttctaagctttcttcagtggcctggttctttgataaatcatggcaaagtaaggattagggtttgcagctatctttattcttccttatccagttcctaattataatcagatggtgaagttgttattagcccttcatatttcaatgtgtttggatagcagctgctatgtgactgtccctagttcacgagcacatttggaagcatcattaaatgcactctatttttctgcttgatgggcattctacattactgagtttaattctaatttcatctcttatgattttggaaatcaaattaattttatcttttaggagttagtatctctgtggagtagtctaggggagtcttctgagactattgattattccttcttcttgaagcaactatctccgttgagtagtctaggggagtcttcacagactattgattattccttcttttttgaagcaagtctgtctataaggcagttaaaagaaataattcatggtacaaatttctttatgtttactgttttgaaaatacttgatgaggatgagaatgaagatgtaagcagttcataaaaaagaatttagttctgctcttgactggagatgaaccttgtctgaattttatgcagatcagtagttttttgtgccttgaacccatgtgtttgctggcatattcaaacttaattcattctgatatggaacataggcattctccaagttttaaattaataaagcatttctcctgatcatatttgggcaaatgtctttccaaggaaaccatatagcgggtagatgtagatatatgatacactagatgttgttattcatttatgtggtcccacaatgtggaagtcaatgccatttgatgttcaattgcagactaagtcatgtttaaccacttgtgcattctgttagtttgttgcatgaataatttgtttaattttatgaaaaaattaatgttttataatgattgtacagaaagatctgagcagttagattggg

SEQ ID NO: 9302 - DNA, 1317 bp, Citrus clementina
  Intron number 6 from transcript clementine0.9_032991m (loc us clementine0.9_032991m.g) derived from phytozome v7.0 (c hr-ID scaffold_13; pos 3317150 to 3318466)
gtcaattactttcttgtgttctattattgaaaacacatggaatatttttgatctctcaagtaacatattgatggttgtcgaagccaacaaaaataaatacctactctaaataaattgtgtatagtaattgagtagagttgtgtccacaaagatcagtaattatttaaatcattttaaaatgtaaaatgcaaaatggggggaattgttgacaataataaaaatcaaattaaaataacaagaatgcaaattcaaattgtaatttaaattgggaaaagctctggttgaaggaattaactcagcttgattcgactactgatcattgattcaaatataaatcattactacttatgaatagaccggttatagctattgagaccctctaatagccaatctctccttaactagtcaataaccaaggtacgaccgttggttatttccctaatcaatagacaaccctaaatacgatcataggatttaatcaattaacaacctgaaaaatcagagagacttaaatcttaatcaacaaacgcatacgatggttcatttaaattagattgtttattctcataacacaacgcactgctatgctatttgtcacaaacattaaaatttccatacaatgaatcttttaattgacaatagattaagttaaaaattaaatagtggccaattatctaattaacaaatataatcatgacaataattcagagaataaacaaatacccaaaaagtaataaaacaattaaagcataagaaagatctcacagtagtgatgaatcaaagcttcattaaccttcaaccagaataataggtttagttcttcatagagagaagagaaaaatttagatctagggtttctctcttttcaaaaatctccccctttgacaatagattcctctcttaaattctctttcctctcttctcctctagagttcttttttaaataaaattctaatatctaaaatattatctaaatattaaattcgtaattacaaaaataatcaaaaagacaaaacacgttaaactaaaaactgcaggtccatagttgacagcacgcgcccacgccttatcaacaaagttcttctgaagctcataatttctccaagaaaacaatcatcctcaaacataatcttgtagctcaattttagcaccaatcaatagaattgcacctacaaaaataaaacacaagtaaatcactattattaagtgcaaaacatcgatattaaaggaagtaaacaatgcaaaactagtgcataaattgcactctaacacttattatcagctgagcttcccgactgttggttgaactttgacagc

SEQ ID NO: 9303 - DNA, 1891 bp, Citrus clementina
  Intron number 8 from transcript clementine0.9_002920m (loc us clementine0.9_002920m.g) derived from phytozome v7.0 (c hr-ID scaffold_11; pos 4400046 to 4401936)
ttgacattcagactggagctgttgagagctggaaggtactctatactaggtcttagactattataaaattagccaaccatttattggactttgtagaggttcaatattactcccagacttgctcctattaacttaaattcatagggttaatgggttcttaacatcatttcaagcctgttttccgcatggtcgaaactatctactacattagttaaaagtgtggtgactagtgcttgagttttttatttgctttgtgtttgtgtatgttccatgtaacaagcttattacagttctcttaaagatcaagtttctaggaattatgtttaacttgattccgtctgtaatgaagaaaacatgcatttcagcattttagagataattagacataattctttgacatctaaaatacaaaatctgacaaatatttctcctttctgaatcaaaggctttaggtgttgaagaatttgtggtacatcacaatgttcatttacacaagtatcatgcatgacaggccttttagtttagcctttgggcgaccaatttcttttaaataattgcggaaaatatgtgtattaaaccattggtgggtccctagattttcattgtagatgaaattctctatgatggatactaggtgttgaattttctgatgtagaagaaaaaagtgtcaggtatttttagaaatagcttaaaacttgtatggatatttgtttatttatggtgattattaactgtttttgaggaataccatagtccgggaactttataaattcttttatctactgctttcaatttttctatactgaatcacaaattaatgtgaaattacgtatgggcttacgtcgttttagatcgtttttggccaaaactataatgaactgaaatatatttggttttcttgtttcaaaacctgttcagaccagccattgggtttctttcagcacatatcaatattttagaagataaaccagacccgattcatagtaggaaatagaaaggtggaaacaactattactattacatccatttatgctattagttacaccaatttatcctcgatttgggatttaatgtcattacgaacaatttatatcgaactacaatcttgtcgaactaaaaatttaaaattaaggtacaataataaaaataataaaaaggattgtgttgaggttggatgcaatgcccagtgaaaaagaaaaatagtagctagcaagtcagcaactagaggtgagttggtaagtgatggccagggaaagcctgaaatataaatgaagacccttttttcctttttcattttttaaaaaaattaactgaaaactgatgatgggagtgtgaatgagaaaggtgacatgatccatggtggctagtgacattgacagtgtgaggcatggctgcgagcaatgggaggagctaacgatgagaggagggggtggctgagtgagacgagaagttgaaatttcttttatttttaaaatattcagagggggtggctgagtgagacgagagaagttgaaatttcttttatttttaaaatattcaatgtttcaatcgtgtgtgggtaagactaagagtaggatgtaaacatcagtcacaatgattagatgccacgtgttttcaattttattaaattgcaatcttgtgtgggtgagcataacatgtaaaatgagatagcactaacaactttgggtgcagatagaaaatttgtagtgtcaatggtttgttgatggtaatgtcaatcttgaaaataatactgaaagccaaatcaaacctgattgcaatgacttgtacaataattacctagaaacttattcttgcattttctttgctaagcactagtgttttcccttttttaaagatgtgtgcaatatggcaggttgagggagtttctgtg

SEQ ID NO: 9304 - DNA, 1237 bp, Citrus clementina
  Intron number 1 from transcript clementine0.9_009767m (loc us clementine0.9_009767m.g) derived from phytozome v7.0 (c hr-ID scaffold_207; pos 11207 to 12443 reverse strand)
catattccaggtaagtaatcctctacattttcaattattaatgattacgtggccaaagattcttaaatttttaagagaaatcaaatcaggcaaccatcggaaaatttaaaaatgaaatcactgtaaaatggattgcttttcacgctcaaaattagtccgtgtagaagtacaaaatttcattgtgaaattttcacagtagagcactgatattcatacaaaaaatttatgtaaaatgttgacaaaaacaatattaaaccctgctgaatttacatacttgatacagtaaactcaactcggtgtattacactgtttttatcaacattttttctctttattatttttatttgttggattatatatatcattattttgaattctcttaaaattttttattttaaagtgtagatatctatgtctgagaacttttatttatattcatttttctccttctctcgctttaaaaaaaaaaaaaggactccatcttaattcatgtggaatgcaagcaaaagttaatttcttttaaaaatccacctataaaaaaccttaacaataaatgtagtttccctttcatagcaacgacgtcattacagttgcatgttatcgtagacttctgtgacgtttatataaacctaaacagctatatatcattgtgcaacattaatttcatctcctccttgacaaaaagggaaaaaaaagtcataatttgctttcgttttcttcataaaaatttcagcacgggtggtagttagtaggaactacaaaaagacaagaaaaataagtggtgtagggctggaccttaattcaagttacggcacaatttgtgggaagctctgtttaattacttttttctttttcggtgagagtatctaattttataatcaagattgaaaaattctttaataataaaccaggcgcaatatgtttcttataaaatatgtaacgagtccgttcattttttttttattaaaaatactcatattcaacatattaaatttacagaatctagatttttcaatataagaattttaccctgtataatatattaattatgtgcaatcacaaagaaaagaaaaaaattaataaaaagatattaaagtacggttgagatatctagctatagatgtggcaataaataagacatccattaaagtccttaaagaagaggattgttttttctttttaattttttattttcagcatatgaattgaatattgttttacaggtgacatcatttaa

SEQ ID NO: 9305 - DNA, 2293 bp, Citrus clementina
  Intron number 1 from transcript clementine0.9_004919m (loc us clementine0.9_004919m.g) derived from phytozome v7.0 (c hr-ID scaffold_9; pos 4484339 to 4486631)
cttccattaaagctggtaataacggcatccattataacaaaatacttacctttaaaagtatcttttattatattatacaatacatataattattatttacagcaaactggccctcacaggccccatatagaagaatctagttccaccccacaatagccattagaaagaagattagaatctagttccctttagttatgtaatttttattctggcctttttaagttttagtttctttgttttgtcgcttgttaaacatgttaagaaaaattttaaccttgtcatataaaattcagacaattttttgactgcttgcaagtttttagttgcttaaatttgttactcgaattaagatttttctttttgcctattttattttcaatctaatttcgtttgtagaaggaaatgttcaatgaaaagaagttaatatctcttctttttttttttttttgatttaatctaacggcaatccagtcttgtccctgcacacatgtaaacaaaattcaaacctcaaatctttgttttcaacacaaaattttttattatctcaattaaatgacttccacaagaaattatatatgctttttttattatttttatgctccagagagcatagctttggctagaaatatttttgttaatacctaactatttaaaatctttttttggttcttttgtaattttgatagtaatttattttacacgtttttataaagcaaattgaatgccaaaaattgtctttttgtatagttattagatctggcgggggcgatttgccactttcatacatactaaattattttctctttgtttttggtagttggtaatgctttgaattttgttcgatctgttgttcttggagaaaaaaataaataaataaaataatatatcacccaaggtgcttttgtacccagccggtggtgggttcgctggtgggtcatcattttatttcacatgaaaaagacgaaagatatttttgttttatgaaattttccatcattttctatctaagttgtcagtagaagtaacaggtgttgtccactcttggaggtgttgtccattcatgcgatagaaaattttctcaattattggtagaggaaggtgactggacactacccaccaaataaagtaatttcaagtttagggtccactaaaatttctagcatgtgttttatatatgttgatcaattattaatccaaatgaaactttgatttattacatttttacatttattttttgaattgagcggaagttagaattggaatcattgtttttgtttattccataaaattaggatgggaaagggaattttttaagtggggttcataataaagtgaaattagaaaatgggagtttaatttccaaaggggttgggaatcagactcccatttgcagaattgacatttttattctccaaataaatttataaacccaatttcatcctcaattaaaaaagaaaaaactaaaccaaaacagtagccatgatcagaaccagcagcattatcacatgtcggtcgttgaacacagtagagctagttgttgcacatcatcgttgtacgcagatcttgtcaaatgcatgccacgaactgctacagatcgttagcctcatgccattgatcgtcacccattgtacgcaatacccatcagttgtcgttgcggctcgtagattgtccaactgactatgctcatgcattagttaaaaatgtcataatcgtcgtcatcatcatgaatattagtaatattattaatactattattagtaacaataattagtactaacaatagaaataataataataatcataattataataaataataatgacaacaattaactaagggcattgtaataatttataataatctattctaattctaagacaaagtaaacaatcaatagaaatacaattcatttcgattataattctagcaacccaaagtaaataatttattttgatttctgttcttcatttccaattttcattctaatccattccgattctaccccatttatattaccactagataaatgcactactagaacaatctcatttcttattcgttagacagcataataatgtgacaaacgacatatatatgtgctctatatcagtttcacataatttgagatgcacagattgtgatacaaaattgataatcatcatattactttttctgaataacttggagttagaaaaaattttcgttgatgatcttcaagcattcaaatttgcttcatttgttataaacctatgctaagaacgcattggctaacattaaattgatggcaggaaa

SEQ ID NO: 9306 - DNA, 1162 bp, Citrus clementina
  Intron number 7 from transcript clementine0.9_029463m (loc us clementine0.9_029463m.g) derived from phytozome v7.0 (c hr-ID scaffold_64; pos 156139 to 157300)
cggattctttatttcgcacgttcaggccatttgatgtatgacgatggtcatgatcgcttcacccattcgttgatgatgaaacgccaagttgccttgttgctgacggaaccccttgcgatctgaagattaacctcaatgctattgattttccatcgggtatatttgagcagttgtaataaatgaaggtcgtgctggctatttagctagctactcatgcctagctagaaaatgtgtcgccaaataactgtggtccttctagttaaaaaattaataataaaatatttttcttctaatttctttattattttataaacattttcttataataaatatattgtaaaacttataaatagtcatattattgggaccgaagaaatttattcttataaaaaacttataactcaatagaagtataatacaaaaattattatttttgtactactaaaaaaatatgtttttatcacacaaattttttaacatatatcattgtgtcatgaaaatattattaaaatatgacactttcctaatgtataatgtttttgtcattatttagtgatagatttttgacagaaacatatacgctatgaaattatgatggctacatgtcatgtaatattattttattttttaaataaatttaattacaaaaatactactcttaagtgacaacgttttagattttgttttattaaatataatttattttgaattactaacaacacgtgaaatagtgccatttattgataatttaaattatttgattactttaattacaaaattgccattgttaatatttaaattattcttaaaaattaaaaataacaaaaacgatgtcgtctggttgctgtaaatatattaaactaacaaatcaacacctagcaaatttccagaagtgataaacgaattgaaccttagtgtcacgggatgagtgttttgcgcagctaacccgtgcggcacttagacaactttgccgaatgttgctaagtaagcctagagcttctcgaactagagaagagagcaattgagccaaagaagaaaacttgtattgcacaaagagagaatacaatgcttgggttgcttacaatgcttgttggatacaaatgcctaatgccatcccatatttataggggaggcttgccaaactctagagattctagagaat

SEQ ID NO: 9307 - DNA, 3809 bp, Citrus clementina
  Intron number 3 from transcript clementine0.9_005017m (loc us clementine0.9_005029m.g) derived from phytozome v7.0 (c hr-ID scaffold_20; pos 2869076 to 2872884)
gggaaactattgccggctcaacggaggtacattttggaaattttatttttggtttctgcattaaatcataaagctagcggttaaatcagaacaaaggaaataaagatggaatttttttttagcacaaccgcggtgcgtagggaagacattatgtttgtcatcatcaaagaggtttttggttattctgtcttatggcctatctgaatgttacttgattcatgagtttttaattgagctactttccaactgattaatgagttgcctactaagatcttgtgtgcttaaccttcttgagatgaagttgctatatactaccttatgcatttagtaaacattgcagttggttgcttgctcttttttgtcatgctgctaccctttttgatatggactaacttttgtagtttacaatcgccatattatagttttcaccgcttaagtggcttaagtgacttttcagtcatagacgcataattaatcaattattatctctcctcatttgctaagtagtgggtgctagttggttcaactggtaaaatcttgtggtggtacaagagactaaggttcgaacaccactcacatgaatgggaggggatttggttaacatcatgatactaattaaaaaataaaattgcatcaagaattgttccccttgtgattgacgctgcatcaaatgagctgaaggactacttgatgcaaaattggatataatcctgatttaaaatttttaaggttttaacatttaatcagatttttttaatttagtttagacgcagatttttactttccttttattatgatttttatttgctattctgtagggagactttaatttttcttatatgctaggatttgatttctttcttgagcactttgatctttatcaatttctgaggacttgtaaccctatttaaagggtgctgttttcctgattaagacagactatgatggtgtttgaaatacagttatgattctacctattgatttcctcccgtatttctctgagtttgtctcctttctcctttaatttctagtctctctatttaattcttctattgtttcttctgtctcttctaaagtacttccttttctatctatacttatccttgtgtgatgtctatcctatatgaattggcattatagcttggaaaaatgactgtccactgccaccatttctccatcagcaattaactagataccaccatcactgtttgacttctttgagttaattagctaaccccataaacctattagccatccgttcattgacaaccccacatgctgccaccattctcaacctttctttgccaaacctttcatcactattccatcatcagtagactccttgacctccaatctaccacttggcatcaacgactactgaagatgacactcggtgatgcctcacgcgccagcacttgcgagagattcttgaagggcttgaatgtaattacccaaggggctaattagtaagttggaaaagtttggggctgttttcagaattctaaatatttgaggacttatttcaaagcctgagtgccaaagtgaggtataattatcctttaattgctgttttattgttaagtttgtggttctagtaatttgcattagaattcattgtcttacacctggtttggattcctcccccctccaatgagcttaggacaacccaaaataatatcagtatacagggctctaccttcaaatagatctcatagtttataatgattcaagcataagttcaaatagaaaaactaaaagttgcagtgaatgaaatgtgtagaatttgtattcttccattttgaatgttacccaacatgacaatcctagaaatctcactgtctatggcagcactcaaatttagctttctccataatatcttgtgcatgttctaccaacacgggtgaaaatgcaaaacccaggttcagtaaacctacttcctctagttttagagaaccatctcggagttgtgaattagcaagtttatcaagccattaggacgatgttgatttaaatgtgagaatgagttgagtcaaagaagaaagatgatattaaaccagaagatgaacttgttgaaagtatagtgaggatgcatatttagagagtaagaagcctttgccagttgacaatagtattcttaaacatcagatttgagtttattttataggttgtgaacattatcttaaaatgatgccctaaacctaattgcttaattgctcactccattgaatttctaattaaatggttcatttggcatcattggtctctctgacatattctttggcctctttttgttttcggtctttctacaaatgcctcacaagttcttgcaccttgagatcttacttggtttaaactatttgatgtgaaattttgtatatgactagaccaatttgttgcatcctctaaggactagattcggcattttctagtttgttggaaaaagccacttgaaattttattcccccatctcgccagctgtcaagttttctaagtgggggagaatgaagcaaaagaagatagtatccttatttaaaacatatagggttttaatgtttgattagagtttttgttaatttagagagatttttacctttttttccataaaaggatatgattgtaaggaaagtaaagatcttcctttaaactaacagaactagaggtgggcaaatcgggtttcggtttgggttccaacctgaatgttcaacccaaatggtttcaaatttgtaactgaatcaagtttggttcggttcggtttggatcacaaatttgggttacggtaattccaaaaatacaatccaatttttgcttttttcccccaaaaatatcacaaaatgtaaaatgaaaaagaactaaaagttaaaatccctttgcattatctggttgccttcaacaatatattgccttcaacaatagctaactaaactaattattacagcaaaacatcttccaatttctattcttacaaacacagcacaatcaattataaaacacttatgaaaggagtgacgacgatggccaagatctgtgaaagacaagaagtgagagatgatgatggcagacccaagtgttcatctgcttcgtgacttcaaggatggtagagggagatgcagctgcttcgcataggcaacaagctcaacagtggcatggaagaagacggttgcggttgagtttgggaatgaggggctgagtttgagtgagagagaggagtttgagataaattaggattgagatttgaggagattgaattataaattagggatttcattttatttattttttccctacaaaccgattggataattaattcggttagggttaaatttgaactgaattttaacccgatctgtttctagattttaatctgatcggtttattattaataaggataatatcatattctgcatcactacccctcgtcacttttactgatagaagcataaatctttgctggtgaaaagtgaagaatgtgaattttcccttttgactgttctaatttcctttgagcaatacccagctgatttttcttatcattctccatcagcattgtcagggtaccattcctgtgcttctacccaatttccaatggtaatttgtttatcatatttgctgtgtaatactctcttctgtttacttttcaaacatgttacaatgtactagactagatagtgtataatattattcctgcatggatgtgtatatgcattaatcgtagaagatagagacaaagctgtacgttttatcactgattttgtaattaccttttatcatctgaaggcaagctcatcagcaggttcctctagctcaaagat

SEQ ID NO: 9308 - DNA, 899 bp, Citrus clementina
  Intron number 4 from transcript clementine0.9_021027m (loc us clementine0.9_020433m.g) derived from phytozome v7.0 (c hr-ID scaffold_13; pos 321981 to 322879)
tattacttttctgcttttataaataaatccttgaggtaacttagatcatcataatttagaggacttgtcagatctcagttatattattaactaatcaaatctaaattttttcagcattacattttaacacttgttaaaatgctcttttctttcccttctcttctttaagtttgtagtttatggctaacttttaagtttaatgacacaacatctcagtcatagaagacaattaatgactttatatagaatatttggactctgaatgaaaaagttccaaggtagctctaattccatgctttgccaatgatagactttatatagatattattcttaatatttatacttctattggcaggaaactaggggaatgaacctgccatgacagatttgaattcccaagcatatagctataataatattcggatgactgctccatgctagcagatggttataatattaagaataatattaacacttcttgcaaaagaactgaagcaacaaatttgccttcctagttgtttcagtttctcctttccctcgtaaaacagtggtgaaagtaaacaaatgatctcctgtagttataaagaagaaagcttcttagtgtgataacatacgtccttgtttctcaggtgattgatatggggttatgtatgctaaactgaggtctgtaagcatgtgctgatgtgacttgaacagtttgtatgatattttgcataatcaaacagacaactctatgaataacatgaaatttcatatcagttagtgtttgtagatcatagtgactattgcaaacaattgttctctcgctttagaggtcagaaaatatagttgtgatttacttcactatttttttttttcaagaaactaataataataattttttttttcagcttcctaga

SEQ ID NO: 9309 - DNA, 1612 bp, Citrus clementina
  Intron number 2 from transcript clementine0.9_017470m (loc us clementine0.9_017470m.g) derived from phytozome v7.0 (c hr-ID scaffold_128; pos 110283 to 111894)
agacgcaaaaatataaaacaaaaatatcgaagaaggtaaggcgaattcttgttgctttcttttttcaaatttacgcaccccgtgtaatttttagtgctttttagttgtatgttcatcttttttaaatggattattttgattgtatgttattaatcagttcagttcagtattttgttaaatttaggttgtgtgtgagttgcttgataaaatgccacagagagagtatataggctatgttttgtttgggattgaggtgttgtagcttttaattcgcaactgtttactaaaaacttgtgtagaagcatagcggttatgaacctagccttagtcatgtgcacggtgtaccgagtataataaataatatgtgtgatcaaatgtgtatgaatattcaaaaatttttatgtttatggatttttcttgcatgtgtttaaatgttggcgttttagcttttctgaattagcaatttgggttctaatagatcttttgtcttgacaactgtgttgtccatttgataatatatgtaattgttttgaattgccgtgttcactctgatgtattgattagaaatggtttcaattgccttgtttagaatggaagacagactttttaagttctaacttttagtgagtgaatgtttgaaattggattgttcttattgattgcaaaaacaaaaagttaaaacttattgattgcaaaaacaaaaagttaaaactaccacagaaaagagcggttgattggaatttcataggtttaaggaagcagactggagtatttttgaaattgttaccaaatatatatttagtgcaccctgaagtttgtttaatcgaaattgactggagttgttctgaaggatttgaatacatgataaaatgatgagaagcaatctgaagccttaacctttcattctccaaacaaagcaaatatttgcatctatgtaagaactgttttttgtatcacgaaaaattagatcatgccatgttactacgttataaaacataaaacatcaaattgaaatccccgtgtcaggacataattttgctgaactgtgttcatgtttattctgtttcatttgtacgggacatggtgccttttgttctgactttttgatctggagcagttgcatgaaagaaaattgtggaacttttttttttttgtgttgggggaggggggggggtgaggtttccttataggagatcaaatcatctttgctcttctctttggggttgcctcttaattttctactgttcttttggaatatcttgattctttgtattgtaactcttgatatgtctttagaggaacagctgttgttatactcctatgtacatcaacttttgcctcttggattgtttgcctgtaaaaattttcgctttgctcgaagaattataatttatcttttcttaaattcttatttaatgttggatttgaagtttgagctcaatagctctccatcaccgaattcagaatcatctgaatgaaatatttctttcattactgagaggttggtgatggcaagatttactgatttgtgctgttaatttattggatctatttcctgtgactttcagtcctgttaggttctctactcaacttgatttgccaaatagtgcag

SEQ ID NO: 9310 - DNA, 971 bp, Citrus clementina
  Intron number 9 from transcript clementine0.9_030141m (loc us clementine0.9_030141m.g) derived from phytozome v7.0 (c hr-ID scaffold_34; pos 1179791 to 1180761 reverse strand)
aatttgttcaagaagtggctattctaaggtgaatagtttgaagtagttaaagttcatgctatcccttgaaatgaattattacttgtatttgatataataatgtcaccgttgatcctctacatagtcattctggtgcctctgggaggcacatctactagctactaatttataattgtttgttaatttgatcaattcatgtgttggtactacatactttaccatatgcctttgtttgatttgatgttacatgtttaattgattaatctagttaaacatatgaatcaacgacgacaagtgcacttcatccaataccattcagttatttgtaacttggtttatcattctgtgtaatcattattcatatttgatgttgtgtccctgtgttcatcatctggacttgagtaccatatgatgaccttacaaaattcatgatttctgcagtacgtacatcatataatacaattaaggtatgccaattttatatccagaaaatctacagcactttgtgaatgattaatccattagaaatttatttacagacttcaatttattgagttattgggtattcttgccttttctttgaataaaagattagaagatctacttttgattattgcttgaaatcactatgttgttttctcatattcaacttggaaaataaggaaacactgtcatctaaatgcttggaacttgcagaaactagaagaaatttatcgtgcattgggttattttcaaaatcttttatattaaaaaaaaaaagaagagggggggggggggggggggggggaatttttatttttttttttttattctttattaatatcttttagaaccttttgggtttggctagaaagattttttcaggattgtttggattctcgccatcgggggggggggtcaaaaaaaaaacgagggttcaacatagaaacgttgtttgtttttataggtgggagtcgaaagtccccgcattt

SEQ ID NO: 9311 - DNA, 680 bp, Citrus clementina
  Intron number 1 from transcript clementine0.9_029893m (loc us clementine0.9_029893m.g) derived from phytozome v7.0 (c hr-ID scaffold_62; pos 865238 to 865917 reverse strand)
cagggggcattacactgagcgagctgctgcgttttgtgtttggcattgctgcgaaatttgatgtttacagccttaaattgaattgacagtgcatgccattcaatttatttttatcagtttgtagttaaattggttaagatatgaaatttatagttagtgactcaggctttggacaaatgttaaaatcaaaacctatttggatttgggatgttttcctttttctccccatacgcttctactttttggattctttcctcaagtatgctatttccgagtgtttttatttagagagatggatgatatttgtctaaaattttaaatttaagttcccttatcaaatggacatcgggaaggtttcacttagtttattcctttttttttttgctcgctttctttatttggtactaagcttgccagtgtttttttttttttggcgctgtttaattgattcttatttcattcagtctcagatgttagtgacttaaaatttcttatgatctatgcagatgcccaagaatttgtttgtttattctgaaattggttacttcttagggattagatgttttatgtctgtgcatcttaccatgtactgagccacctatgacaattctctctctcatcgattctttgtatatttattttttgatcaacttgtagactctgtttcttgtgttaattct

SEQ ID NO: 9312 - DNA, 997 bp, Citrus clementina
  Intron number 38 from transcript clementine0.9_000113m (lo cus clementine0.9_000113m.g) derived from phytozome v7.0 ( chr-ID scaffold_13; pos 3755590 to 3756586 reverse strand)
ttcaggggtgcaacgggttgagtgtcaaatatcaggtgaagtcagtaatctctctctgggttatttaggaagcttctcctgatgaaatatgacattatgcttcaatgacgaatcagattcaatatggcccattttggtgttctagcagagagaaaagttgaaaaactgaaaatctagcatcttaaaatccatgttcttattgtttattatattcctgtccatattagttattaagggaaacttatttcacttgatttagaggacaacagtggtacttggtggtgttggatgaaatcaaggccatactgttaaggatgcagcctgtaagcaactagattgctagcgtgtttatggtgaatattggtaggtgtgtttatatgctgtaaacagtcagaagtctgtattactgtagacccttttctacttcatttcaatcctggaagtagattgtctgttaaggtctgatgctggtgggtgtagattcgggtttcaatgtcagagaatacacagcctcagccctgaaagtaataatttatccaattaggccttcccatccttaaaagacaaaatatagagatctgtgaaattttaactgctagaggagcagggctttactcttagcattctggagccatgatattggttagaatttaggaaactttaaattaggccccatctattgttgcaatttttaaggattcgctttgacttaaaagatgcactgacatgaaaactgaaagattgtgcttgataaaattagttttactggctatatcactctggttttatttttctatctgattcgaagttttgttgacgtaagttaaatcttacaacacaaatttttgctgccaaatttgtgtttggaatttttgtgtaattggttagttgtctcgtgcaagaaagttgctttttatagtccaaattgtaattggttaatgctaaagacctttttactgcagctaccattctcggaaggtctctcagttgccgacgt

SEQ ID NO: 9313 - DNA, 1256 bp, Citrus clementina
  Intron number 8 from transcript clementine0.9_011849m (loc us clementine0.9_011849m.g) derived from phytozome v7.0 (c hr-ID scaffold_18; pos 3329510 to 3330765)
atattgttaacattcaaaatgtgagtgtatacatgacttttaaaaatattttgatgaatattttgatgaatggaaaacaacccacgctgcccaccacaacccagtgagtgggatttgaactccaggcctcttggaccatccaagagatttcaacagttgaaccagctaactggtttattcttcttttggggctttttactctcctcataaagttcttgttttgtcaattcaaaggcagtagccaaatttcatttttcaaaattatattctataagaataaaacttaaaggagtacttcaaactgtggtcatccgtattgacaagacttgttcaaagatttaacatactcagcttgtaactaggaaaaactccaaaaactccatgtgttgtcagttctcaccttccccttctctcatatttttaagcataaatttgccaccagtggttaaatctttcacatcctcgtccacctagccaccattttattcctttactccctctgcttctccaaagatgacaatgatggctttgctcttcacttctttgttagatgccaaaataactacctgaaatttcagatacagtataattttattgagtgtgactccaaatttggttatttagatgctagtagagaaggaaaatcgtgaaccaaatggttttttgacttagcatgtgagaatggcatgatttcattcatttccctttaacacatttgttagctagaactgattcaatgaaactaatggatactggaaacttctgttggtgagtggtgactagactgctatcttcaccgttgattggagtagtggactggaaataaaatacaatcatattggtcttgtttttgatgtcaattcatattaccgaacttaaatcaattaaatattaattaaaaatgaaagaaacacacacacacagaggttatactggtttgtgtcatgcaagtcaataaatgggcaaaggtttatctaatttgggtacaatttcaccggcaacttgagaacatatgttgcttagcatgtaaaattttgcctgtgtaattgtaactgagtttggtaggtctcctgctttttaactttacacaaaaggtaggacagcttttcttcttgtgcatatctaaatagacagggtgtgatatttttccattttaatggttcctccattgacagattgattctttgaatgtgaaataacaagatttctctttttccttctgtgttcttgtttttctcagtctaaaggtctaggct

SEQ ID NO: 9314 - DNA, 1125 bp, Citrus clementina
  Intron number 17 from transcript clementine0.9_000546m (lo cus clementine0.9_000546m.g) derived from phytozome v7.0 ( chr-ID scaffold_59; pos 883929 to 885053 reverse strand)
atccagctggagctgagtggctctctgagcacaaagtatgttactcaaactatacaccaattgtttgtttgaatttgtcagggctgtaggaatttgggtatgcagttaacttagttggttcatggtatgtgcttaacttgattgatttatgatcttggttattagtttctttaatgtatatccctttctagcttttagctttaaaaagctttgatataggctttgtttaaatagagtacattcgtttactgcccacccagaaaagctaatctcttggacgtgtccagtgttccacaagataactatagatagaaagagggaaagttgtggtggggggtgtggttgtgtgtgggagggaatgtagaggaaaggggggagataactgaagaaaccagaagcacggggagagaagtcaaacagaaaaggggagaaacaacagaagaaattaaggagagaacaatcttattccattcaaataaacattcaagtctgcatgaatataaaaaactagaatagttgccaaaccctaggcaaaacgggaactcaaaatcctagaaaaacaacttcctcatatgaaagataaaacctaaatacgaaaactactaaggaaagtgaaatttttttaacaattgcaaaaccctaaaggattctgaatcgttaaccctagcttagaaaaacacgactcttggtgagttggattgataaaacttctccattggcttctcaaaaagtaccaaagtttgtcgtgtatggagaagagagtaaaaggaagagaaatggaagatctagtgttttacattctcaagtcagatcaaatgtcagcttaaaggaaattcatggaggcctactttgtggatccaaacaaaaccaaaaggaaactaaattaaggcattttttttttaatcaaataaggtatgttcctgaaatcgacattatataatcacataagctctaaattcttgctacttctccatacattactacatcggtggtcctgcatatccatcatcttgaaggctaattaccctgcaggttatcattgaattcttagatcttatctagctgaagctttttctttttttcgatctatttttctttccactggctgcagggataatctccaga

SEQ ID NO: 9315 - DNA, 1034 bp, Citrus clementina
  Intron number 5 from transcript clementine0.9_003164m (loc us clementine0.9_003164m.g) derived from phytozome v7.0 (c hr-ID scaffold_99; pos 725616 to 726649)
ataaatcattgcaagaacaactttctacatataaagtgagttcttattcctgatcccatcttctcttgcatggttccagatatgggacactgtagaatgcttgtgatatatttggggattgtgattcttaatgctcttttaagagaacattagttgcaaatttttcatagtgaatctgtctttgttgtttgttgcacttggaaggtagcattgttgaaaatttctataagcaccctccgctcaatgaatgatgaatggtatatatggcttttacctgcattattcttcaacaatgcagaattaaattatgatgttataattaattttttaaatttgaagaaagactctcatactaatttacaaatgttgtactttccatgagaatagaggaacgcgttagaagacggaaacatttcaagagaggctgaaattaagaataaaacccattttttctgaaccttatgcattgacattaattgatttggtgataaggtgacccaacaagtggcacatttaggaaatttgcttgaagattactagaagttagattatcatgtgatcctttttgaaaaaagttactatttagacgtaaaaagtaaaaatttttagtaaactggaaattctatttttttcaataaggaatatcaattttgtaacgtggttacaagaattaacttggaccaaggaagaggatcaaggggttgaggaatagttctatttaaaccggtaattgaacataacaaccaactgctctataaggaaaatggctaaaaatcatctagaaagtgaacattatatgccaagtacatgatcgtttgggtcatgtccttaatgaacttaaaaaacattattagcaatatatttccttagatttggtgaagttttttcagccatatgtctttaatttgtagttgaatgtatctgagctttggtcgtttgtataataaatttaagttcgattattagactattttgatattcatttttttcattacttaaaatttatatctttcaaaatttctaggcttctcaag

SEQ ID NO: 9316 - DNA, 2204 bp, Citrus clementina
  Intron number 6 from transcript clementine0.9_021468m (loc us clementine0.9_021468m.g) derived from phytozome v7.0 (c hr-ID scaffold_25; pos 792440 to 794643)
aaataaccatcccaaggtcagctctcctttaatagctttttcttcattaatgtgaatgcctattttacttttcatgtggtagttttgttattatcgctcatgcttatatgtggaaagtgagtgatttttccccacctcttgattgtcttagccttcttgcttcaaaggatttctttatcccttgtgatcgaagttatacagtggcttaggtttggatgaattttatgtgactgttttagcaaaatgatgccaataaagcttcagtacattttctttaaaatttttgttgcgtgtttgctgaactttaataatgtttacttctcttgttgctatgattttgaaataaaatttacatacatgttttttacttttttcttttaatgttgttggataggtgggtcgcccatgatgggccgacctgacccgacccgcacatggtaactaccatgtagttacatgtacggttatggagattgagagggaagttaattttaaacaaacttcctccactttggctaaaatctctctaatgataagaataagagtagagatacataaaaattgttaaaaatcatcttcttctcttcttcgtgaagattaaaattaagaacgttgaacaatccataaaaagggcatttatactgtgatcagagaaggatttccgcttgtgatttctttccgaccattaacgtgatccaatacttgattactccgctgcttaattcgagaataaaggtatttctagaatccttatttttccttcgaatgcaatagaaaaattgtctttgaaattgttcaagcaagaaaaagaaccggatggggagggagaaagaatacacacaatcttggatgaaagttgtagttatgttcactgtttttcccacttggtggctgtttcatccaagaacgatcttaatattactataatttgtgtgactgaagccactttctgtgtttatcgattgttgtttcatgggtgatctgggcaatataatttattttggatagatttatgcctactgaagagggtcggtagtattcaagggttatgtttttcatttatggtcaccatcattgtggaaggatattagcacagagaatgttattgttcaacagaaaaatttctttaggagcagtataatgtccaagactatagtttacatgaggttgagttgagaaaatttctacatggcataaggtctaacatgaatcatactgtgacatttgtcctgcattgttggttcagctcctctgattctttatggaccaaagtaagatctgatatgggttgttagctggtgcaatgttgtccatcaccaaatattgattccttacccttgcattagtataatgcaatatagtaattctaatatccaactaccttggagcaaataaaatggtgtagacattggcttttcgtttggactctgataatcgtaggtccaacctgttgaaatcaccaaacaagtaaattttctttttcttttggttgagggctccttgaagcatttttgtttagaaggctgactgcagagggtaggttgcttatgcttctagaaatttggaattctttatgtgaagtaaatttaatacacacaaattgtgataggtcatttgagaaatatactgatggaggtgagactgattgtttactaggtttgtttaacgattctgcaaaatttctccaatgctaagtttgttctgaattattgtccttttttaccatatacgtggctgtttttttatgtaattatgaaatctgaagtataattgattgcttgggcaatgatttctaagttcccaatcttccgacctgatttacaacccttcttcatacctgttattagtttatttgatttttttttttaataattaaagccaattatgtaatgtagtagtatagttcatctgcaagtaaaggtgcatctccatgtcttgtatatatccatttaccaaacagatctgtttatacactagcaacattttatttttatttttattttgggggggaactgataaagaggtctgagtaatgaagttttgtcaacacagaaagataactgcccttggtgacatgtctttgttttatcaatctatgagaagttgttgctgtcgtcaaatctgtttaataagaaacatttctgatttatgtgtgaaccaatattgtgcctctgtttctcagttcatcggattctgcttttggg

SEQ ID NO: 9317 - DNA, 3870 bp, Citrus clementina
  Intron number 1 from transcript clementine0.9_006858m (loc us clementine0.9_006858m.g) derived from phytozome v7.0 (c hr-ID scaffold_26; pos 1231084 to 1234953)
cagaggtgtggtctttacttgtatgtttttgtgttttcagttgttgattacttaagtttgatttgcactcattgagttttatcttggatgctcatctactttatactgctttgagaaaaagaactataacagcaaagattattttgcccgtggaatggattgcatggttaaattagaaggaaaaatacatattcgttgcacttgttttgttatcattatccagttcagcattatatagttgttttgacaaataggtctaaatttggaacaataaacgatgcaatttatttatttcatatgacatcctgggaggaatttgtatttcttaagccagcatataggtatctgagaattcgtggagtgaagaatttggagaaggaaggaccttaaggtgactcacactgttgtttggtgattataagtctttaggtgaatggagagtttgatagcagctaaagacagattttcactctaaaatgctttgcccttaagaaaagacactgcattttatgtggaaggattgcacaattatttactatgcatatacaattttttctgatatttaatttttaactataatttcttgaacttgcattagaagggtggtttttttcagtctgatgtcttgccaggtagcataggcattttattgctttctccggcaggtggaatttgttgcttgtactaaccttgggaagcagtctgatatgcgacacaacattttctctaagttatgagaaaaaattagatggacttttgtgggtcgacttgttaaattgatacttgtgggaactcataagtatcctatgtgtactgtctatgattgtttgaggccaaaaccgtctagagcaaaactccagaccatgtatgcctcaacaaatgagtctgcattgtcttaatgaaggactatattgctgttggtgttctgtgtaataggtgtacttagttgtaactgtaatttcctaaacttcctcaagtggaactgtgagctttatcttaccaatcttggctggtagttcggtgctttctacgtaacatctctttgttgcctttcataagattgatgaattttctgatttccactgccattagacttttcttcccatagaactatatggttcaataaaattttcaatgattaggaaaacaaatggaagattgcagacatagagccccatctgtttgtctgaatcatgatttttggattattttttaaccagtgccttgtttttgttaattcttgttgtagagaagattcataggtcccatcaatattgatttttatttgaattatcgattggccactgatgacattcagaaaatcttctcattcattttttttatggctaatatgtgttagcaattgataatgatgtggctagtgttctacatgaacattgacttgacagaggtaattgtagctggttaattgttgttgtagagaggattcataagtgttttacatgaacatctaatactcaaaagtaatattctttccaggcatatgtaatttggagtattgcatgtctgcttttacttgtgtcacttatatgatacaagtggacattgggtcaatgttgatatgagtgttagttttgaaaatataaatcttattatttcaaagcaattgaaaaaaaaaattccagattaaaatagtggattatgatctttttgtttccttgttacacaagttgaacatctcacttaaaattgttggctggtaatatggattctttctgatctatgccttttttggtggccttaagtcaaggatcttgttcttcagaattggtatttgcttctaataaagcaaaataccaacataaggctacctttggtctatagggtagtgcctccctgtacagcttgttatcatgatattacaagagaaataactgcttagaaagaatgataacatatttctgttttatcaaacttttgcacgtgaacagtcaaagtaatctgttagtatcctagcattacttaaggaggcaggttatgcctaacattcgtctgtctaaagaatatgatggaaagattcatgagaaatcacatgcatcgcttcaacttaagatttaaggttttaatcaattccccctcggacataggaattcaatagacggttgaaggtatttatttctacttaggtctttctgatgaacaatctagtggacatggctgggtttggtcaaataatagattctgttaaagctacacttagcaaattagcggggttggctcatgcttgattttagggttatccaggctgaccattagtagcttttgtaccaaatgctacagagatttcgaacaaatacactgactctggtttctgatttgtatttcttgatagtttttgcttgtgttaaatatcaaatgtccttgattttagaagttctccatccacctgtgaaacggaaccagttgtatgtacatttttttccttctattgattatgtaattattttctttttaccagaaaaatatttggaatgcatgggtaacaatctcagaattacggaattcagtcactcttaaaagaatcaagttactgttggtaaagaaaaagttgaaattgacttccatcctcaagggacaggtaagatttagagctttaatcttttcaaatgaaaacccctgcaagcatttataataggaaatcttatgtttgtcatatgattatgttttacatgcttcacaatatgctgtgtgtctggttcttaatttccccattggatttgtaattggagtttgtagtaaaaaaaccatccacttacattgctacaagactgaagtaagataaacaactatttacttatagaactcaagaaaagcagcaagaactataatgattttcaatttacagacttatattctcttaataatttttattctctgattaatcatagggaaaactttcatccacctataccatgtttcagcaagacatcaagcccatatgatcagcttgaaaaattgtcaaaaacctatatttattttatgaaaaatcatcaaagacatacggaatctgtacgtttttcgttagagttcaaatcgggtgtaggaacctcttgtttctgctacggtattgtagcagtgtatgtggacaatgctttcccaatccacatatgcacttgcacttctatttgtgggaagcaaagcgaatgaataaagaaatcccaaatctggtggatgcaattcagaaagtggaattttagggtaatctgtaggcaattatgtcatagaatgtttcggcgcagaattgggtgtgggggaaatattcttatctctctagaggtgtgcatttttgaagccatataagttccaactataataatatcctgtgaagggtctgacacgacatgattgattgttgtatatttggttttcgtacacattttcggacctagtgtgttgtactgcatgggtgtaggtgattcatatctgaatataacacatacatagtgaaacatattttccttctttctttccttgcttccccatccgccactgcagttgagaggccattaactgttgcatcatttttctttcctcagctgaaattcattttaatttgttaatgtagtttccttatttggaagaatgggctcttctagacaaagatcacactaattctttgcttggagcaactgaagctttgaaggccagtactcttcgtcttccagttgttggaaaagcaatagtatgtgtctacattttcattttttgctttttaatttgagaccagtgacgttttagtgattgagacagagagtgattctatgattagtgttcttgactttgaaaatttgattcgtctcatctttttcttaaaaacgtttccttttcctttttgggcatattaggctg

SEQ ID NO: 9318 - DNA, 465 bp, Citrus clementina
  Intron number 1 from transcript clementine0.9_001491m (loc us clementine0.9_001491m.g) derived from phytozome v7.0 (c hr-ID scaffold_47; pos 558956 to 559420)
ctcacgagcatttattgctgctggttcgagtaaaggttactactactactctaccatttcatatctcttttgggtctctgtatttcattgtatattgctttttttcagctaggtagttgataaaatttagctgggtcgtgtctagctgtctctaaaagttataactttgtttcaattctgtgaatttttttctcaatcttttattatctgggtatgtaagtttgagccttttgaagcttattacacaatcacaaccaaaaccaaaccgatataaaagtttttgatatttttaccctctttcttgttttcattcaaccaaagggagtccaaatgtcaatccgggatattcttgttgcatttaattttgatataatttcattcaattttcgtggatactaacaactaaatcttggtttttgtttgtttttgagaaactgcagctgatcttgttcgcttctggaagaa

SEQ ID NO: 9319 - DNA, 2577 bp, Citrus clementina
  Intron number 3 from transcript clementine0.9_027580m (loc us clementine0.9_027580m.g) derived from phytozome v7.0 (c hr-ID scaffold_10; pos 4843002 to 4845578)
ctcgacgttcaggcagcaacgccaaggagtttcaagtaagtctcatgagctttcaaactaagaatttgtagaatctcttttagtgataaatattcatatcttctgccaaattgagaatctattttatgcttctttctccctatgctttcaaatttttggaatataattctagtcgcagctatcaatataatttataaattatgacatttgaaattctgcaaacctacttaattcaaacctacttaatgcaaactattgctcagtttgaactatagatgagtgatgagcatataatacatacatattttaccattaattaaataattgttagctatatttatttgttatttttaattaattgaattattttattgaatagggaattaattggagattatgaataaaaagaacataaaggagttcaatttgtaagcattaaagattaattgatttttggaagaaattagacgtacatgcatgtggaaatcaagccaagaaaccgaattcaacaaattcatttacccatgcacatgcggacaaagaagataaatggatggaaagcaacgtaaaggggcccacacttggcttttacaattggaaaaaggaatcctagtgcaagcctaattggtgagcacgtgagtgagagtaaagaaaattaaaaggccaagccttttggcttaaggaaataacaaggtcggtggggcctatttaaagagtaatataaaagcaagcttttggcttttggagaggaggagcagaggacggaaaaaaaagaggagaattcggctttgaacaaagagcagcgacagcagaaatatttcggtttccatggctgattttatttcttttgttgctcacaattcaagtatgtctagctaattttcttatactgaggttaatgatgaaaccctattcaatgaaataattatctttttatttaattaattccctatatatgttctttgatgattatggtttttatttcacatgattaattggatgttaataaaatcttttcatcaattctgtcatgcattattgattgttaggattaatattcgattaaatctatgcttggatttataaagtttatacatgattatctttgactctatgtctttcattaaattgtttacatggagtgcttaggaaactttgactctttgttattcaatatgtttacatgggatacttagatatcgtattattaagcagaaaagaacctacacaagattaattactcggacttaattgttatattcatgagatgacatagattgatttcgagttgtcactctaaaattggggattaatttgtttgtgggaaatacatcgaggagaccatacgagatgagcaagtgtttggtggcggagttctgcgagcaggaatattctcctcgtccacgaatatgccattcgcgaaaccgaattcctgttagaggcataaggtcattcctgctaagggtcgaggcgaggagacccggtcaacggcagttggcaagacgtgccttcctatccgagaatcaaggcacgaggtccatctccatttgcccacaatgacgacgatggggcatccacatctgagggtggggagaataatgggcgtaaaatgcggaagatcgggactcagaggaagcttataaaaaggtagccaacaaaggtaaaagggttagattttttgctattttgaactaagaaaagagagaactggaaggtctgagattaataaacagccataagattcgtggcaagcgttcccagaaccttgatatctgacttgagcgtcggagggtttacgccgggaaaacaaccggcgtgctctgacttgtttctgtggacgcagggatacttagagaagaaagcatacgaggagagatcctgatcgaggtaaggttggtcgagcagacatcctggtcgttggaaggcataaccagaatctcgcatcaacataattaataattagataattactagttgaatagtggtagattctgaaaccttggtaatttgtctaattgatttctcatttgctttaattgttttcttagtttaattagtttaatttctcttaaaactcaatttgctcaactaggttagaattaatattaattttagatttaaattagacttttcaatttataacaatccctgtgggatcgacctcgttaccactactctatttctaaattcgtgcgcttgcgagtacattaaaattttcacaacaatgaggaacaaaaggccggtgtgtaatcatgttatagtttttgtttgaggacatccggcctgtttagcggctcaacaaagcatcagccaacaatgttatttctttttcagaattcattttatctttacccagtcatgtgatacagagagaaagtattcattgatgagcaacaggttaatcctgaaagaatccatataaagttaaatgtaatgtgtcacctagtccttggatatccagacattttgtttttctggttgaatatcttcggaaaatatcttcttaattttccgaatatttgttttctcaaatcctgtccagggtattctataccgggtggtgaagagcaacgtagt

SEQ ID NO: 9320 - DNA, 736 bp, Citrus clementina
  Intron number 9 from transcript clementine0.9_032273m (loc us clementine0.9_032273m.g) derived from phytozome v7.0 (c hr-ID scaffold_32; pos 1149241 to 1149976)
ctcaagtgtgcaaggagcagcaacgacaaattgaggtttcttgtagtttccatttttcattgctaagaatcactttccattgatggttagttataaaataatgctgctgtgtagtttaaatgaagatgagtctctgacacttgcaaacctggaatggattacaaagattttaaaggaaaatgttactaacttgaaagatttccttactgaaattgtttgaatcacaataagatttcttgtatgtttcaatggaacaacttagtaaggctttggaattggacatattgattatgcttctatcttaaagtgaaatagaaaagaaatgccagctgagaaaccttggtgacgtgaaaggtgtcatctggtttaaacagtgattgtttccattgcaactaaaggatactctgttacttctataagacatattctgagatcacatccctgtggaagtaaaattaaaaaaaaaaaaaaattgttataattttcttttattcacatagcttatgaaatataaaactcaaatcattttaactctaggatctttgagttcagccaatttgtaaattctactcagtagttatattttatgcttttctttctaaaagtgcagcatgatgtttttatttccagataatatgttttatttgtttagtaagatggatcttttctcactttattgaaacttgctggctgcttctctctaactgcttctctctaactgctcattgcttgacag

SEQ ID NO: 9321 - DNA, 1023 bp, Citrus clementina
  Intron number 3 from transcript clementine0.9_023932m (loc us clementine0.9_023932m.g) derived from phytozome v7.0 (c hr-ID scaffold_88; pos 566609 to 567631 reverse strand)
aaatagattaccccaccgggccttttggcacaaaagtaagtgtgttttgctgagtacattgtataagatgatgttcatctttttaatttttaccattttaaaaccattagtatgcaaataactaaagtctggacatcaaaatataaatttgatatcattttgaatatttgttatggtttggccatgcaaaccttatttttcaaaggtcaagagaaaacatttaaagctggtggattaggttgctagcacagtggtaagatgagaagctaaatgagatttgaaattaaaatattaaactactgaacctgccatctttcacactcgccagccataccttggcagcttagtagggttgtaaggttttagtgacaacgaattttttgagttatgtcttctgatttatatatctttacttggaaaaagttcataaagcttcttgtgctaaatatttatatcaactacaatattctgaggtataaatctttgcatggaacaaatacttctgtgtgcttggtgttgtccactatttgggtcaaactatcatgtgttttaagctaaatagtttctcaaatgaattaaaccttcatgtttaagttttgttactactttaattaatattcaaatctgtattcgttttccaatgtgtcgtttgttgacaggcaaattttttccctttgtcgtatggctttgtgatagtttttctattacagaggatatatcttatttgctggtggcattatctgttatctgtagcaatgttttggaagatagatccatatcttggtatccaatacaaattaaatgaatctggtgaatggatgacttaacaggcctttacaatttaataaatttagtacttgaattcattcttgatctgttgcacattaactctctactgtgttattattttctggttgaagtgatgtcagtctttgattaacacctagtcttacagttggtcatctttatgttcatttttcttgatttccttgtaggacgcacctgctgttgttaagtcatact

SEQ ID NO: 9322 - DNA, 2391 bp, Citrus clementina
  Intron number 1 from transcript clementine0.9_012506m (loc us clementine0.9_012517m.g) derived from phytozome v7.0 (c hr-ID scaffold_54; pos 490500 to 492890)
acttctccagcttcatcaggcaactcaatatctatgtgagctttgttttgctcttatgggaaattttacatttcagtttttgttttgatttttctttcttggaattacgtggagatttttggaaatgggtgtttgtgcttgagttgggattgttattgggttagtgagaattctctgttttgtttttgagtaattacatcttttattatgagattctggatcgctttttaggttgtgctctaatctatgttcttcttgttgttttgttggctttctgaaaaaattgctcattggctctaagaatttgaataatttgtaattttgttcatctaatctattagtaatatatagaagttgaggaatttgtgacactgctttatgacataaattttggttcaagttgagtgaactgaagactatgatatattaaatcatgcaaggaaaactcaattgatttaatgttattcttttatttacttctactttttgttttgtttaaaaattcttttttattgtctgaacttttaatatggaagaagaccactccaatgcttaacccttgatgcttgttgagcctcatgggtcaaagtgttgatatagtctggttttggtggctcgtgttctatatcttttagtactaattcctttcaaatttttgaatattcatgcactgatctttgatacctacaaaatagaatatttatatcacatctctctgattttccgtgcataaactatgttccttaagagcaattctcttggcattgctgtgcctacttgttgcttttggcttgacctgttccagaattctctctttatgtttaaagaatctttcaaatctgttaattaaggatgggagaatgcagggctaatctggttgttagatgggtttaccaaagatttcatgtttgttttgataagcatcaattttcctacactttatgagatattttccatgattcatgatgagcgtttataagattggatgaagttctccttcttgaaagtagtttattttttattccatttgattcagttgaaagtttagaaggttttcgagtgttaggtgattgctgcagtgacttttattttagctcccgaaagatgtgtttaatgagaaacagaaacaaattggtctttcacaactatggttcacaatactttcttgattgtggtagtatgcattcaattattggggatgaatgttgttattaggcagttatttcttgcagtccttgtctgctaattaggagtgatgtgtagactgttgtgttggaaattttttgtataggtaacatggatagcgcttaattttttttcagttataactgttttggctaaaaatattgtgtaccattgaattcttacataaccttgttaaggttgataatgatgggtgaaacctaatgcccttactatgactctagggcattcattcccttttattctgaagtatggaatctgccatagtttgtggcattaagcaatgattgtacagagcctaattgtttcttgagttattaccattgacttttgcaaggttttaagattcatattaagaaattgaattcttggactaataactgcttggtcttaaatatgcgagttgatagtcccatggttgcaatatctgagatgaggagagggagggccatcattctccttgtcatttgtatggcagaaaggacggatatgatatcattctctgtaacttcgagtgcagaatctgaaatggtcacaataaagtggaagcataacaaattttgataaaatcagatttgttcttttttgaatgcgagaaatgtagtttcctgatctgtggttattttttccaaaagggaaaaaaaaatgcaaaacttgttctgtcttatctttttgtttccatgacctctgagtctctgaccttattagtgacgccttcttctagccatgatcaaaagcacaatcatcttaagatatctgttatggcattttttctagaaagttttaacagttcattgtccttgcttgcatttcttaatttgatatctctaaccgttggataattttagatcgtgtcatcttcagacattaccgttagataagagtaatgttccagaagtcctccttaaggacggtgggagcatcttttgttgtaggtaataagtgtaattcgttagtcacaagacccagttcaggctttcaataagggctactggtaataacagtatttgcttatgtaatagcagaaattcatgtgttgtcttgtgttcggtcacatgtctgagtttgcacatgtgaacgcatgtctttgaaattaaattatttgaaatatcagttatcgttgaaacaattacttacttttagcttttcccaggggtttagaaaaatcgacacagaccgttgggaatt

SEQ ID NO: 9323 - DNA, 819 bp, Citrus clementina
  Intron number 1 from transcript clementine0.9_022422m (loc us clementine0.9_022422m.g) derived from phytozome v7.0 (c hr-ID scaffold_26; pos 2388536 to 2389354)
tgctcatttcttacaccagcaacactttcccgacggtgactgacctaattttacatcttctgtttggtttccgggaaaatgcgagaaaatttatctactctgagaacgaaagttttcggcttgactgatgcgtatttgaaaagtttgacttacttttgatatgcttgttagttcttaggtttcaaaaagtttgttcctttatttgtttttgttttatttattcgagaatgaagatgaaagttttgatttttagtgttattagcgacagcatattttaagcataaatgcctagtgataatgggtatctgtggaatttctgtttgttgattttgtttttttttttttcttgccctttccttttgtgaaattcttgaatttttcaaatgggttaatattgtatgttgttgttcaaacatatgttgaaaaaatgttgacttttagtatcttgactattgaattgagggctagaagaaggtcttctgtttgttttggttatttcctctttgctctttgatattagatgacaaacacacccccccctccaccaaaaaaaaaagaaaaagtgaaaagaatgtagaagtttgaaatgttatgctcgggttaaattttggtagtcattttctgttgagatgtggcaaattaaggtcttttttgttggtgtgttcattgtgcttttgattcttgattctatggatgtggttctctgctactgtcttttacttcatgcaattttggtgtttttggtatgactgcaagtaagagattgttaagttaaaaatggtttctatcttcttttgctttgtattgggaaacaggatt

SEQ ID NO: 9324 - DNA, 658 bp, Citrus clementina
  Intron number 6 from transcript clementine0.9_019315m (loc us clementine0.9_012982m.g) derived from phytozome v7.0 (c hr-ID scaffold_15; pos 3714243 to 3714900 reverse strand)
gagagaaaatttcggcaggtatttgtgctatgtttatctctgattgacaaataagtaaatgttgtttataaaatgatggaacgacagagaaataagtgcgaagaatctgaataggacaaaaccccatgaagcagtacaactattgttatttggatttgtttaatgaatttgaaaatggagtaagatcactagtaataatctctcaaaccttagattgattggattctctcacacattgtgtgctttctacaaacaatatccctgaaaaaaaaaaatgccagagaggggatattaataacttacaaggattttaaaattttacatgtcaatgcaatggaatggtatatgcaccaggaattgtgttggagatatatgcagccatttggaaactatatgttattattttatagaatctagtcaactatttggtgcaagaaaaaaatatattgactgatgttatgtgctttagaagattatatctcttgtatcactgtatgctaatgagttatgacaaatttcttgatagtagattaaaatgccattttatttctgttgtgcctattttcccattgtaaaatggagtgtggatgtgctgtaatctgaattcttgttggatttatgcttctatttcaggagaagggcacagaaaagtggttat

SEQ ID NO: 9325 - DNA, 1961 bp, Citrus clementina
  Intron number 6 from transcript clementine0.9_028470m (loc us clementine0.9_028470m.g) derived from phytozome v7.0 (c hr-ID scaffold_24; pos 3185134 to 3187094 reverse strand)
ttggttggttgttccaacagccatttgtcagatcggtatgtctattctgaagcctaataattatttttcatctgtgagagatcttcgaagaaatcgcgattaaaactgaactccccggagcctttttttttttgggatataaatatataccatcaaagataaaaaagaaatgcttcgaacctcttattttagttctataaatcattgaaaatattttcatttacctaactacatttaatgatattttctaagtcatgtttcccattgatcctaattttattcttgaatctcaagaaatcatgtgtattataggactttaaattccaagtagtatccctggtactactcaatttgtttggaattatgacagaatagaactttgaagagtggtatcaaagcgaaaaaaggatttatacaattttctttcctcaattaccttctaggttggtttctcctaactgcactatctgttttgagtttggcttgtgtgtttgtgaaaataaacgtgcaaagtggtatgtggcagtttcttgtttgaagttagtgcatgttcctaacagcaaccctagcaagttgcattccaatcgtagatatgaaaatggggtttttgagtatcaaagtttgggttcatgggcttacttgaggaatggatatttggcttagtgccctttcttttggtgttgaatgaaggttttgagatgccctctttcacttgatattgacggtttcttttgtggatgtagaatgtagaggcaggttattgggatgctggatctagagttgatgtttgatgaattagttgatgtaaaggataagaaaaacatttactgttaaggtgttttcaaagatttaaaataggggtttgatttaaaggagaaatgaggtggggaatttattacataaaataaaagatgggaaaatttggtttaaaggagaaatgctgctgctaggccacaaacagtttctgtaatggattagggtagtggtgctggtagtttaaatatgaaggtttagatgtcactagaaaatggatgattctcaattatattaagggacacattagttaagaactatgtagagaatttagattataaaagatagacaaaaagaagagaagtgaagaataagtgtagaataagaagaacgataagaggaaaaagaggagggcgtactaggtgtctatgaataataaccagtaacttaattttccatttaacataacctaatgacgtcctaagacacctataaaatctgatctggttggattaagtaacttgggtaggttctagaattggatattatttttatgctgcaaactgtgaattgcttagatgttgactgtatatttcatctttctgatttctaaaagagttagttggacaattgtttgtttttattgagttgttaaaatataggatatgtacgtaacacatctatataacttgaaggttgaaagtgccatttctctttacagcaagtgattttgtctaacttcttgtaaaggagggggggtgggggtgggggacttaaattggaaagggggtgttttttgggttacgccttgttcttaaaaattaaaatggatggagcatgacgggtaatcattttcttgctgaatgccttgtcgagtcatgattattttatgtagtaggtggactttggaatatcaatgcttctattgtttgatgtcagtcatggaaatggatgctttgcattaaattccgtggaattgaaattgttgcctaacaatcaaaggttcaaaaacaaataattgctcatgtaaagtaacaattaaatgcaatcaccattacacatgcaaagttactatgtacagctatgtaaatttatttggtgtaaatttaaccatttgctacacatccatggttcatatgactaaaccggcttccttttccctcttatgtgcagttctttgacaggtaccgaagcagacgggtgccggt

SEQ ID NO: 9326 - DNA, 2912 bp, Citrus clementina
  Intron number 1 from transcript clementine0.9_029160m (loc us clementine0.9_029160m.g) derived from phytozome v7.0 (c hr-ID scaffold_117; pos 126203 to 129114)
tgtttcaggtatgttatgttatatgttcttgccctagtaaaattttttgatggttaaaactttaatttgtttgttgccttgaaataaggttatattagcgatgattttgttaatgaaattagaaagatattattcaaagaaatggacaaattaaatcctgctttagtcaacaagttgttttggactttgcagtgtactcaaacataataaattccaaaatttaaatattgattttattttattttttgttttttcctctatttgacaaaattcaaatcactggaaacgagttgaacggatgctggtttcttgtacgtgtataatattttcgatttacataagcatccaaggagaaaattttgttccttgcaaaggcttcaccgctttttgataaatgggtccgtttctaacaaaatttatgtccctttcaggtttgagtagttttcatttgggcaatgttagttccttgagtctcctttttattactttagaaatgtctatttttggaccccttttgaaatcttgaagaaaagggctcttttttgtatttaaatttctttttactattatttttgaattttttccctttcttggcatgatctttttcaagctttaaaaaatagaaatcccataactttttgactgaactttcctagcaatctagctagatataatccatttgaatgcttttcttacactaaaatgcagatagtgagaccttgaaacctactttatttgagctcttttggcaagcaagcatgtaggatacagcataattgaaggaaatattcagactcagttcttgttagcctataacttttctatatatgttaacaataaatagatgtaggaacttttgccttatatcatctgttctgtagattagctcagggtgctctttaaaagtacaagcctgcattgcttcatgcttctttgtcatgcaataaatgatgcctttaattttagaattcttcttcgaatgaaatttttagtatttatgtttctggttaactgctgggcataaggcatagaacacagtactacttttgcaaccttgcatttttaacttgttaaaagcccacctagctttctttaggtcccaattcttctcttcatgcatcttgagtcaaaagccagcatgtgcataaccaaaaagcacatggagcccaatgctggcacagtaagctcctgtctcccatgtcacctcagagataatgtcatctaatcttctcattctgatcgcataattaaagccaggggccagaaccagcaccccttggtgacttctgttttgttctcttttagtttgttcgttgcatacacttgtaataaaatattttagaaaaacaaaaaccaacatagcaagggcgtaagggcgtggggggttatggggaagcaaatacagagcaaaagcaaagccagagggaatgagggatgttggaagtggaagccataagaaatgagagtcaaagaaaggcagaaaaaaggcaagttgggtgatagattctttgcttttaacgagacagacctttgccaagcctttcttggaaatgaaagagagatttaaaaaaaaaaaaaaaacacgcttgtatgttttatgtatcctatgttctatatatatataataagctttagctttccatgataacaactctagagagcatggaccacagataataagctatataatctttttgtcctcttttctagattcctctcatcgaacaagatgaaacaaatctcctctccactttcaagtttcatcacaacacattttctttgtacttgaatgtgtaccttttatatgaatcccttttaataacatgaattgatgaacaaaaacaaatgaaggagctgtcacagtcccaagctatatataagctttctccctgatggtaggatttatgaatcgagtcaatgacgagagggtggggtggggtggggtggggtgggggtgtgattattaatttgtaccaaccaagtcactgctgcttgtactagtacaacaagtctataggtgctgctacaagacagagacaagtctgcatcaattccatctacttcgatgtatcaatatcatcatcatctctcttcttctttatttcctttctgactgactgactcaactgagctctttcctctgacgacatccaaaagcatacacatctttctcttttctcagtactgtctttgtcttacacgcctactacctctactctgctctctagtccctagtctctcctgcctccctggcaatggctccaggctctaccttcaagttttgaatttttcaaacatttaatttaattttattttacaagcctttactcacatagtcacgtggactattctcatagatctttagattcatgggctacggcatacatctgctttcttcccttaatactctcatgtcggactccatttagtaactgtaatattgcagtgacaaaacattgttcactatatttagtttttagttttaccatttgcaaatatttaattgctagctagctaggaagcaaatggaaatgggtctaaccaaaaaaaaaaaaatggaaatgcgcatttgagaaattattaacaataaaacgaagagattgtgccaaatagatgcttactgtacagtcggtacccatataatatttgcatatcttttctttttaccaaccccatgatttcaagatcgaagaccaagtttagggacctatctgattatatggattaactatggccttatatgagaaattgtataataatagggactccgaagtcttcacacgaaaaaaaataacatttttacttatcgaattccacagttacgtgcatgcatgaacaatctcatgggtgtgtatgtggcgttttgtttgcatgcaggtttgttccacgtggcgagcagtttcacgctctga

SEQ ID NO: 9327 - DNA, 852 bp, Citrus clementina
  Intron number 1 from transcript clementine0.9_016438m (loc us clementine0.9_016438m.g) derived from phytozome v7.0 (c hr-ID scaffold_22; pos 2313226 to 2314077)
gaagattttcttggtaattagaatttcgtttgtggttgtgtatttttctagagatttggccggttttatgacgagtgttatttgtttactgccagaacttttgtccttatgcgcggcatatctgtttcttttattttctttagtttaattttgatgagaattcaaggattgttcaagagttcatgagctcttttctcaattgaatgttttgatttgttaaaatcgaaagaagtggaggcggagatagagaagtaaatagctgtaattcttggtaggtttatttttattttgatgagaatgcaaagatggtttaagagttcatgagctctgtcccattatttatttatttatttattattattcttagaaatagaattttggtttccttttttctattaattctgaggtgggtattcgtagttgtgatcaaagatataatcaattatttttaagtgcaaataaaattttcttgtgactcgtctataaggagaactgctttaaaattttagctactattggtttagatgttattatggagtatgtgctttttccataactaatgtttgatcaaatggtacagttggtttgcatctttgagttctgttttgatttttttttctttcgtttccttatttcaaggatttcagttcctaaatatttgtttctcttctaatagagtttattagctggctatgttatctttctctggactagtcatctgaatatgactcttaactacttggtttctgggtttgtttgtttctcgtttttcaattatttatctgaatgttgattactttgtttgatcttgaaacaggctctcataggctgtcttgtgttaataactcgatt

SEQ ID NO: 9328 - DNA, 910 bp, Citrus clementina; identical to SEQ ID NO: 8998
  Intron number 6 from transcript clementine0.9_011552m (loc us clementine0.9_011562m.g) derived from phytozome v7.0 (c hr-ID scaffold_40; pos 84564 to 85473)

SEQ ID NO: 9329 - DNA, 653 bp, Citrus clementina
  Intron number 12 from transcript clementine0.9_000973m (lo cus clementine0.9_000973m.g) derived from phytozome v7.0 ( chr-ID scaffold_73; pos 824581 to 825233)
caggtaagaatacttgaataaccttgatatgcagtggtgatatatattttcttgcttttcccctcatttgggttgtcttctcttttcgactttttcaagtatatatataaaatttgtggatgtttattggatataacatatttaggtatataggtaattactgactgcttggttcaaacaacagactcagacatcctggaaaaaagaactggttcatgaattagataaaagtcctttgttcatctagttaagtttatgcctgatgttatgccctcactgttgtgggctgtaaagctcatgcatcttttgggtttctttcactaaataatttcagaatatattttcgttcttcatttttagagatttgtagctgttatagtttcatttatgtcattgcaatgaatgactgctgctgcactccgtattttttttcttggttcttctcttatcaaaaagatttaatacttattttttatataaaaatgatggcctacaagttcacagctaaagtcccttggattaaatttggtagaatttccagatatactcttttattgtaattttgagaggtaatatctttgtcttatttcacaatctctaggtcaataagatttttcatggcttgttttccaggctaggttaaaacgacacag

SEQ ID NO: 9330 - DNA, 1293 bp, Citrus clementina
  Intron number 6 from transcript clementine0.9_009360m (loc us clementine0.9_008699m.g) derived from phytozome v7.0 (c hr-ID scaffold_27; pos 1971341 to 1972633)
tcaagttggagcttgcaatatatcctagtttgctggtattacaatttaagttctctttcactggttgagaattgaattctgattaactactctaatatttgatatctatattgttcactgcgttagaaggctatggacggagtcatagggatgcttgacaatgttaatgcaaaatcatcactaccgagatttgtatttatcattaaaattcttttacatttcatcaccgcctgcaacgccaccctttccccaactgttttgattctgtcagtatcaactcttctacttgggttttgaccagattacaactgttggtttggttaatgtgacaatatgtgtgaaaagagcttggtctatgtgtaattatcgcatttgttgaaacatattttgaatctttttctatcctaaggcaaaagttttaaatgaatttttctcgtcaattgtctgtgttaatgattcgttgttttagtttactgataggatttgactagggcttctttaaaatattgtattttgtgctacggaatttcttgagataaatttagatgcatttcttaggatccttcttggtatgccttaatattttccaaggcaatcagtttctctaaaatgcaattcctttctttctttctttctttttttcttttctttgggtgcatttttagctacttttactagtttgggtggggtgtcattggtcctctgttatacttcattttccttaggaaattctcagagttactaggagaggaataacctcatctgtcatgacattttagctgtctgtggttgtttatctacactgaccaaaaccttcttacagaccgttggttcagaatgacatttattaaaagactggcggtggaaatgattcagccaccatgtgattcctgattatgtgtttgtagtcagagtttgcacgtactgtcacttgggtctttgtggttttggtagtttatgaattttggtgtccctatttgatcctccttactggttgcgtcttggactttgtgctctgtattgaatgaagtgttcattttatatgaaattatgccaaattgagattcttgttgtatcacaatgtatagagtgttctctttttgaatatctactgctgtttatagtatccctgaaaatccaccgttcttgttgtgaatgctggacaaatttaacatttggtattctgagttattatatctttcttctcctaaactattggatgacagtgaccaaaaagagaaaaagattatgtgcttttgtttacttatatgctactataaatgaatgtgcagg

SEQ ID NO: 9331 - DNA, 673 bp, Citrus clementina
  Intron number 2 from transcript clementine0.9_012884m (loc us clementine0.9_009584m.g) derived from phytozome v7.0 (c hr-ID scaffold_81; pos 807174 to 807846 reverse strand)
gcgaattgttgatccttccttacaatcaacaaacggtaaatcaactaattagttaattaattaatttttaatttttgtcaagttaaattatcgtcttttatgtgccttcaattatttagtttgtactagagattttgtagattttagttagttgtaatggtgcacgtgcttgtgtggaagaagggtttatggagaaataaagccagagtattttgtttagtcaaatttttttttcaacagaagttgtcatttttactagtttttgatgaaggaattctgtgctttttaaatgctttttttcatctcaaacacagtactaaatctcatttgctaattgctactcgtacattgggacacagaaaagtctgtagatgcaattatcctagaggggttgaatatgtgagacatatgatacatttcgagtgtatcttttaaatgctgagctaatacttagttttgaaagtgctgcagccaaattgtttaataaatgtccgcttttacttagcagctaatgtttgtcagtcgcacccctgcacatgcttgacaataagcgatttcatcccacattatctgtgagttaatagaaagccacaacacctcaaatcccaaacatatccttactttggttttcagtttttttcaggaccaaaaattaggaagcaaattgtcttgg

SEQ ID NO: 9332 - DNA, 3356 bp, Citrus clementina
  Intron number 4 from transcript clementine0.9_021743m (loc us clementine0.9_016848m.g) derived from phytozome v7.0 (c hr-ID scaffold_35; pos 725395 to 728750 reverse strand)
agcattttgtcatacacgtagtcatgaactttccattttactattttctttttttttctctctctttgcattaatatatcgtttgtctcattttggaaaattttagttctttctttagaatatgtttttcatagatggattgcttcctcttgttgctttgttagattttatattgttattatttcgaactgtccggatgattgctatttacatagaactcatctgtgtgctcagaatttcctcatattgaaactttgatgtttgatagccttaaggaattttttttttatttttaaagtggctcagaagctaatagaagtatattagtaacagggaatgtacataggagagagactagagaagtccactaaaaataaggacaaaattgccaatgacaaaagctagaacactctaagatgagactttctatccctattaagataaaattgcctcccaagtggttgatacattctgaggcttttttgtacacaagatatatcaatcctattgatattggtatgaagaaacagccttcaaaattgagtgagttcagacccataagtttagtgacaagtctttataagatcatttctaaagtcctctctcttggactcaaagaggtgttaggggaggccatttcttactctccaggggcttttgtgagggatagacagattttggatgcagttttagttgctaatgaaggcttggaggagtatagaaaatgcaaaagacctggttttattttcaaaattgactttgagaaagcttatgatcacattgattgggactttttagattttgtgttggaagctaggggttttgggcaaaagtggagaagttggatgagggactgcttaaattctgtcagtttttctatcttcttgaatggtagacctagaggcaagattcatgcttctagaggtctttgacaaggggaccctttctgtccctcctattcacaattgtggttgatgtactcagcagattagtggacaaagcttaagaatccaggctgactgagggtttctcaatcggtaaagataaaattttggtttctcatctccaatttgctgatgacacaattttcttccattccgatgatgtaggaaaatttcacaatcttctcaaagttgtggatttcttttgtgcagtttcaggcttgaaaattaatttgaggaacagttcaattgtaggcataaatttccaggatcaaaagttaattgacttggcttcttcagtggggtgtgagattgggaattggcctctaaagtacttaggattaccacttggggggaactgtaggaaagctgatttttgggctccagtcttggagaaagttgagaggagattggatgggtggaagaaagcttgtctttccaaaggagggaggctaactcttatccaatctgttctgtccagccttcgttcttattttatgtctttatttcaaattcctgtttcagtggctaaaaggatagaagaggctatgagggatttcttgtgggaaggcataggggagggtaaaaaagatcatttggtcagctggagggtagtttctcaaccgcaatccaagggaggactagggttaggaaatattattaacagaaataaggccttgcttgggaagtggttatggaggcttccattagaagttaattctctttggtattgtgttataaaaagtaagtatgggttgtataaaaatggaagtatgggttgcataaaaatggttgggatgtagctgatgttgttaggcggagtactagatgtccttgggtgtttatttcaaaaaggaaaacagattttttatccaaaactaagctgatagtaggtaatgggcagagagttagattttgggaggattgttggattagggaggctgctctctgtgatcttttccctcgattatatagcctttctcaaggtcgtgagtgctccatagctagtctgtttaagtactctgttatgcagtggagttgggattttaagttccttagaaacttgaatgatagagaatctgaacaatgtgctgagatgcttgggatcctatggggatctgagagaggataagagagtttggattttagataaatcaggatgtttctcactgaatctcattgataaccacaatgctccctcattttctctttctcacctaatttagaatgctaaagtccctaccaaggtgaagatgatggtttggtctgttgctcatagaaaaatcaacacaaacatcatggttcaaaaaagaagacctaatatggcaatatttcctgaatggtgtgtcttttataaaaaagcatcagagaatgtcaatcatttatttctacactgcactgctgcttactttttgtggtctaagttgtttaagaccttcaatctaagctggtcagctcctgcctcatgttactccctcctattggaaagtttttcttgcttaaaaggagaaaaaaacaagggttctatggcactgtgagtcttggctaatttttgggttgtatggaatgaaagaaaccaaagaatctttgataacaaagctgggaaagatccttcacacctatgggacaaagtgaagttttgggcttccctctgggcatctattactgctgaattccaagacatctctttcttttttattttgcttaattgggaagcttttttatcttatgatggatgcattcttagtgagctattgtttgtgggttttgggatatttatctttgcagttttttgagtgttttgtttagattgggacttctcgtccttatttttgtggatttttagtcccaccaatccttgtacatatttcatgtagttatatatataatcttttgtttcttggttttgtggttgggggggggaggggggaggaatcctattgatattggtattctcttttgatcactaaagcaattttatgttttttaaattggctttagttacaaggatggattttgtattcacatatgctttgtaggtttttaccatccccttgtgcacatgagttccttcttgtttttgaatgagcattagcactgatgggggaggagaaaacaaaatcgagctaaacattgattggaagcctctatagttgttgtaactcttatttagatgtataattctcgaaaagtattcaaagcattgcttccagttttaaacaataaattttgctatatcttgtattgtgaaattgtttgacaaataccaattatttggctgacatggaccattcagtttgttttacttgtttgcatgactttcagattgctatcagtattgatgtaatttaactatatattccctctccaaatctattttattgcaggaaggagttaatatcttggctgtcaatt

SEQ ID NO: 9333 - DNA, 3190 bp, Citrus clementina
  Intron number 2 from transcript clementine0.9_013174m (loc us clementine0.9_013174m.g) derived from phytozome v7.0 (c hr-ID scaffold_131; pos 425924 to 429113)
ttactccgcacgtcatcactgtcaaggctggagaggtatcaattgattttcattcttgaattttataatcggtttgttttgatgccaattgttaaataaatgttgatttaaagcaatgggctgtggtagtgttagaggaagtaacaacattatatggatgttttttatttagaccaaatttttcaataaaagatgggaaattacttgcataatgcgttcagaaactacttacactagctttcttttctatgcataatgggtaatagaccacactagtggggcttttacagctcccttttcttggcatattgtataacaatttttggcattgtatctaattatttagagtcatgctactgtacttggattttgctcaaggtattgtgttctattagtacaaatacaacttaagtgttggacataaaaactcttgggagttacaaaggatgacaatcagtggaaaggatggcttttgcctatctttcccattgttgaggaaaggaaaaaaagggacatgtacatcttgaaaagagaaacatttttttagagtcaatgaagacatgaattttgatgtccacataaagaagaaatgtgattagtcatacaaagaattactgagacattttcacagggtatccaacaattgttaaaatggagtgacatatcactcaatcagttcttctagctttgctttgggcttcaatttctaaggagttccaagattcatcttttttcttcattcatctaagttgggagagtgctttgggataggtgtccaggttggtctagtattgtaaagggggattggcatattttgtatagcacaaaaaagttttcattattattttgctttctcagtggacagttggtccactccttgtaacaattctttggtattaatataatttataatttcttattttaaaaaaaaaaaaaatcactcaaatcagtgatatagtaatgatgcctcaattacttttagattgtttcctttacataagctgttatgttgtgtataaagttaatgacatagttggttcatctttatttatcttaccttttttcttcctaaataaacagtcgtttactattcattgacagcatggttgcttctatctgaactgctaagagttatctatgtcaaagataattcagtataacgctttacggtttatgaataattctcaggattgttgggagatgtaaatacttatgtttcacttgatataaataagataaatatcaggatttaaaatatcagtttgaaatcccattgatttattgctgctaaaatctgcatgatttggtctttttgtttctcttgaaaaaaaaaaagtggtttctttggttcttcaagtggtatatgcaatttattttattttaggattctaatttgatggcccaccattttattggtagattctgtctttttgaaatgcatggcctgcaagaagaataatgtttaacatctccaagtccttgacctcttgcttccactcaagaggccaaacaatgaacctggtgggaattgcttcctccatgggaaataatttcatgagggtataggtttttcagttttataacttagtcattaaaatttttggtcttgcattttttgttgaaaatataatcactttggattactgtacaagatgattggactttaatatcttttttgtcagttagttcctagtttgcttcgatcaaggaaatggttaaatttggacataaatctaagtagatatggcataaacattgtttacacattttaaagaagagaacaaaaatatgacaaatagggtatatattattatgcttctgtacataagaatttatagatcttctaagagacaaattgagtaactaatctccctaattaaaggaaaaataaaatctgattcctaaaatatttgcacagttcacaaatctctcaattacctaaaataacacataaccaaatattatacataatgacaataaatcctaggaaatcttccaaaatcatccaacacatttcaactgtaataggatggaatgattaatgatttaaattagccttatgtgctgtattccattatttgcagctaatattacaattgtagatggtttatatagtgcacacagcaccaaggggttggttgagtggtaagagacccttggttttaaaagtggttggggtttaaaccccttggcgctgcctaactgagacatttatatcccatgagtttcctgacaacccaggttgcaggttcagctatagtaccaagtttaaaactggtatccaaaaaatgttgtggcgtgcacagtttccttttttggcaagtggtcctttcaagtttccaatcgatagagattcttctgttaaataggaaattgacagtttgagcgcacataaaatgtacttctttcaactttgacgaatgttcctctttggtgtaaattgcatgatgggaaaagagccgaattgtataagtgagactatatgacaatctagcatgcatattggatgcagttgccaagagtttggacaaggccttggtgttaatatgatgaaagttgtatctaacattcagtggtaatagtgtaaaattgcttttataaatgtcttacttatttactgttttggacttctggttttaagtctttctttgtttccagacagacctcatgagtcaagtgttggtgacctagaacttaccgtattcaattcatgtgtgcacttcagcaccgatatttatataattgcatgtcatgaagaaagtgctattggtactagcctactggtggaagagaaaaatgtagactgcagtttattcaaaaaaattgggtgacgtaaaattactactttatatgttaattatcaatggagaaaattgtcaataattggtatactaggaattgcattttgatcatgcttcagctcgaatagatttttaattatcatacaattaaaattatcagataattagaattttttaggaatggagttgaaaatatcaatttttttcccatctcatagattcttatgctatagaattatatctagatttcctgtttggtgaggaaaagggtgtaaacagtttacttatctccaatagtatattgttgttcagaaaatatttgtcttctgagtagtgtgttccttttgtttgcaggacatatcatcgaaaatttttgcattttcacaaca

SEQ ID NO: 9334 - DNA, 1740 bp, Citrus clementina
  Intron number 6 from transcript clementine0.9_009488m (loc us clementine0.9_007207m.g) derived from phytozome v7.0 (c hr-ID scaffold_29; pos 456164 to 457903 reverse strand)
ggcagctacagtcttcacccttcttaagctttgtggtaatttctttaattcccactaagttttaaataggattgcatattatgctttctcttgagcttcattttgtagttgtatggttcgttaaactgttgtgtccttcacttcaaatttatcttttaaggttacttgtgattgaaaagtgatttatagatttgcagaatactacttatcaaactcataatatgatgcaaaaaaatacttatcttttttggaagttggccaagtgaatgaaagtgaactatcaaaaaaatatttctttaatcaactattggtcaaaaaagttacttgaagatttgctattggctgtgaaagtagttgtttctttattgagcaactgctctgtgcttctaggagtttgttccttctgtgatgaaatgttctaatttatttgggctattggcttaggatattatgttagaagaacaattgctaaagtgttcatacctttggttagtgatttcttgagcccttttctattgtggctcaaagagatgagattgtgaaggatgaattattatcaaatctgatgtggtttaggcccaattatctctgaagttggcatgtaaatcactttttgctcaattggttcatttttcattactctatgttgctgcaagtcagcaagatcctttgtgtgatggctagattgtcatttttcttaataagtatcatcaagcaggaagccaataaatgtatctgtgaagtttcatgtgggctctcaagtgcaaacctttattaatgaagataaatttttatcctgttttatcactactgctgttgcatagtcagcaacattgaaaagaaaattctccattttaaatgcactttacgatggtgtcaaaccagaagtcatttggtcctttaattgaaggaggcaaggagctccatgcgatttggaacaaattcatccttgaattgcacatgcctactggagaactccttacttagatcctaacccttatttgtgcttgtccttgtttatattttcgatgtttctttggcttagtttgagttaaatcttgcccccaggattgtgttcattctcaggggtgatttcgtaggatcctgaaattgatcctgctattgttttcccttggaactttttgctagtcagacctatttgggttatccctgtagtaacacttaactcttctgtcttaatcagcatgatttcatgtcaaattagatgctatctgataggatcctgaaattgatcctgcttttgttttcctttggaagtttttgctagtcagacctatttggttttggttattccagtagtaacacctaaaacttaaagtcaaatggggtgatttcatatcaaagtagatgttatatttgattccatggaggagacacattcctaaacatgaattttctgattctttttggagataatggagagctactgtctttttctttctttgggaattttctggggtttcagctttgctattcatgcttcattagtgatattctagagggtctctaggtgcgtccttggtacatgcatgtgttacttttatatcactataactgccaaatttactttggatcacttgattgatccactgtttactaatacctatactcctaaatttttttcattttataatttctgccattgtaactggtttatgttcttttattgtataaccttacacaggttacgtgggtgctcttggctggtgggatctattt

SEQ ID NO: 9335 - DNA, 1275 bp, Citrus clementina
  Intron number 3 from transcript clementine0.9_003379m (loc us clementine0.9_003379m.g) derived from phytozome v7.0 (c hr-ID scaffold_33; pos 1114219 to 1115493 reverse strand)
ggtatgtttcgttctgagaaaaacttctgaagttaaatgttctggtatcttattccatttggttatttggaattgaattattatgtgtcaaagatgaactgaacagtaggacagaacaagaattactgggacttgtttagatggtttgactgcttaagctgatacattagaagatgctggatgtaaattttaattaagtttggcaattaactcggtacttaagtttatcatgcgaaattcattaaagttttcacgaaaatgaacagaatcggttttgcttgggacctgcactactgggatttttttattcatttctatagacatacaatatcatcaccatgccatgcctaggaagaacctgtggtaaaataatgatttattcctcttggaatagttcctgcggtgggtaaattgaacgaaaataaatttctagtctcataggactatttctcttttgcacttccttgacattaaccggttgttagtagtttcagacaaaacttctttgctcagtttgactagaagaaagatatgcgaagaatatacaaattgcttatttaggttgaataggtgtttttttttttttttagcttgcgttcactgcattttggaaacaatctttggtgggtttatttggagttcttgatggcacatttattattgaactcataaactatccagctcttgctgcacactttgccttctttatcatacactctttataattctaagggtgctcttattggtgttagaagaatgctttattggctctccatgagtccaatgattttggaagtaaaaaatgttgaatgtgatctaaatgcaaaacataatgataccacccctgctgcatgtcttaagcaggcaacaaattttatgcaattggcattctcacattttattaagttcatcttttttttatcttagcttcatgctattggcattctctcgaatgcttctctcatcttatgttgatttccttcattccttgtattactttttgagtcacttttcctctccatctcaatattttcattttggttactcatcctataacttcatgtgtcgatttgcaagctggtcttgttttaccattgaatttctgcataactgcgctaccgcatttgtacgaccacattctcctttataaaccatttatttttatctcattgtatgaaaaccactgctggtattgacaaaactgtttatcttcaaaaaaaatttctcctaaagagattttgcacaaaacctgaagtcccgtttatggcatgcagg

SEQ ID NO: 9336 - DNA, 1534 bp, Citrus clementina
  Intron number 1 from transcript clementine0.9_006857m (loc us clementine0.9_003579m.g) derived from phytozome v7.0 (c hr-ID scaffold_6; pos 3146308 to 3147841)
acgccatcgagaggttaaaataataataataataaatcatacaaaacaaatatgtgcacatatttatagcttaattagagtattcttaaacggtgaagctactgaaactaaaagcataaaaattttgaaatatttccggaaaatttggattagaataagttaattttgcagcctaggaagcggaatgattgatttttttgttacgaaatatatctaagtttgaattaatttttttaaatacagtgaagcgggttggaagttaaaattttcaacttaagcaatttgcattagtgtttgattcgtacagatgacactgtttctttttagttctaaattttgttatttaaagtcgttattaaaattgattgttgtcaggtccagtgaattggttaattatatatccgaaatgccttcatctgtggaaattattcgagcaatggatgagatttcagatgcagtcagtttcctctctctatatgcatcatcttctctttgctgcatatcactcttttgttttttcaatttgttaattcgtttgttgagaatactcgagtaattggcgaagttttgtttttaaggtctgttccgttgttgattctgcggagctatgtagacaaactcatcctgacaggttcttttttaaattctgtgccgttctttcttcctagtaacacatatgataattttttcccccttttaagatgccaatgctcattgtttttacagttatttattataatttctttttgagtgtatcagagaatttgttgaggaggctagtaaggcatcaatgagaatcagtgaatatctacatgtgaggtgaccagtgatccatttagtttctggtttttgatcagttgatgcacacatttgtctcttttatgcacagaataatttaacatagttattattatttttatactgcattgtacgttaggatatattcccatgatctaaaatgatagatgttgcccatcgaggggggttagaatgtgaaccaatactcaaaactaactgctggggagattgataaccggcattctatcccatgagtagaaggttatcctgacacaatatcgttagacaaagcatcatggactatggttccttggtttggtagaaaatatcagtgaagtagaataatatgaaattaatagtctgtgcctagaattggaaggaagatcttgcatcacattgctttttttggctgacaacttatgatcaagaaaggccaagcaaagcccgatttgttatagttttgttaaactgaaagcaaggcagattaaattttggtgcattgctgaaatgaatttctttcaatactttatagcatgtaagttaaatctgtgtgattggagctgcatgaaagtttttcaactctaatgcaatcagctgtggatttgattttaagtatggtccttaaagttgttctttacctttttcagacaaacctctttgagttcattgactgttggatttaaatttattggcgtgttttctggcttacagtatctgaatacaaatcatactctgt

SEQ ID NO: 9337 - DNA, 1511 bp, Citrus clementina
  Intron number 6 from transcript clementine0.9_017960m (loc us clementine0.9_017772m.g) derived from phytozome v7.0 (c hr-ID scaffold_8; pos 6380176 to 6381686 reverse strand)
ttgcccccactcctgagcagattatagccatcaaggtattctgtttattgcagtataagtagtcaacggtattcttttcctgaggtttaaatgcatgtagacgatgctgggactttccaaaaggttggaaatcagatgatttaattaactaggcataaggatgtaatgatatctaacattttaaaaaatgttaggatgatgaaaagactcctagttctaggctttattggcatgccataccagcttttattacatatgcgaaaagacattttagcagctctgctttgtagatcaaggctgtaaaaccaagaaataaagatagcgactgaacaaagttaagagtatctcagaaattttttccttataatttttaaagcactatatatatatatataaagagagagacacatgcacacacacacacagatatattaatgatataaatcctcaaagaaagctaaagatcgtagagaggggaagccaaaatcatatggaaaaaacaaaaaaaaaaaatctaaaacaaccaatgcttgtaatctgcaatgaacaaccacccacagcagtggttagctgaacttctagataagttacatcaaacttcttgccagttgaggtgaatgaagaaaagaaggtacttgaagctcgtttctagctgacccaaagcaaagaaaagatcaaattctaccctgtccatgttgtctagtcttttctcctaaatataagatctagcttatttatgttcatataatccaaagagagatgaagcaacatatttcctaagaatttcagccttgtttccttacctgaaagtgaaagtattctccattagtgctgagtcactagaactcatggccaacaaattcttatgttctttgcataatctattctacaatcttgtatcgtctttttgggagaagcagttattggtaaccattgcttttcaaacctcgttttgagatctctgatgctttttctaagatcagtttaatgtaaagaaaaggatatattttggaccgttgaattaaaaggttgcactgccttgcagaaaaaagttattttaggaagtgtactggtcttttttttttttttcttttttcgtgtcaaagggtagaaattatgttgttgactgaaatcatgcaagaattagattgatgaagagttaggtatatatgagtgaacattagaaaattcataaataaatcatatatgagtgaacattaccctttatattacacattttgagaaatataataatttcttgacacagacaagcccttatttttacatacacaatatttttgagccttaatacctaactcttttattctcaaaagatcatccaacctaaaatatcaaactaatttagctgctgagtgtatgcctgagatacattgagtagtgctcaaaaaggaagaaaaagaaaagaaaaatatgttgagctatatttttttgaattatggttttattgttatgcaggctgctattgtgaattctcagacacttgaagaggt

SEQ ID NO: 9338 - DNA, 2951 bp, Citrus clementina
  Intron number 1 from transcript clementine0.9_014463m (loc us clementine0.9_014463m.g) derived from phytozome v7.0 (c hr-ID scaffold_12; pos 1192756 to 1195706)
aggtatgtatgaagaacttttagtgcatgttagtttttgtttgctttgttgatgagttgagtaaaatatgaaaatggatcttcaaaattgattgagaatatggctgatgcttcttatttttgtcatcaattaatgttagttgtagtgaatggagtaacccaaatgcatgttgaaaataaattgaagtttgtaattagtattctataaaagaaaatgcttcaatccttttcgcggatagctttttggtatttgacatgcctaggttgaatttataaccattaggagtaaatgtaatatttaaggacattagatttttttgtattattgagattttctagttttagaaaatccaagattctgttcatttttagtgtgattttccataaagttgtaagattatatatgtatgcagcaacatgttaatacaaaattcatttgaaaggttatcttcatcaactgtgttctatagtgttagatggttgccaaccattttgtgttgggtcagtgtgtttagtctttaagattcacataaatgttttatttcggttgttcgtcagttttaatttcatcaatagaaagtgtcaataatgaagctgcatgatagggcttaatattgatgtacattgaaataataaagtaatggttccataatgttaaaacaagaaaaaaaaaagatataaattttgtgatagatcaactgcaatgacttggtggttggcaataacttgttatttctgttatgaataaaatcttagttctgttatacgtagtctctttgcattaaaatttctgcaaaatgttgttagattgaatagaaatataagttgctactactgttgaaatcaagtatatcgtagtatgttttgcagcataacagtgtttaacgagtagaaccacgattgtttgaatctacttatgtatgtgtttacaatatttccataacttatattcactataaattgcatactaatacgatatttttattaataaagggcaactaacccaagcctaaagagatagtcgatagttaatcctgcagcagcagctttggcagcaagagtgttctttgagaatacattgacatgcataggtgttccaactttgaataatgattggaaagtggtgagatttgaatgatttttgaagagtttgtagatgcatggtagatatggaggtatgagaggatattggtagtgatgttttgataatgttgaaggaagaagaaagctttagttatgagtagcagaggctttgttgtttgttgagcttggcaatggctaattatatagccaacaaacataaatattggcagtaacaattataatttctaaatttatttttaatttttttaccctaattcagctgtaaattattttgggaatagatgagaataatctggtaactttattgtgtttatagcctttggcgccaaaacagatgtaatgctatcaaccaacaatcactgttttgaacatgaaaaatatgtttttcttaagttaagggtattttagatattttgtcagtcaacaaacagtctaagaatgggaatactaaagtgaggggaggtcactgagagtacgtgaatacattctatcaaagtgagaataccacaaacctcaggggaggtttctgaaaattacccttttctcctaataataataataacattccgactaaaaaaaagaatattttagaaataagatcgtgactaaagaactcataagataaggtactattagcctaagcatcattagatggttttatttttattaatttttattaattttttaatcatctaatagtgtctaagtaccgtagccaaacccatataaaaatagtactcccaaataagatgactaagctattagtatttatgaatcatgctctatcatgatctacaatgtcttgcgtgataaataaactagtatcccaatatgttcacatcaattttaattagaggtatttttatctagaatgtattttcttgttaataaactaagataaaattgtaaagagtaaatgctaatttagtttctatatcttaacttaagtatccgtttagttcttatattttgaaaaacatctaaaaaaattctttttttacccttatttttctttatttttacaataatacactgacaaaatatattattgacattaattaaagcaatgtttaatgtacttgcaacaatcttattaatagttattttataaaaaataaattatcaaattaatcataaaagtaaaataataacattaaaatttgtgaaaacttttacattacttttaagactaatttgataaattaatatttttttctttttattaatatcttcaagaaggcaagaatattattacaaagtgtattattgcaaaagaaaagaaaaataaaggaaaaagtgtaatatatttaacaacaaagctatcttaagatactttttaaaatgtaggggctaaacagacacttaagttaaaatatagggattaaacgaatatttatccatttgtaaatcaattataattttaagcaatttgcataaatttcccctgtttatatatttactttttaaaaaatatatataaatttataatatatgtattacttaagggcgacattgtgttttaaatattgaattacttaaaggaaaaattatcagtcgttcacctaacaattattgtgttatatatattaaaaaaaactaaaagaatttaaatttgattgattttgcactcattctttacaatatgtatcaaccgtccataaaaaaaaaaagacagaaatatacttacaaaatgaccatcactaccattttgtattacttttattttataacatgtgtgataatgaagtaatctttgggtggatggctaataatttctttgtactaaatattttctttggttcgtacttttcaggaataggcgggcagttcacgggcctgacaattgag

SEQ ID NO: 9339 - DNA, 1326 bp, Citrus clementina
  Intron number 1 from transcript clementine0.9_004175m (loc us clementine0.9_004044m.g) derived from phytozome v7.0 (c hr-ID scaffold_16; pos 4153921 to 4155246 reverse strand)
gtaatagatttgaatttgatcgttggtgtttacaggtaagttgaaagcattcggtttcattgttttgatattttgattcgtaattgtggtggattttgtgttctaatgctgaatctgatgatcatgtgataagaattgtgatgagaagtgaatttcgattttgatttgtgatcatgatccgatcttcaagctgaggttttgtggaattcgatgagttgatcgagaattttgattctgtgggagttgaacgatcctgatttcgaatcacttttttcgtaaatgaattgctcatttttgtttaaacaatgatatgaaacttttcaatgtgttactttcatgatttttttttttttgaaaaacatgaattttggtgggaatttacattggatagtggataatttcattaattttgttggttttggaattttcttttaacataattgatcttattgttgaattgcttgttatgatcgggatttcatgaaattcaagctcaattccttacatgtgatggttatggatttggaaatctcaagtgtatctgaatggtgatcaattgcaactttagttttttcggttgatgactgattgggctttgggatctgcttcgtagatacccatcgaggatatcttattcatatatatatatatatatatatatatttttttttttttttttccattttggtttctgcttgtagtggtctacttgaaacgagatttggttctggggtttaagttatggatctaattcagcagcaaagaatttgagggaaaatttttagaataaaatcagagaaatgcatgcatgtttttattttgaaaaaacattatatggaacctcttttttccagtcaaattattggagtttggatcattcagactcactgaggaagtaatgagttgaattggttctgtctgtaattcatgattttttggttctttctgtaatttatgattttatgtaccatacttaggttattttgttatatagtgatcattttacaggtctctaaagcataggttggggtgaattggatcgttttaaaattttccctttctcaaagagtgattaaaattgtcatgctggcaacaatttctggctttggcattcatatagagtttatatgagtgaaatgctttatttcaacctttgtttttgtggctgtatgtttgataatattccttatgtgttagctccattaaacaagtggatttgaggaaccccattattataaatttattccaaatcgctcaaaccaccattaagattacactgacacacggttaccttttggactaataacagtgaagtggaaccagggg

SEQ ID NO: 9340 - DNA, 901 bp, Citrus clementina
  Intron number 15 from transcript clementine0.9_003540m (lo cus clementine0.9_003540m.g) derived from phytozome v7.0 ( chr-ID scaffold_41; pos 1330351 to 1331251)
aggtaactaacattaaaaatttggatccactactgatctgatttgaatttttctgattttttaaaattatatcactcatgaggacagagccaatgcaaggcaagtggggcaaatgctcttactagatttcaaaatcctcaaatttaagttaatgctttaagctattgaccccacgaatctaaatgatttgagtgtttgtttagctaccataattgcttatttaattttataatttttttaaaattttattattattattttttcagtagagtttttaaaaattaaataacttgttttacctctcttaacaaaagtttaaattttgagaatatatttctttacttacttgacaattttatttcataatataatttaaaaaacttacttgttaaagtaattttacaatttttttaaaaaattcttattaagaaccaaacaattaattttttttataaacttttattttttaaagttctatttcaataaactctatttaaagaactataacaaacagaacgtaaatctttactcccatatatgagtcaaagttagcggcacatttctatctactagtacccaaaaaataatcaaattatttatttcacctccttaaaagattaccctttgaaagctttttgtatctaacaatctgacgaaagaagaaaaaaacgaatcatatggatctacttttcttgaaatttgcctcatctaagttaaatttctgactccttcactagtcacgttaattaagagttaattttatacatatttattattcaataactatcaataatgtaactttacaaaaaaaaaaaaaaaaaatcaacagttgattcaaattcttgagttataatccttgaacgtaggttgggctattgggagagaaattacaaatatacaa

SEQ ID NO: 9341 - DNA, 1189 bp, Citrus clementina
  Intron number 6 from transcript clementine0.9_009905m (loc us clementine0.9_004323m.g) derived from phytozome v7.0 (c hr-ID scaffold_17; pos 2560493 to 2561681 reverse strand)
aattttgcttccgttgtctttgctcttggtaagtcatgaattcccttagcttgatttgcttaatataatatctttctatgttggagtctctgttttctggtattcttttttgagaggattactagaaattctctagtttgtgtctaaccatatgtgtttgaaaagaggatagtcaattgtgtcactgcacacaaatcttatatgtcttgctgctaaccctacaaccgtttttaaatagtaaaagccgcttactttgattctgttatgaggatttgatctcgattattatttttcagaagagcattaggtgcaagattgactatcagttgatcaatcatgtagatttaattaagtaaagttctagagggaagatattatgattatttttgtattcttttattttaaaaataagtcgcctcttgacctaaaagcttaagttgattgttaagggcctaacaatcgtacttaagctctaacagtttgtagcttccttttcaaagaccttttgtgagacattgactggtatcttaatgacatttctgaaatattcttactataagcaggtgattggacattggtttatggaggctttctcgtgaaactttatctcattttttgatttagtatatgatggttatcatttaagttcacattgtgttgacatcaaactgtgtggcctgcatatgtcctaacattgattatgagatgaaatttttaagttgaagaacggaaaaattaatctctagttatcccttgtcttcaagtcttttgtagttgttgttttcctttttagtcatttttccaacaatatgaagtgggtctccagcttttcccattcctattatttttctcgttccttttactaaatggtctagtgctctaaatctttcttcccgttgatgtaattgtgaaattcaggagtttgtgatttaagtctcaaatgtgataatttttgccatgcgcttttcatctctgatccttgaatgggcttaagaacttccttacattcaatagtttctgtcttttgcatggattgatagttataataagtgcatgctacttttgtttctccttctgaatttgttaagcccttaaattttagtaattactagttttttggttatcctgctattagtttatgaccctatataattcatattgaagttgcttctgttttattgaagaggga

SEQ ID NO: 9342 - DNA, 750 bp, Citrus clementina
  Intron number 1 from transcript clementine0.9_012905m (loc us clementine0.9_012905m.g) derived from phytozome v7.0 (c hr-ID scaffold_25; pos 1214572 to 1215321 reverse strand)
ttatcaaatatcccaataattgaagaagtccttcggtaattatgctgatgactttcccataattgttgtcttatgtattgtactaggtgaaaatctctaactctgcacttgtggtctattcattttggattgattacaaagagtagtttgtttatacaggcctatactcaatgtttttatctttcatactttcttcatagcagacaggaatacttttgtttcgttttccataattgttcatgtgttgtctttttgctccctgctctagcattagaattctggtcctgcaactgtcatggtttgacaatcattttaggctcgtagttaactatacattcagtcaaaagatgcatctatgactgaaacaattgttgtcataaacacataatagtctcatttattgatccattgatgaacaatggccactctctggtctataaaagattaagctgagcttactttacaaaactaaaaattattgttttgcatatttcgcaagtgatccacttgtgtgtattctgtcttagtttagttgattttcttagtaggttgtgcaaatagaattgcaatactggaaactgatattgatgaatagtctgacattgaatgttacactctagttctcctagccaagaaaaagaagaatgaaagacatatctgctacataagtcaatctgaatacaaactgatcgaaagggtgtgacatatattgcagtgtggaagagcatctgctggaagtgcattccagag

SEQ ID NO: 9343 - DNA, 3010 bp, Citrus clementina
  Intron number 1 from transcript clementine0.9_011289m (loc us clementine0.9_011289m.g) derived from phytozome v7.0 (c hr-ID scaffold_101; pos 129144 to 132153 reverse strand)
tggtgctgctgagcgtggagcgtcttcttctaaaggttattattattattattattattattattattaatcttttcatgatctgttttgttgctgtgaaaatgtgatgatgtgatgatgtaatgatgtcttgagattaatttagttttttatcatcttgcatttcgtttgctagatagggattgaaaaaattactttttttttaccacctgggtcgaatgccatgctgaatatgtaaaagcttgaaatttctgtttctcaaatctcaagtttccctagaaaaggctggaggaatggtcccacttaaaactaagacttttaggcaaatttttatggcttttgtgtcaaaactttcttatacatgtacaaaatcatatgagtaccctactgacatcacaatgcctagccctgatacgactgctaggaagctgaggacatatcatgcagcgtaaattgaaaattgagaaaataaatatacagctcaaagaaaataaatggagaaatataatggacaaaagatttatgcattaaaaccctccatgtgagggaaatgtctacgggaaagattaaatagtggcctctctctcagtttgaggaaagacacaaatgggagaaatacccaataaattataaaattagaaggttttcttatgaatggccaaagcttaatgtgttcgaaaaacaaatggcactctgcttttatagttatccaaggtccctgtagtctacaaatttgacttgcaaatttactacattcagaccttatatagtgtattttgtttgttgaacttttgcttaccatgcatttaaactgatgccttcactattgtcgaagttgcatgcttgcttaagcatgtactttggccataatttgatggccatgcagtaaaagtgactttactttcacaaaaaatatctgagtagagactgctctccttgttaaaaatttctctaaccggccacaattatcagtcacagccatttgaattattgtagaagctttaggttttatttgatcatttgaacatgaaagaatattcatgagccaataacgttggctatgaaatcgacataaacaagtataaataggagcttatgactccattttatgcaagtgtgaggtaagagaagtctgaatagctagtgagttgcttgtaggtatgtaatattagtgagaaaaagaagtgagattgtgtgcaaattagctttagatgtgtaaagagaaacatttattgtgaactaggtactgtattattttatacgatcggtatggtttttctttgtgtgcacttgtacatgtatattgttcaatgccttgaatcaatattagtatgctagtttcattaagtacaccctttcattaatcacagacacaatagcattaacactggcacacaagaaaaagcatttacaatatttatttatttagcactttggctcttatatcactcaattctttcccaattgagtggattcattcacttatgcttcatgcgacacactgtcattcacattaatgtttttcatttccatgcttattgctaatttgcattgattctcacattcttcactacttcactcactcacttgacttccacccacaagtggagctatagactctattcatacttgcttatgttgatttcataactgcggttactgggtcacgaatattcttttattattagattatggatgaaatcacaagcttttaggatactttagtagatggaaatttgctgctagtaagaaaactttctgaattgagcaattttttatacgacaatcttttttcttaaaagttctctaaaacggtcttaaggaactaagactcattgaataagagaatattttggccactgaaaaaactctagctaagcaaatagctggagtctcactaaaagaagagcgttcttcactaataagagaataggctaacgcagttgacaaagtgctgccaaagttgaagttaagcagcaggagaatcaaccaacggatttggtgcctaagctagaagttctctatgtgtcttagataatacatggaggtttgtcctctggcaaaagtcaataggttggtgtcttagtccttcactttgttaaatgcattgactcatttagaataataaaaagctgaaataatttaatctcaaatcatgcatatgtttgttatttccatcatccttacattatgctcaattgatctgtcaactaaggggaaaaatatttttttgttttttttgtttttttggtgtgacaatgtgctcaagctcatgtttgttcttgtaaatcattttgtttgattgccaggaagtacaaatcaagaagattctaacaatttttaccttaatgctttcattgatcttattcatgccataaatcctatcattgctacatgttaaattctgtacaaagaacctttcataataaaaatgctactcgtgaaaaggacacacactttgattaatgataaattttctaccgttgttgtttctaatcattggtcttgaagttcaatggagttgaaaaaccataattttcaattgtttccacatggttcagggaagccagaaaatattttattttattttttgctaagaaacaaagatgatatattaaactataagagagatctacaacgaaagatgggattacaaatccacaaaaccaaggacgagaagtaccaatgaaagcaaaacactcaaaactctacatagagcaagttttcatgaacttatgtttgcttgcgagtcctatgagttctaaaatacattaaaaaaaccaatagctgttaccatgttcttttttcataagaaatacttgactatgtttacagtggacttgtacccatttagttttgttggtttacattaacaagtgtggtgggttttattctctggaatgcagttcaatatgctttaatgtttttgcgatgttttgagtctaacatcttatatgttgtattatactctttagatagctctttgttcaattggggacttggtgttgga

SEQ ID NO: 9344 - DNA, 3832 bp, Citrus clementina
  Intron number 7 from transcript clementine0.9_014657m (loc us clementine0.9_014657m.g) derived from phytozome v7.0 (c hr-ID scaffold_6; pos 4945099 to 4948930 reverse strand)
tttggcaggtatggccttgcataccatatgcatatttacaagcttttggtagttcactcgtatatgtaacagcatgataagttggattttgacaattgctaagttacattagtcagagatagggttggcaataggacgggatttgccaatcctagtgctgtcctgtttatgcagatgtgataaaaaaatgtctcaaccctgtccctttattttttttttttttgggaaaaaaatttgtcttagtttcgtctcgttaaatattgtccatcgcattatcctgaataattttaaatgtaaatagataaaatttgacattgttttcttttaagaatcattataattcaatctagcaaaaatcgtgaataaatattattgacgcttgatttcggttaactaaaaaaattgagtaaatgggacgatataaagagcaaaatacagggaatttacgtggttcggcacttggcctacgtccacggaaatcaaaagagccaactttattattcaataatgaatacaaggaaaattttcttttactatttgcctctaaatttttttttcttgtccccccatacctctattgctttctaattataatataatttttcttagtacctaagtcgtcattaattccttattttggtcgactttttctacttaattagaattttattcagagtgtatatttgtttccttgtcaaagtagactttcgaagtttttagatttttcttctaggatttctggttgcgttttgcttcctccatgctctattgtttcctgcaaggccatgtttcattttactttgtatgtttcttgagccatactttctagttcctgcttcttggatcctgcttcctggttcttggttcccgcttcccgtgactttacgtttcatgttttttacccatactttatgtgaacatgcatgttttttattcttcacgtgaacttgcatgctttttattcttcatgtgaacttgcacgctttttattcttcacgtgaacaggcatgtcttttatttatgcttcacgtgcgcttactttgtatgctccttagtccagctccacttgactttattgcatatttcctggttaagttccttgcactcctctttaattaattattttactttgcacccttcttgcttcatgctccgactttaattgattattttacttttcatgctagctccatgctccatgctccgactttaattaattattttacttttcatgcttcctgctcaatgctcaatgctccatgctttcactttaattaattattttacttttcatgcttcttgcttcatttttgtgcatggatttgcatgcttcacttttttttatatcagttgcctcctaactctttggagcttgattttcaaggcttaaaaaagttattttatcacttatttatatatatatatcctctagaggatattaaaatcttgagaatctgaagacattattgacaaagtataaaaaaagagagagagaaacaatagtaaatactcaccagaaaatttggataagcaaaacttgaaaagagatggaaagtaaaattgaacgagagagaagaccaatttttataagtgagaattggtttagttaatgttggtgggtagaagaggcaacaaccaatgtataaataggtgatgaaataactcttttaaactttgaaaattaagttccaaagagctggggccaactaataacgggaaaagtgaagcatgcaaatccatgcacaaaaatggagcaggaagcatgaaaagaaaaataattaattaagtgcaagcatagagcattgagcaagaagcatgaaaaataaaataattaattaaagtgaaagcatggagcatgaagcaagcataaaaaataaaataattaattaaagtgggagcatggagtaagcatgaaaaggaaaataagtaattaaagtggaagcatggagcattgagcaagaagcatgaaaagtaaaataattaattaaagtggaaacatggagtaagcatgaaaagtataataattaattacggtagaagcatggagcaggaagcatgaaaagtaaaataattaattaaagagtttatagaactaaaccaggaaacatgcattccacttgactagggagcatataaagtaagcgcacgtaaaatataaataaaaggcatgtatgttcacgtgaacaataaaagacatgcaagttcacgtgaagaatacaaagcattcatgttcacgtggagcatatgtaaaaagtctgaaaagaaaagtcacaggaagcgggaattaggatccaagaagtaagaagcatgacccaagaaaaacttacaaaataaaaagaagcatggccctgcaggaaacaatagagcgtggaggaagcaaaacgcaattaagaatctaagaagaaaaatctaaaagcttcgaaaacctactttgagaaggagacaaatatagactccgaataaaattctaattaagtagaaaaagtcgatcaaaataaggaattagtaacgacttaggtgctcaaaaaaattgtattataaatagaaagtactagaggtatggggggagacgagcaaaaaaaaaaaaatcagaggcaaatagcaaaagaaaaacttccttgtaatcattattgaaagttggttcttttgattcccgtaaacgtatgccaagtgctgaaccatgtaaattatctatgttttgctcttcatatcatctcgtttactcaattttctagttgatggaaacgaagcgtcaacaaatacaaagtagaataatctaataatagttttattttgagtatatgcatgttcgaatacaattttatactaacatttttaattgcatgtttgctttcattgcacattaatattaagatttacgcttcaaaagctatagatttggacagtaataataatatgggacgacaagaacctttataaatttgtctcattgactaatatatcacaggttacaacttttaaaagcaaatattactaaaacaaatataataatcattacaatacaataactttaactagatcatcatatataatataataatatttaacaaatatcaattatatggaaagagtgcaaaactgtgaacattaaaaagaaaaaaagccaaataatgaatgttaactaatggtgtggagggtgaaaagtgagaatcttgtgggtgaacgactggtagaggcgtagtggagaggtcataggtggctgcttggcaacttttgtggcaacgtgaatattttttttatggcgagggcgaggggcgtcgacaataatggtgcaccattaatttgagaaagtggctgagttttgaagggttactactgctataaattattaattttaattgtgccttttgcttgacacttcactttctaattatattatttttattatttaattttagcctttaggtttcaactttgaacgttacttaagttaaaattataaaatatttaaaaatttataatagttttaaaattatattattaatgggatatacatgacgagacgggattttacggctggtcctcctttcgtctcataaataaaggcagaactcatttttttgtccttgtttttttgtccttgttccatcccactttaatttgagatataaaaatgtctcaatcctatcccaaatgggatgggatcttgggggattccatcccaacaggaaaaattgccatccctagttagaaacgaaattctaaacatctaaacattggacatatgagctaatttgggtattatttgctagcaattatctaacattttctattctcactgtatagactgattgcattgctagaatctcac

SEQ ID NO: 9345 - DNA, 974 bp, Citrus clementina
  Intron number 1 from transcript clementine0.9_009583m (loc us clementine0.9_009583m.g) derived from phytozome v7.0 (c hr-ID scaffold_5; pos 1928611 to 1929584)
cagatccctcaaggtcacattttgctttgatttgattgttaacatttctttggaatcttttattttgcagtgtagggaagggttaatgatatttttagtttatagggagaaatgataactaatttatcttgttcaagtttgatgatccttggtaattgataacatgtagttatatttcttcatggaaacttaagagtcagcctttgttggtttaatgggtctccgaatgtcttaaagagtaatcattaatcctaaagacccttttattgctgtagttaattacatacatctattaaaaccatcaagaattttagtttggccataaaggcttttaggtttatctaaccacttgaactgattcttttgaagggaaaatttctgagatttaagtaatagaagagacagctcgaaagtgttgtgtcaatttaagatttattttctctcccaaggctaatttgtttatcccacatgcattcaaatggcctaggatcttcatgctggccttttgtacttccctgtaatgtgccgtctttggcggcaaaaaccagctcacggcacctttagttggtcactattgttgctgttctatgttggggtgctagtagttaagttgatatcatttgtaattcacttttgtcagcttcttgtcttattcacttttgagattaaggtaaagctggtgaaatgcaataagtacctgtttgtcctgaaatggagctgatcaccaataatggttgtgtatgacttaatgattagcatggtggatttggttgtgtaattgaggcaatacaaacttgacctgttgatattatctattgattaatatttttgccagtatattaagctgtaaatgctcattttgggagttctgaaatttgtgattaaataagcattttcttcactgctatcaaaatcacttagacatattgcaattatttcttccaaatcgctaacttgtcatatttttataacag

SEQ ID NO: 9346 - DNA, 1291 bp, Citrus clementina
  Intron number 3 from transcript clementine0.9_008803m (loc us clementine0.9_008803m.g) derived from phytozome v7.0 (c hr-ID scaffold_25; pos 2091496 to 2092786 reverse strand)
ttcagcctggaacttccctatcagtgagtccactcggatatcgaattagacttagattcatcaactttgtctgatccaaaatccattcgtatatactcataattcattcattgatatcataattagttttttctccggatgctaagggtgtgtttgatatggttctttattgagcattttccgttttataaaaataataattatgatattctccggatgcactgtagattttgttatgcttatgcaataattttgctttaaatattttcaactaaaataataataatttttttattaaaataattatgaatattctataaattattataaaatattttatttaataaaactttgtaataatataaaaaataaaactacgtataatttgataccaatatttattattacattattttacttgtttattcaatttttgcaaaaatatctaaaataacaaaaagacaaatttaaaaagttatacatataatgcaactattctaaaataatttttacaaaaattatatcaaacacattttcactatttatattttccaaacaaactaccaaacgcactttattgtttttcatttttagattttagtttcaaaataaactaccaaacgcatttttattttcacaaaaaatttcaaaataaattacaaaatgcattttcattttcaccaaaaactaatcgttcttattttctaaacaaaattcaaaagcgccatttggaaaacaataccaaatgcaccctaaactttgggatccttttaaattattttgaaagtgtattagcttaaactgttttggtgaaaacttgtaacttgtaaaactatttggtgctttaatacttttttaatccttgatggctaataatttcattttatagttgcattaaattaaaagttacagcatctcaatccaaacaaatcatcaatatactaattgtaagaataaacccttgcgataggaattcaatgcgtcttatatgtttgttcccaagattagttttatatttcgatatttctcagaaaaatttgaatattatgagttttaaaattactgaatattcaaaccaaaattcgtatgttctcttcaatggtttttgtactggggcctctaggtagacaataccaacctcagtacctcacttacacttaaaatattgtatcattctatcttgcctgcacaaaatccatactaaattatttttctggacatggcactgatccaacgagatatattcctggatgcagatttggcattagagccgttaataggagcaattgct

SEQ ID NO: 9347 - DNA, 1487 bp, Citrus clementina
  Intron number 5 from transcript clementine0.9_000266m (loc us clementine0.9_000266m.g) derived from phytozome v7.0 (c hr-ID scaffold_4; pos 5046056 to 5047542 reverse strand)
tacctggtactctgacagaagagcaaaagaggaaggtaatgcttgaatttgcaattttttgctttgatatgcaccgtgatggccttagctataattttttttttttttttctgtaggtatcatattttctgtcttcattgtcatgtctatatgatttatgtatgcagcagagcattgttgtgatccaaatcatttctctctttttctaatgtaaacagaaaataataataatattaaaaaataaaaaagacaagaaaagggatgttgatatgaaaaataaaaaataaaatcattttggttttatttcaggtacttataactctttgtattgattctgcttctatctcttagtgcacatagggtgtgtttggtacccttataacatgaggctgcattgcattatgtaatgcagcctcatatttggttgcagcaaattgctgcatttgatttttctttttaatttgttataataataaataaataaaattattttaatataatattatataaaattaatttttaatttatttttacattataattattaatataaattaataaatgtatatttattattcaataatttatgtttttattttaattatattaaaaatataactaaataatgtattatttaattatattataaaaattgattattattcaataatttagtaagtaataataaatacttaaataatatataaaaatataatataatattacattatttaatataatacaataattaatatataaaaattaattatttttaaataatttaatataactaataataaatacttaaatattaataaatttgaataatattaatttaaaattaatagtaatataaataatgatttaaaaattattacatatattacagtccaaattgcaccaaatatgatattgcattacaactttatataccttaatgcaatacaagacagcgtgctaaatgcacccgtaaggaattgattttcaataggtgcaaggccaaaactctttgcccttgatacatttatatgcctattttaaatctgtctgtgaagagagcctaattttttgagacaaaaaaatgaagaataatttcactggcagaccttttgtcccgcaatcttcttcaatttaggtccccttccttgctatcaaatcttatttgtacttgatttgaaaaaaaaaaaaaaaaacttaaatttgtgcaaggttacttacaatatgacatctcttgatcaatatcttgtaaaacaagtaaactgtttgtcatgaactgtcagattatatattttgcattttcatacaattatcatagtgtttttttttttttcatattttgaatctcatacagaaaacttgttcgggttaaaagtgctttgggacatgaattcactgccatgccattgtgttccttgatcttattttgatgattctctggtcttttacgtctaggtgttgactggtgttggtcaaggagagacacttgt

SEQ ID NO: 9348 - DNA, 2465 bp, Citrus clementina
  Intron number 1 from transcript clementine0.9_008697m (loc us clementine0.9_008697m.g) derived from phytozome v7.0 (c hr-ID scaffold_41; pos 1637868 to 1640332 reverse strand)
caggagcttgtcactgtaagtttacggggtaacttttgctctttctttcttatgtttttgcagaaaaactattactacttttgttttttagaaatgaaattagctgttagctagatcttggaaattgtaagatattggagcttaatactattctataacatggtatcagagccaggttgaccaagaggtgatgagttgaatttaatttgttagtgttcaagctttaacttataggtcaagtggtaatttagcatagaattgataggagttgtcttttgagagagtggattggttataatagctgacgatgaggataactatgattgcttttggtaccgtctgcaaggcattgaatcattaaagatggtatttttttccagatagggaacttttctattgacgatgaagaatcattacaggatttggatcaggtgtccattaagaaagcaaaacaataaaaacttttctgtcctattcaaaagtatatccaatcactccactacaagactagaccagcctagacacctatctcaaaacccccacctgccttagataaatgaagaaaaaagatgaatctttgaactgcttagaacctggagcccaaagtgaagctgaagacggactctatcccacaattcttcgatattatccgcatttttcccttcaaaatacgtatttctttcttgccatgtttcccaaaacagagctgccccagtacaatcccaaagcgttttggtctttttttcttttacgaaaagcaaagaaattctccattagaatagagtcataagaactcgggattacccgaaaagtattagcctctttttacaacctattctacaacttagaggcgactatgaagagaaagatgattataagtttctgcacttgctttgtacattacacaccaaaaaggaaatagacacatgttagggaattttctttcaatcacttctccagtatttaatttcccttgaattttagggggaatactagtcttccagattgttttggaaagtaaaaaataagccaaggagacatcgtcaatcaccaagcaagataagatttgcaagagtgatgtcctgatgtctctaaactctatgttcctttgtctttctttatttccttcacatcaaaattgtctaacaacttcaacagagaagcataatcatgaatctctcgatcatatttggtagtttagagaggtataatctaaaacgtgatagctgaattactgagtgttgaagtcacagaagaaaagggtaacatatggggctgcgaggccttaaaacaacttgggtggtatagtgaagtcagatttgaatttactttaagtgttcttagtcagcaagaaaaagttaaatcaaccttgtcaaatgttatcagattgcagtggaattttcataccacgtgaatctatatctccttctaaccatgaagggcctttgcgttgcaaccaatagtattaagactggaatatatgtattatttgagtctgtaagtgacataaatggctgattatatgtcacatccagggcttgaagcatggatggagataacaaacttatcattggtttaatttacacctagtaagctatatatatatatatatatatatatatatattcaaatcccagaatagttagctttctctagtcttattttgaggttacagaatgatgtggcatggataattattttgagtacatgtgcccgtctggactctccactgtaatatgctttgcatgccaaaaatatgatatggggtctattattgatatgtgggaagctttggacgcaacatcttggacacttctgactgtgtgtagtattctccatcaccagtaatttgtgttggagatgtctttccacatttgcgtagagaacttgaaaggaactgatgcacaacaggttggaaatgctttaatgctttgtatttgagcgaactactttgtttaaattaaacatcaagtgaattttctgtccagccttggtaaagttccgaagctgctgtaccttgaactttgaatcaattgcctcattgggaagttaaggtaaatttcctctgatgtaagctctagcctcttggataaacaaatacgactggtctccgtacatgcttatcttgtttcattgtagcttttttcatgccttaagttcgagcggaggctgccttgcatgtttatttgtctgagtgcaattgctatttctgcttgactgatctgtagctttgctaaacctctaattttctggtaattcttgtgtgctggaaatgatattgaaaacaactatcatgcactaatgtctataaagtagaaattttaagaataaatttgaaattggttgaaacattcttaatgtttcatttcattgtgtcttctagttcagttaaatatctgatactttttttaaatttgtcaaattcaatttcttttggcatgtgcagattatcactagaatcaatt

SEQ ID NO: 9349 - DNA, 437 bp, Citrus clementina
  Intron number 1 from transcript clementine0.9_025316m (loc us clementine0.9_025316m.g) derived from phytozome v7.0 (c hr-ID scaffold_9; pos 2246975 to 2247411 reverse strand)
agaagcccttgtttttctacgtcaatctcgcgaaggtatcttttttttttttaatttatttttagatttgttttactgcctttggatgctcagaaaccgtatgaaacgaaatagaagcaattcttggcatttttggctttagggtatcgtgtccaattcgtttgattggccttgttaactaagttttttttttctttcttgtttttgaaacatattgaatatatatatataagaaatatgtcttactaggtttctgttgagacctatttgtagtttagggttttactctcttttttatcttgggatctgggttttatgttcttgatgatgtgtgggtgcatctaatttaggtttgtgtgctatgcttcagaaaaatttaacattttattcagttcataattcctttggttctgtgttatttctggttgcagaggtat

SEQ ID NO: 9350 - DNA, 1651 bp, Citrus clementina
  Intron number 4 from transcript clementine0.9_012972m (loc us clementine0.9_012972m.g) derived from phytozome v7.0 (c hr-ID scaffold_11; pos 3811179 to 3812829)
ctctcaaaatagtcttcacagattggggaaaacaggttttgaatatacaacttttcttttacatacgtttattatacttttactttttggcacttgctgcttcactatattgttttttttttctaaaatcaaacatgggttcgcttttgttttataaaatgagtaaaataattggaatgagaatcgaatatatgttttctaatttaggacaaaaaaatattttttccatccaacattctacttaattactattttgaaactgatttctatttagcaaaaaaataaatatataaataaataaaaaccgtggcaaacaatttttagagggcatttggtactgtttgatattttatgcatttgttttagagaagaaaaatagtattttaattctagttaattattatttagaaataaaattatgtttgtagcttgttttcaaaatattattaattatttaaaaataaaaatagtgagatacttttagtggaaatttttataaaacgtgctttaacacattcataacctaaggggaaagtcatctaaaacatcaagctcataacaacaaaaatagaatgacatcaaattatattttaaagcaccaatcaaactaaataaaaacaatctatttacaaacaacttcgtttcttttataagaaaaaaattattaaaaaaatgagatttgcatcttatacatttacataagaaaaatcattataaaaatttaacaaccattaaaaaaaaattatatgagaggtaaggagacttgcatagagagttgagctttggtgagcttgcatagatagatgacatttgataatttggaaaagtgagaagggaatttgataaaggttgaattgaatgtggtatctgagtgctagacatggtttgtaggttaaatgtttgaaatttgaaatttacttgtttgtttttcttaacttatgtttgatttttaaaaatttatatcttaatagaaaagtaaacttttgtgacttttatttaattaagagaatgtctgaatgagaagtaaatattatatttcaaaaatatctctacaaaatatatttatttcttaaactataaagtataatcttttttgttttaaattataagaatataaatcaaataaccatatttaagattttttatttatttataaaaacagacaaaagttcacttatatttagatattaaaaaagaagtcatttagatattcctaattaaacccattcaaattaaaaaaaaaaatacacacaacttttcttctacaggcaacttagttaccttaaaaataaagaactgcttctacaaaagtggagaacaaccgttttgcttcatccaattttctttaaaaaagtgaggagatacagatatttcattttactaattctccatttactgttaaaaaacatgcccactaaacatagtttctaactttttgttcttgcaaaatgcaaaacacctaatgaaaagacaattccaaacacaccctatctttctcttgccttattttggttttggaaaacagtgaacacccacttaatttttgtaatcgtgaaaaggcttttggcatgcaacggcaccggtgttgacttgaatttgatccattgatactgtaggcatcaaaagcaagagagagaatctttgaaggaga

SEQ ID NO: 9351 - DNA, 4309 bp, Citrus clementina
  Intron number 2 from transcript clementine0.9_014064m (loc us clementine0.9_014064m.g) derived from phytozome v7.0 (c hr-ID scaffold_4; pos 1240092 to 1244400)
cttttattcgctgcaggttaatcactcagactcaggtagctttttcaagtgttgtctctcttttctttcttttttccttttggtttatttttctatttggcagcaatattgcatctgattttatgtgattctttgttgttttgtcattaatttagaagataatacgtttctatttgatggaaaaaaaaatttaacattttttggggtatttgaatttgtggattcatcagtagttatggtgtgtttcagttacttttaaggaagattagttattcaagaaattgatttaacataaaaattacttggacataaaaagattttatgtagttgttacatgttttgtgttccatttgcactaagtgttttgcatttaaatcctaaggaaatatattcattctggtgctttataaaggatttttgagcaattaatatgaagtttttgagatttgttattaatatataatgcatatttctttgcactgatagtgattaatgattatttattttatcattaattaattttccatgtaaatttaccagacgaaagaataatgtttggtttttggccaccaattatatatgtgatggaccatagatcttgttttatacttttgctagatgtcaattctagaaacatccagaagatttctgtgttcttttgaaggtgggttagatttctttttcttttttctttttggtgttaagattccaccataagtagcttttgattttgtattgaaaatacaatataatttactaaaaatttgcaattgaagatcatatctttactgttatcaaataactttttccttactggaagccccaggaaatatctcatagcttccatagaaacataatagtctagggcaactagaacacgtgtactagatactcgtagaagaattttgaatttgaagatttttgtaagtacttagaagtttgttttattctacgcataaaatgcttatgcataagaatgccgtccatcagcaagtttcaccaatatcaaaacaagaccttatatcttgccactatcagcatggatcaagaaattgtaaagaatctatgcttctactcccttccaccaacatattaaatgaaagctgttagatataggtaattgtcttctttggtttcctgaagagattgtaccaccattgagttaattagtatgggaggctatgccaaatttttgtctcagttaagcaatcattgaatgtcgtggcgaatctatatctgcttacatttaaatagttagtcaagtctttcttgttgaatgtccacaaatcattcagagaacttctttcctcaagtaatttacattatagatagattaattagtggctgtatctaaagtgccttcactccctcaaccattgcaaagtttgtttattttatttttatattatagatatcttagaaacatttttcataagacgggtcagtcatgttctaagatatttcttagatcagtgcaggtgttggcacgaatttatcgacactgttgaggtggttagggcttaggaggtatatgattccagagcctaaatcagttttcatataaatacagcaagaaatatagtagtagccacctgttgaccttttttttataaatgattttagtttaaactaatttctaggactgatctggggtcttaatgaaaccctcaaccaaactttgtcttcttaagactttctttgtacataatataatttgacgtgcttccttttacttaaatcaatgtttgtctaagtttaattgtgttttaaagtttatattacttatgtcttatgaccagcaagaagcctcctttggtagaattaggtgggggttttacagcatttattatttaaatctggtggtggcttatttagaattctacaaatagagttttaaaagcacccaattatttattattttgcaatatgttgttcttaattgaaaagtactctgatactgatcagtgatgcaatatattttgtgaaatgttgttcttgatttatttcaaggtttgaaattagagttttgtgattgagtgctgattttttattgcccatgtttttatttattgtttgtgtagcttggtgcgaggcctaatctttagtgaacattgaggcagtttgtatcaacagttcaacacattttgcgatcagttgataattcaatattcacttgtgtaatggcagaaagatgtattaactattcaaaaaaaagttttgttttttatgtcgtctagatgagttgatctcttaccatcaagtcaggtgatagtaaaatcctaacatagacttaagccctaacacagccttcatgtgtatgtctcttcattcaccaaacaatctttctttcatgagcttgaagaagcattgcttcaatcttaaatttgaaggtccctcgtggcttctaagtcccattgtgttgaatccaaccctaacaacctaggttgatagggaactcttagtaatagaaattgagattagacgctccctttcttgttgcaatgttggttttagaatctaacatgtccaaaatttaaaaagaagagcttgcagtggagattatatgacatgtttcacctagccatttgtgattgatcattggtaaggccaattaggtatagagtatgaaaagagtgaaataggtgtttgattgcctatcatttatctcaacttggctacttcatacaatgtgatgttctattgtattaatttggcaaaatggagcccgttaagttacattcagttgtaagttactcctcagacatgaatagtaactgagtggtggggcccgtataatttgtgtgagaggagtaagttacatttgaatgtaacttatcatttgcctggcaaaattattttccagtttcaccacaaagactaatattttgttctatccacatctgctgatgcattaatgcttggaacttctacagttgtgctttctttcaaaatgttttctctatatcttctgtgggttgacttttcttcttgaaacaatggttttagatttatgcttttgattgatttttctatctttctcaaaattcacatgtttctttgaaatgagtttaaaatcaattttagcaagacttatgtttgtgcatttagtgacttctaaaccgaagtgcaatacgatacttgcattagatgtagtgttgagttgtgaaatgtgaaatcatacttgtatctcttaatgattaatttttatttttttattaccatttttaactctgatgaattgcttgggattagatatcctggatttaatcaatttttttgtcatattttggtatttttaagggctcaagctggtattctcactcgatcatggttagctgagaggaaacgattcttgtttccttttgcttcttttcaatatttatgaataactggaaatgcacatgtaagaatgaaaaatgggagttggggagaaattgcacattttcccttggacttgacataattgataatgattatttgtatttgagctgatcgccatatgttttgcatgatcaatgtagttgatgagacatgatttcttatgcttctcgagaaacatgcaaataaatcaccatgtcttttgtatgataaatgtagttgatgagacatgatttcttatgcttctcaagaaacataactcttggagtttttcctgtcaaaagaataatgattggcatttcccttttaacttctgggcagtctgtttttgtgttgaaagtgtagttaattttgtcagaaagttgaatattaccttgtttgtaaatcatcaatgataatgcaattgggcacattgcatacagttaatgtttgaaattcatcttattcatggtataactgtatttattaaattgataccaacgagtttattgacctatttgcaagcttttactggtgactacaatggcattcagaaagtagtggaggctgatgtacattatctgtttttactgttcttgacttttggctttttaacttttcatcgtttcaggtactgagattttttagtctgattcaaaagcttgattttcaagagatatgattatggtttgttgatgctgcatttaaacatttagtggaattaataaaattgtctgttagctctagcccttataatgtctctatctgtggctttactgttttgtattaagaggatacatctgcatgccgtgtgtctgtacatgcattatattatcatgtttacatattttttattcaagattgcaatcacattcataaaatttcctgtcagtcacttggctattgtaaattattaaccttcatcgaaacatgttggttccctagaatcatt

SEQ ID NO: 9352 - DNA, 2442 bp, Citrus clementina
  Intron number 1 from transcript clementine0.9_002918m (loc us clementine0.9_002918m.g) derived from phytozome v7.0 (c hr-ID scaffold_28; pos 2641962 to 2644403)
agattattgaggtaactgatttatttgcaatttccgtgttgtctaaactgcattgagaatttgaaactagctcattgtggatagaagactaggcctataaaggaatcagtattaattcatggggacgtaattggaacctttatgtgattaatgagttacattgttgtgtagctaaaatttgaactttggtattacatgattacattgctggcttgttctatgtatctaacgttgaatgttgcatccaaacctaggaatggcagaattacttactgtaatatcccacatcactctggtatggaagaagtctagtgctgataaggggtaatccacatctttttggaagactcgttttggggtgttctggcaccttgagaaccaatccgtgagggcttagcccaaaccagacagtatttctcaatattagtataaaaaatccttactaacttagggtagatacaatcctcaaatataaaaatgggcagctattgtatctgacaaataacctcttagtatcgatatctttagcaattttacgtagaaatttctgcacaacaatcaatttcttagattctaagcttttgtaaatcaaggcgcattcctcatttgtaaagattgatggggtcataccttatctgggtttgagtttaagcttgagcttgtctaatcaatttggaactatctcttgagagcctctgctttttccccagatgcttaattggcatttttaggaggagagagagagagagagagagagagagagagagagagagagtttctagtggtttttttggtggcaaagatatcaaaacttttgaagaacgatggacggaaatttgctttaaaagagttcaaaagagattgaagatggatacttaatgataattcaatgaagtgttaaagctagaactccccccaaaattcaattctttctttgggctttatctcaaaggcaaactaacacatgtgaagtgattcaaaaaaagtatccatctatgtgtctcttgccttcatggtgtgtgatgtgtagaagaagtgaagatgaagaaactgctaatcacttgtttcttcattgtgaggttgcttttagattctggcaaagaaatttaaattgagcctcaaattaagaaagcagctgaaggaggtttgtagattatagctgctgaagcccttatgcttgagagaaagcttgatgttcattgtgtactttagagagacttatttcagtagagtccttcccaactatttgggggagagagaatgtttgctccaggtgataaatggtacagaaagatattaaccttaattttaggttgtggaagtaataggtgaagaaattaaagtgattttaaaatattgtgtatcaaactcattttttgcatttttattcatttggcatccattttgtattcagttgactgtattttgttcagaggtgtcaaatgaatgggtcgaatggggccagaaaattgaagctcacacaagccagcaggtacgttgggcctaggcttgctaatttaatgtcccctctataagcgcataagcttgggcgagtattgtaggacgagttagagatttattttgaggtttttattatttttaatttttagttgtgatcaggttttaattaggttattcggctttggtttaattttctaaagtggtttggctatttgagccggatttctgcttcttaaggatttctggttctttttttatttggtctttggccactgcaaataaggcctttttgtcagttttcagtcagacttttgataatggaatattgaataattgaataaagagttgacttctccatatattcttctgattatggtctctcttttgataattgaatacagagttggcttctccatatattcttatgattatggtctccttcctctcaagattttctccccctttctatttttgtttcacattattgagacaaacccacaagcttttgacattggatttttgtcatatgaatgctgaaacaggcttggcctctcatgcctatgagctgataacccacgtctgtcacatcccacttggtggatcagatggactagttgtttagagagtggactgagcccaaacccataacaaagatgtatttttttttatgcatgggaaaatgaatgacttgtcccatcttattctcttcaagtacttggtagagttcatttggatttgaaattaattcttgcaagattaaacttggacctgttaactttggaatatttcataatttgtgtcactaaagatgttaacattggtattctggcaatctggatgtatccttaaggtttggatctttataattgagtccagctagattctgtttatctgatgcattttttctgttcaattacagtatagctgtgaatttatttctttttcccttgaaaaaaatggttctgtgtgttctgcagatcg

SEQ ID NO: 9353 - DNA, 861 bp, Citrus clementina
  Intron number 21 from transcript clementine0.9_000142m (lo cus clementine0.9_000142m.g) derived from phytozome v7.0 ( chr-ID scaffold_12; pos 342352 to 343212 reverse strand)
tgttggccaaaagcccagttcctgagctgactgaagtaagctgtcaaacttattaacttatgtttatgcagatttaatttaatacattccagtttttaacattactttgagttaattctttgcaattgactatacagttagctgatatgactttgttgctctgctggggtctgggaaattggggtttcacgtagtaggaatttcttctcttatatcaaattaaagggcatagagttgaaaaatgtaatttcaatcaatcacatgcttatggatcacttgaatgccgtaccttaaattttagagatatctgttgatgtcttttgtagtaaaggaggaacactagcacaatcctcgtaaactcaaaacacgcgaaaagacgatggagtctgaatgtagaatgttatagtgcttcttgttccacagcatgtttatggatgccaatcattcagagattctcttgattatttggcttgtaacagttagttattgtcaaaatattccacaatttttcctattaatcaaaattaccttggtcaattgggtgactgcagattgcttgataaaataatagtcagttagtaacaatatgctcatggtcattctattgtgtggaaaatgcaaagtgattgagtgaataatgctttggattccaatttgtataccaactgacacggcattcatttattggatggtataatagtaattttactagttatgaaattcaccatccaatagatgagtaacacatgtagttggtatacaaattgggatcaaaatgtcgggatccctattttctgaaattttcagattaaggcttaattggcggtttttcttttcaggcatttatcaatacagagttgt

SEQ ID NO: 9354 - DNA, 1653 bp, Citrus clementina
  Intron number 1 from transcript clementine0.9_010737m (loc us clementine0.9_005974m.g) derived from phytozome v7.0 (c hr-ID scaffold_24; pos 2293650 to 2295302 reverse strand)
tcctttgctgctgttgttgctcaggttacttcaagttcctattcttttgaagttattttatgatttttgtttggctattttattggtgatttaaaggttgagtctttacggcaatttagagttttgggcagccaaagttatgttactgagtttggaagtcttgatttttaggggatgattattgatagatttgggtcatatttgctgattgttggtttgttgaaatttatgtttagaattgtgacttggagttggagatctcgaaaaagtttacattttgagttgatttgaggttatttagctttacctgcctttgaagttttctgctaaattgagatagagctataaaatccaaatgagtagctttaatgacaatgtaactctaagaagggtaatggaatacttattatttgctttttctgtagtttatatatgataattagtcattaatattctctacctaatttgattaaaggaagtgagtaacgactagcatcaattttatcatatgagtagagtagaccttgtatgatacagtggatgtgtccagaatcttgtgcaagtcttttgctttttgtttatttactttttcatccagggaagaagttttttggggggggggagtggtggaaagctaagtttcaaatcttcttgccatttgcattcgtcgtttattttgtggaggagatcatgaaaatgagatcattgacagcaagcatttgccatgaaatgttttcatctttctacgggtgtggattgtatgcagaggtttagatgaagactgttgtgtttttggaaacatgtttctggtgaagtagcagctgcataatatgtcttctccgacatattatgttgagtataaaactcattctggtgcaaaatatcaaatattatattgtatgagaggttaatcaagtggtcaagcctgtggtttgcttccacaaggtctgggattgatttttcaaggctatctacctagtgaaaagccacgagtttcctgttcccgagagtgtagggttcactgggtgcctagctttaaacttgagttaactaagttggttcggggtaatttctgggctatccaaaaaaagtaaaaaatttattttggtaatctacgataattgaaatcttagatgctcctttttcttgttagtgatcttccttaaaagtttgtgtatctcttatttctttgaaaaacttatttatgatttctcttatcactgtatttccattttatgaaatgaagactgttggggattgggtatttccatgcctattctattcctgatttaatgcgaatcagtttacaactgctcaggtataaaagaagtagtggagcttgacactagtgactcagatgtgcctcactccttgaagcatctgtgtttgcatttagaaccaatgtctgaggctcaagccattgtttttgaatcttggctctgggcaaggcagaggtgtgagtttcacacagttcttaagtgctagtcgtagttgtcttatgactgctgcagactaacatttattgtttctcaaaattcttatgtaaaagacaattttgatttctttactttttacttttaggattgatgttattatttttcaattaatattgtaaatctggtacttttttattctaggttctggagagaaaag

SEQ ID NO: 9355 - DNA, 842 bp, Citrus clementina
  Intron number 1 from transcript clementine0.9_001916m (loc us clementine0.9_001916m.g) derived from phytozome v7.0 (c hr-ID scaffold_21; pos 744317 to 745158 reverse strand)
cttctcgcatactccaactactacgaagcctctcggtacgattaaacttattttgcttattttcgcttgattattctcttccttgctgtttccatttttgaacttctttgttgcttcgattttgacttctttctgcttgagccaagtcttaatcgctgttttgcgattttgtattttgtggtttttgtactgcattgtttccacttttgtgttcatgttcgtagatcgtcttctgtactttttttttttaattcatttttgttcgcgtatacgaccaaatattcgtcatatttgttaattacattttgtatttttttttccttttaaacttctgttatgaactcatctggtagcattttttttttcctcgtgtaatcaatttgttttacacaattttttcgcatggatttttgcttaagttttttgtgcgtgtgtatgtctatgtgtgtgtttttcttttttattttttttttacaatatttaaattcaccatagtcgtgagtttaattttgaactagcacgtgtggacgagatttctttcgttcgattttctgtatttttttctcaagaaactgattctgcttgttttaactttttttttagctcaagtgttttgtgtttccttttcttttgaaaatttaagttcattttattctcgagatgtttaattttgaactcacatgtgtagatgagattcacactgtttggttttcggtacttttcattaaccattaattttttgccatgatgtgaatttttccttttttaattttaactatattgtctttcttatgttgtccttggcagttcattaaccattggcactttgtgcttgccccatt

SEQ ID NO: 9356 - DNA, 3407 bp, Citrus clementina
  Intron number 2 from transcript clementine0.9_020513m (loc us clementine0.9_020513m.g) derived from phytozome v7.0 (c hr-ID scaffold_135; pos 187383 to 190789)
aaagaaagaaggagaaacggcaacaggtatatttggtgttctcttcaatggttctaatcttttagccttattgagttttgagcttggtttgctaggaagaagttgtgccgtatatgtcttttttactatagcgtgatttcttatggtgcttaccaacgaataacaatttcttaggcaagttagtttttgtctgaatgccacttattttgtttgaatgccacttctcaagtgtgcttcataaacattataaatggttggcatttcatgcaatgtcatgcatgtgtaatccttcatgaaatgttacacatcaaaagattaggaacattttcaaaatggatataaaattttctgacaccttcaattctagtttttactatgatcagttgttaagaatatgttgaaataacatggtctcctttgaggattaggatcatctcctagattttctctctctttgtctctctcctagttttccaaatctagtgaaaaaaattggcttaattgtaaataaggtgaatgcaaaccttccaaatcattttgatgagtaaaaactctccagcagaatcatcaatccacagcttctcaatgacttgcaagtatattgtcctgacgcttctagcttccgtttcctcttgtcttcctccaattcatcaatattgataatttcaatactcgacattagcgttgcaagttcttcaacctctctatcatcaaaatttcttttaaaattgaagttccaattctaattcatactaggtggagagaaagccatgctagagaaaatcgagatattcttagaaaggaataacctgtacaagtgggggaatttcccacacaacaaagcatcactcctccatttatcgtcccagaaacgaatagccttcccattacctacttctatggcaacaaaactaagaaaagcggggtactctttagatatggccttctaggggcttctattggacccattcctaaccatgtttgcatcccatccatttggatgaattccatagttgctgcgaataaccgagtgccaaagagaggtcctctccaagggaaacctccaaagccatttttctaagagagctctatttttctttccacattgctgattcctaaaccatctctagttttaggcattgcaaccttcttcataacatgagatccatttccattttcataacctttccacaaaattcaagtttttatgtgggccttggcataaggaaatcaaattctggagaagtgatgcaaagaaagtttgctaatttttgtctttctccttcttggtgtctgatgcctaagagaagtgcagaaacttctaaccatctttttcttcgctgtttggtggcttcaaagttgtggtataagttgtgcaaagaagataattttttgaaggtcattccgggttcttgtgattctctttcttatggagtattcctttgcttttggtagaggaacaaaggctaaaactgtttggaaatgtgcagtggcagcactgttttgggtaatatgggaggaaggaaatgtttgtacttttgagaggaaaagtgctgataatgctgatgatctacgggatagagtttgtcttcttgcttcactttgggcttcaatacctttttcttcatatatctaaactgggttagggttttgagatagggagttatagctgattctagccttgtaggggtgattgggtatacttttatagagcacaaatagtgctagtatttgtttccgagtggacagctggtccacaatctgtttttaaatcttcttcattaatacatttttgagtttcttatcaaaaaaaaaaatgtaaataaagtgaaaagcactggcttgattgtcaacattaaaatccaaaactcaatcttggccgctcattaagctaggagaggctacagggaaaaaagaaaagaaaagaaggggggggaggggggagagagaggctaggagaggagccttatccctacattgatctcttgtcaagccagaaatattgtcaattcaggagttttatggatctggatgataaccttatttatcatggttaattggttcttttatctgtttgccaactaaattgttttgacaaaattagccatatactctgtggttataaattccaagggggagcaccagatataaaatctttctttctacaaactacgaaattgttaagacatttctgcaacgtaaatggtgaaggatgattaatatggcttttgcaccaattgacacatggcaagaaaaggaggagagaggaaggaaagagagggaagaggagataaattccaagggggagcaccagatataaaatctttctttctacaaactacgaaattgttaagacatttctgcaacgtaaatggtgtaggatgattaatatggcttttgcaccaattgacacatggcaagaaaaggaggagagaggaaggaaagagagggaagaggagataaagaatttaacttggagataaagaagagataatttagaaggagattgtaggaaaagcaattcaatcttcatattatttctaatcacagagctcctcaaagataagcatggggcctctctatagtggcttagtcttaatctaataagaaactagagtatgcttctaaatagctagagtaacctactctgaataactaacagaaaactcaaaccaacagcaataagtaatatatcaaattttctgagaaaataagattccaaaagccctggtatccataatccctgaaataattaatactctgaataagtaattccaataagccatataatccattggctcattctccattagtagtttatgaaataatttgaatgtgaacatgacaatgatttctgttgctctgctcatgaacctcagaacgcagaatgttttaagagtgattgaggagaaaattctcatggaggagttgtgccagaataatatatctttatgcaccaatcatccccaacttcctatttcaccatcacatgcctgttgaatagtgtgtcatttaagttattagagcgtctaaaaaatgaatgggatgaagtccctccagtctcaatatgcaaactttcattttttttttagaacttgttcattcaaggattatttagcatctatgatcttggaaactgaaacgatatacaaatattttggtaatgtaaactggttagtttaaggaacgtgctacttttctgtaatgaacttgaaattatttattattgctgttactttggtacaaatttctggtttttgctgtcatggtaatggtaggaaaaggctaatgttccttaagtttccagtttcatacaatcagcttcttcctcttttatatgtaatgcatgttaatttatcaagttacctgcagcaggctgctcttgaaaagggtaaaattgtggaaaa

SEQ ID NO: 9357 - DNA, 1050 bp, Citrus clementina
  Intron number 1 from transcript clementine0.9_006317m (loc us clementine0.9_006296m.g) derived from phytozome v7.0 (c hr-ID scaffold_23; pos 1395019 to 1396068)
gaattacctagtcttccgctacttgcaggaatcaggtaatatctattctgaaaatttatttcaagttatgattttgatttttttttaagcaagacggattttctttatctagggtttgtattatacttccaagactacaacctaatttggctgttttagatggtttctcttattcaatcactgttgaattaggttagggttggattgggagaaaaaggtataatcttggagatgatttttgtattttgtactgttatggaataacgtgcacgagtgtttagatccattcatgattttttttaagggtcattaatatgttgccgtgataatttttcattttcgtttgtttgtttcaggcaatgttcccctagggtttgctattacaggatgcatttagttgattgattgtggggttgtatttgttgttgattggtttaagctgaagttttcgttagcagcagatatggcgtgaccatcaattcctttgttttttgctgtgtaaatatgtgcgtgacggtgaatctcgcttagtatgaagtgaagattagtcactgaatttcattagagtagtgaggcagcttggctttcgtatttattatgcaaactttagcttatattttacaatggtaaaaactttagcttatatttcagcctgttcattggtttcagatggccaatatatagagaagattaacaaattattgtatcgtctactgtttgcaaattttagagagaagcctgaattgctagttcaattaacagtgaagatgtaaattactctgcgcttgcatgatgataatgtgatgtgcactgaagtaatatacttaattgctaaaaatatagtcttgactaatttccatgattcaataatgatcaattactaatgtttaaatgcaaagtggatttatatgattcaataatgattagttgttagtagagctgtaaaattatggcttctccatgattttagaaaattatatttaagtattttctcacttgtagcaaatctcactcctgcagggttactacactcggcttttgttttaggat

SEQ ID NO: 9358 - DNA, 1157 bp, Citrus clementina
  Intron number 3 from transcript clementine0.9_000269m (loc us clementine0.9_000269m.g) derived from phytozome v7.0 (c hr-ID scaffold_21; pos 3036459 to 3037615 reverse strand)
aggctcattcccttatttattcatttgtttttttacaggaaacaaagaaactagtattaataagaacaataattacaaaatgtgaacaatgagtccacaaagaaagaacccgtaaaaagatcactagaagatcggtatagttgagagcaaatcagatgacaaaataagcataggatctaaaagactatgaaagctttacaacaaaaacatattcaaaacctcagaattaacccaaaaaaaaaaaaaaaaatcttgaaattccttgttacaaagagatgttcattcctctcttgcactgttttcaatttttttttctatttttaaatgctaaggtaggttcttattgtatttgtcatcttgtactgttatattcagagtactgtgtttcttatagaagaagtattcttggttaatgatttccaagaatcataaatacaaaaattcgttaatttatcttttgattccttgagttagagataagtttgatcactagttgatgatatgatgtcacactaaaaatcacgtcttaaatgcatttgactttgtcttgtttacacctacaaaaatcatatgtttattaagttgattgaaaagtgctcgaaatagttgggtaaataattttgtgattaaaagagtatttcaacctgcattacgtgtcttcctttcacaattgaattattttaaattgtaacagaaaaggatgagaataaggaagtcaccatcaagaaaaaagattacaattattggaagatcatgttgattgtgtttatactgaaattaatggttaaatgttgcaatattattcttaaatgacaaattctattgcacacttgcttttaatttgttgcaaaactgaaaagtgatagtgtgttgaagttttagccgctggattttgctcacgctaatttagacggggagaaaagtacttgtaacggtggttaggcaattcattttttgaaatttgaaccatcatattgagcatagtagatatatagaatcaaaatgatagcaaactaatgttttctgcttttctttctcttaattggtttgacatatttgtcacctagattattgcaatgaattccctgtactggtattatgtttctttatttattatttagttttttagtatttaaggttcgtatgtttgcttgcag

SEQ ID NO: 9359 - DNA, 860 bp, Citrus clementina
  Intron number 1 from transcript clementine0.9_017841m (loc us clementine0.9_015162m.g) derived from phytozome v7.0 (c hr-ID scaffold_34; pos 1656565 to 1657424 reverse strand)
tgtaaccggcactcgcatttttgctgctttttcaggtaaaactcaacattttcgtttttttgatttcactgtacgtaagtgtcatcgttactttggatctgttgaggaattgacctgaattgtgattgtattaatggtagatctgattctgtgaattgcttgatcttgattcgaagcaaatagttttagtgcttgatctgaaattgtaaggatctgatgcttaatggatggatagttttgaatttatctaagattttttttaagcctgtagttactcaaatctagttctttgaagtgaactttgactttgattgttgtttaaggtattataatttttttttttttgggataattaagtggctacagtagagtgagctgcatccagaatcgtgtattttaaatggaacgtaacggagtgtcgattataatggtttacaggtcccaagttgtgtggttcttttttcctttttttctgggaaaaattaatacaaggtttcatattctcaagtttgttatgccaaatgatgtgacatctaataccaaatcaagaatatgagaacgatataaatgggaaatttagtcgctctcaccatcggttttggtttaataattttacattataatgcaaaaaaaaaaaaaggaaagaaaaaagatgtctgaccttgttcatttacatttttcttgcttttcaatcaatctgtggattattctgtagttttattattttcatttaaatatattaaatcataaattacaatacaagttgactattggtttatcacaacttgacaaattctctaacttgttccaactttgtctttgtaggaggttttgttgccaaatagggtaagtcctttgca

SEQ ID NO: 9360 - DNA, 671 bp, Citrus clementina
  Intron number 1 from transcript clementine0.9_009522m (loc us clementine0.9_009522m.g) derived from phytozome v7.0 (c hr-ID scaffold_3; pos 9005802 to 9006472 reverse strand)
gaagctagtatgtgatttttcggatttttgtttatgggtatgcatgctctatgaaattgtgtgatgatgttttgatgtaaagcttctgtttttagttgtctggagattctgttggacttgaattttgatgtcatttagtgttgtgcttttgggtgttgcttggtttccaaatttgtttgatattttttatgggttatttggttggctgttttgctattaccattgttgtgttaaaaaggcaatcaggacaattggaagcggtggattatctgcattatttgaaaatttttagtggttcaattttatggatattttgagctttttgtttaatacttgttgtagttaggggagaaaattttgaatttttggcttgtacgattgcttagtttattttgttttattgtatagttctgatacaaacagcacggaaacataaagcgtcctttttatcttcctccacttttgattcatagttgcctcagttaccaataatttgcttctggaaacataaatttttttataatttgttcattgttagatccatagcatcgcttttagagtgggtagggtgaacagaaaggttgaagagacttcactatatgtgtattgaacttttattttcttaatcacagaatctggaaacttctggtttttatgcttcaggaaacagt

SEQ ID NO: 9361 - DNA, 2172 bp, Citrus clementina
  Intron number 7 from transcript clementine0.9_005057m (loc us clementine0.9_005057m.g) derived from phytozome v7.0 (c hr-ID scaffold_11; pos 1882922 to 1885093)
ttgcaaaagccttaagagtctcccaagtggcctgtgtaagttaaaatcattaaaatatcttactctcaatggttgctcaaatcttcagagattgcctgatgaactcggaaatttagaagctttgtggagttcgcatgctataagaactgctataagagaagtgctatcatcttttttccgtttgaacaacattgatctcttaagtttccagagaagcaggggtcataagcagatgggtttatcattgcctatcatgttatctttagatggcttgcacactctaacgtatttaaatctaactgattgtggcatcacacggttacctgaaaatattggccagttaccctcgagagaattccagaaagcatcatacaactttgtaagttgggaaggctctacttaaggtattgtgagaggcttcaatccttaccaaagcttccatgcaaactgcatgagttggatgcacatcattgcacggcactggaatcgttatcaggtttattctcaagttatgaagcttgtactcagtattttgacctgagttataattataaattggatcgaaatgagatcagaggaattcttgaagaagctctgcaagaaattcaactcttggcaactgcacgatggaaagaagtaaaagcggagttattaatttcttttttcttcaaattaaagttgacaattaatatttgattaaaattatgattttctgtggtacagatatattattctcaaaaatatgcactgttggttcgtgtcttttttcctggggatgaaattccgatgtggtttagctttcaaagtatgaaatcttctataaccttgaagatgccaccaggttggttcggtaataaaaaggtactcggctttgcttttagtgctattgtggcatttggagaacataatgtcagagaaaagaggtggttcgaattgttttgtgaattcaaagtcagacccaaagattcgcatgccatacagagatttatggggatggttgattatgtagagtcagatcacttacttttgggatactatttcttcgatgatcaggatttgaatggtttttggaaatacaattgcattcttgaggcagttcaattctattttaaggaggattttatcgctctgaacgtttggagtgttgctcggtgaaaaaatgtgggatccatttattgtatgtaccagactctacaaaatcaatggaagatccaagtgaatttttctaccataaccatgaagaggaacgacaccccaaaagactcaaatattcttgaaaacgtgtattgcagctggtatttttgagaagagatatgttagattaattcatcggtactatttgatcttaaaatgttgctttccaaacatttcttttatgattttatatttttatatgaagatggaagtgacttttagatgtttttcaactcttttattttgataaaagctatatttcacgtccagttactattgttgggtccaagcagttattgtttgacttttggttggtctggctagtgtttagatccttgtgtatttgtgtttatttggtttctgcatgaaatgtatattaaatcaaatttacaatgcatgtaagtccgtttatagtttagacataattttcggccactattactttaagatgtttggatcaatgcttccttatcagtagtaaatttttgctgaattcttttgggaaaatttctctgcaactagcttatgttgaaatctctgtagtcttgtttggctgaaaagacagcatcaggtgttggaggtgaactagaagcgaacttcaaaaaaggcaactgaggtagatcaagggattgtgaacagggtatggggtccttttcctgatataatcggattacgacttcaaatgacaaatgcactgagtagacactttttcctttgaaatgagtatcaaaactaagctgctcaatggttctagtgttataaaactttggaaatgagttacattttagcctctattcactgatttttatgtctttccatataaatatatagacagaggtacatacctaatttaacatttcttcctatatagctagtattcgtagagatgcaccgatatatggagcattttgctgttagcattaacaacttttatttatttctataagttctttgtagaaacaagtgccgcatcaggtg

SEQ ID NO: 9362 - DNA, 1475 bp, Citrus clementina
  Intron number 11 from transcript clementine0.9_002893m (lo cus clementine0.9_002893m.g) derived from phytozome v7.0 ( chr-ID scaffold_9; pos 4220282 to 4221756 reverse strand)
actcggacatagcctggattgaattggttagaaccctgtacacatatgttttacattcatgtaacgattcatcatacactgtatatcattctgggacaaacaatggaaatagcatctactcaaaactttattttattttattttatttttgatttatgctcttggggacgggggatggcatagaacttaaccgcatgaatgttattgtatgtaggaagaagttaacaaattgcacatgggatattgtaaaggctaatactgacttttcttgccttagccttcacttctctcttcaaacaccaatattcatgtataagaaactgcacatgctcaatctcctctgagattctaattatcaatatgattgggagaaaaatgtaagaaggaaatttaatgtttttgaaagtctatttcaatcaaattctttggagttctaaatgagtatgtagaccactgaccaagacataatggattcagcgcaaccaacctgatgaagctttgtataaatgataagagctatagcagcgtaatatgaaaattagaattaatatgtttgtagttgatgagcttggagactgcattgcccataagattaatttatagacggtgtcagatattgtttctagcatttctgctatcatggtttagtcaacttaaatggagaatttactaggttaatttaatttcacaagatagacgtaagattagctatcttagtcggttatcaagtcataggttgtcatactgagaatattgcaagttagaaagacgatcagctgtgtttgttggtggcaatattttccagaagaaataatgaataatagtagtgaggagagtgtgctaaatattagtaatattttggaaatattttttaatgttcatttagtttacagattattaattatatactgaattaggtgtttcttgtgtggtactgaattatagaataaaactattcttgtggtactgggttatttggctctacttctgccttctatatctgttagtgtttttgttattcctttgtggttgtaatggtcctgaatcattctatgggcttggtccacatgacaagcttgttagatatcagtctttgcaagtgaggtgggctgctagatcttgaatgcttaatacgattttctctttacctaagagcttaggcttttaggcaaagtagttacttaacatggaagaccattgtaattttctaattcaagcttttgttaggaaatgaagctgtctatgagagatagatttccagaatttacatataatgatttgctagggctttgtgcaatattgtataagctcaatagcatactgggtttaaaatttgccatacttttgcttgtcccacttacagattttgagtccacctcttcaaataattcctgtcaaacactattaatgtgctacttggagttcttggcatataatttgccctttttcttgttggatgtaggattctgagttgg

SEQ ID NO: 9363 - DNA, 4037 bp, Citrus clementina
  Intron number 1 from transcript clementine0.9_024061m (loc us clementine0.9_024061m.g) derived from phytozome v7.0 (c hr-ID scaffold_24; pos 2222882 to 2226918)
caacgacttttagaaatcacttgcagccttcccaggtatgaaattttttcaacccatttgtttgtttgccatggaaaatattataatttaattaattactgttttcgtttctgggtttgaatcctgctggcaatacgttagggtatacgtttgctttatatttattaaaatttttcttttttatttattactattatgttttttaattattattatttttattgtttgtgagttgccattgcacgtcacaaacaattaaaaaaaaaagggctggcaaattgatgttgttgttgttttattagtgctttttagttggcaaggcaaaaacgcttttgtttgatttgaaagcggttccatctgaaagcgacctgaagaaattaaggtagcgtttattattttgattgcattgtgaattctgaggagtgtaaattctaggattaggagtgtggagtgggagtgggagtaggttgtttatttacactgaaataaaagtatggaatggagatcagaatttaatttatgtgtttactttgttttgatcttgaattgagaataaatagttttaaattataattttatctttatttaaagaattatagtttttaatatcaaaactaataaaaaatatatttaatgaataatatttattttattatatttgtaaatttattataattattaatattcttaattatgaacaataaattattaattttaattttaatataaaatgaaatgttattttattttatttaatataattatattaaatttattattatataaaataataatataatattatttagtacaaaattaatattttattagaataaagtatttattattattaatattaaataaatatagtactattatttttaaaataaatataataatattatatttattaattctctattaatataataatattattttaaaataattttaacttaaaattaatgtaaattattatttagtcaaatataatattattatttaaataaatataatattattattcaaataaatataatattatttatttattttattaattataaaacataaaataaaaaaaatggtagaaatgggagagttgggagtggattcccactcccactccccactccaaaaatgggtggggcccacggagtgagactcccaatttctccccgttttaagtaagtaaacgctggagtgggaagaatccacactcctcactcccactccagcaagtaaacacaacataaattaaaaaggattcaaaattgaaggaatggattttgtcctcatatatatattttttaatatctttaagttcggcaagttatatgacgctcttataaaatacttttaaggcaatgtttgttgtttggtgccgtttgcgttttgctgttttaacctctagttgccgtttacgatgttgttaaaaaattgggtttcgaagtgcttttggtagaagctaagaaaacacttcgaaattgcttttggaaacgtacatttcagttggtttctgctttagacatatcacttcttagccttctacaggtgcttttggtaatttcaaaatgcattttgtttgattttttcttttaaaaaggtaagtgtgggttaaggctaaatttatttttttaacccgttattatcctctaatatcttaatttaataacctactaaataaaattatttgaaaatcactagctaatgcaaaatcaaatgactcagtaacgcggatgattgattcaattaaaacattagggaaaaaaaatgaaaaatggttctttcattactattaagtgcttctgatagtgccagctttgcttcctaaggacttgcaatttctttgtttaaagtgcttttaattattttaataaaatattatggataattgttgtcctgttttttggtaacaccgaagatagttaagaaaacatactgttaagtttaaaaatgatgatgtgaataagcgcttttaggagaagttagaatccaacacggctctgttttttttcaacttcaatcagagaaggaatttaagtatctttgtaaagtgttaaaaagtatattcttggaaagtggtttgatttaatggacagtgaagttgcttctattaccgctctttgaagctttattcttttatcttttacctttatctatttgtttacttttaaaatgaaattaaacaagaacaaccatcttatttgttttgttggtacaacaatatttatcctcaaaaataaaaattgttggtgggtttgattaatacctgcatttgttctcaatttgtctgtttgaataataataataataataatacttcaaaattaagccacagaatctgcctttttaccttgttaattaattatttgttatttatggattccattttcgatttttatcttaggagaaatatttgtgtatgactgttgaggtggtttgatcaatcaattaagttcttccattgacataataggtggactccatggtgtgatcagtaaagtcaattttaatgcggtttatagtgaaaaaaattcatgatcccactttggactctttgtgacagagctaagtaggtttagaactagattggttaggcataccacctcataagtatacgtaaatttttccttttcactataggtcaatttgttctgagtagagttactctctccaaaggggaaccctacctaaatcctaaagatagttcaaaccaaaaggaaaaaaaatggttaaactcctttcaaagttgaggtgggtctctcttcggagagagtattatttcttgcttattcaagttttggatcaattgaatatttaacaacttggtcaaaactttcaaaactttctttgattttcaattttctgagttttcactgcagttggtttaatggaggctaagctcttttcatttcatttatttattttatatatttgtcccttaattagttgttggttgtttaaaagaaattttaaaagttacagtaagttcacatttcaacatgtaattatccaggctggcatggacacggtgactgatagtatattgtcatttttccttgctttagatgcatggtataatctgagagattaaatatatatgtaaggattctcatgtgcagacgttcgcactttttaaaatgcagatttatgttagttcatgctaattagctcaaatttaacattcttattcatgttaattagctcaaagttaacattttcatatctgcattttaaaacgtgcggatgtctgcactaaagaatgattatatatatgtttctaagttttaacaaaatttaataagatttaaaatttgttcattaatatgaaatgggtgctttatctgagatgaaatgattatgctaacacaagaatgatatagtcatttcactcatggatcaagaacttggttattacaaatgaaagaaatagcctacagactctagtttgattttatttaaaactcaagatgaatgaacttgataaaaacccaattttgaaatttatacttttattgagtttagattcgtcaatatcgcgtgagatttttttttttttttaggtttattgagcaagtaaatacaaaatttgggaagaattaaggattttttttccttaaaagagcttaacaccattgttttgacttctacctattaacttaaaacttttttcactaacatttttcatttggaagacaaaatgaaggcaaatgctaagttacagttgctgtaacatgtacctgtccaattctaagtaattgaggtggggtcaccacatgatttgtagcaaacttcaagttatagctgctgtaaattagccatgtccttaaaattaaatgttaaaaaattctaaaatttatttaagaaaagagtaacatctaaaaagaagagtatttcctagtaagagtatttatataacatgaatcatgtctgttgaagtatgataaaaattgtagagaatgataatgcattgccatctaattttttaactgcatgcagaggggagaaaatcaaagtctgaaaggagaaataga

SEQ ID NO: 9364 - DNA, 1043 bp, Citrus clementina
  Intron number 1 from transcript clementine0.9_026787m (loc us clementine0.9_026777m.g) derived from phytozome v7.0 (c hr-ID scaffold_139; pos 22299 to 23341 reverse strand)
ctgcttccttcgttcgctggccgcagccgcacaaggtaatgacgttaaggttttgtttgcgatttggtgatgaataggacaggggagatattgttaatttaattcagtatgttttctgggatcataggcaatacatatgtattttttatataatggcattggctgttcttattttggatataagtttcttaacttttaaagacttgttgaaatgttgaggatgcttggtagttgatatttgttttattctacattgatctgggctgggatttgagattttggaattataggtggctggctgctggcgaagttttggaaaattaaactgttgtaacctaaattgggtccaaaccaaaatttagacccgaattttcaatccgaaccttctgaaatgtgaacccaatcgaacgggaacacccaaattttagctccaaaaacacgaaacccctgtctcgtctctgtgttctcaccacaaccaccactgctgtaaaccattaatgacccccaatttccaagaagcctcgcctgcaaagagccaagcttgttatcttaggtaattattcagttagtatttaaattaaatatgattaagtaaaatttaattataatagttatttttttaataaattttggtgcgttcattgcgaacatatcataaagattgtgaaaaagataaagattgtttcttttcacttgtaaattgatttatttatgcgcttacaaacatccttgtgttaaatcgatttcccgtatttggctaagattttgttgctaattgatagagtttttagtatcactttctctgtgagctggctattaggtttcaattaagtaagatgtttaatttttcatccatcatgcgtgtttttatgtaaaattatactttaccttattaggattagtttagatatggggatcagttcgctggtgtagcattaagttgcaattctttgtattgtttgctaatgattattttgcacaatcttatatgcttttatttctgtgcagtttgttccacatcaacggaaagatttgttattgta

SEQ ID NO: 9365 - DNA, 1107 bp, Citrus clementina
  Intron number 2 from transcript clementine0.9_033519m (loc us clementine0.9_033519m.g) derived from phytozome v7.0 (c hr-ID scaffold_45; pos 1599556 to 1600662)
ttgggtcttcctgttggacaacatatactttgcaggtaattaatttattaactctttaatagggcaggtttaagagacacaattttcaaacacaaattttaaactcttggattaaagaataaataaagaccaagatttgatgaaatattaatattttttaatttaatattttatttttcacctctctatcctcacttctcggtttttatgttttatctctcatctcttccatctttctctttctactgtgtaatcacccttcgggccatgaaaagccaaactaaaaacatgacataaccaccaaaatcgtggtttcattttacttcgaaataaatttaaaagaatagtttcacttaaataagtgtcgatcgtattatatgttgtagattttacgtaaaaatctaaagtatagactagatcttttatttgtaacaacggagaagcctgtaatttgtatttttttaaatgtaattagtacccatcgaggtttattttcaatgattatcttcaagaatgaaaactaaaaacctagattttgtacaccatgattttgctaatagggcttaatcagccactgttctaagttctcccatcgcaagagctttgcttttacctatttttcctttcttactgtataacaatttgattcttttggcttaaggatgctggatgaccatatcaaatactattcacaggccaagcaggtatgggcacaatggttgaaaatttgttttggtgtcgatagcttatcttggtatgataaggcattttatagcaacgagatagatacagaagatgagaaagaagacagtaggaagagaaattagagaccaatcacttgatataggagagagagagaacaaatcataaaatattaattagaagaagagaattttatttcttaattcatgtcatcgaatcttgtctctttattattctttagttttagagtttcaaatttgtgtctaaaattgtatttaaaatttgtctcgtgaacctgccctttctttgattgtatataatcaatattttattagattttttaaaaattaaattttaaaaatatattcaatatgttgatgagcagggggaaagacagtgaaggta

SEQ ID NO: 9366 - DNA, 1247 bp, Citrus clementina
  Intron number 12 from transcript clementine0.9_007723m (lo cus clementine0.9_007723m.g) derived from phytozome v7.0 ( chr-ID scaffold_69; pos 243358 to 244604)
gaagtcaagctcaggttcttagcgtacctaaagtaagtctttacttgttaagaatcatttcttcatttttttcaagtatctctatgctaaatgaatgcagaagctttatgggctctttattgaaatatttaactaaccataaatatgtggtagcttgtttgtgcctttccatgatctccttggtcgctgttcaccacatccttaaccaatttcttgataaatgaattaggggtgttcaagatccaatccaatcaaaccaatcaatccaatccaaagcagaaccttttgattggatttattggattgcaaaatggaaaatccaatgttattggattggtttatggatctatgtgttaaaatcatatataaagcaatccaactgattaatttttattttgtttatttaaaaaaagaagaagctacatattgcttttatatttaacttgctaaagaaaaaacctgattttccttttaaaaaaaatggtataactataaatacacaattacatagagtattaattgcgacctatgattgttttctatattcaaatttcaattttttttttaaccatatatatatatataaaatgttttcaattgttaataactagaactgtggagagtaattgatgatttttgtttgtaaatttttattttaatcagattgatgggatcagattgaattggatctggctttttattgctttggattatattgagtgacctccaagatcgaaggaatatgtatatgtcccgcattcaacatattttgcatttgaaagaatatttatgtatatggctaggcctacgatcaaatctgaaccttgatctgaatctaaggagttacaacaccatttatgtatatggctaggcctacgaccaaatctgaaccttgatctgaatctaaggagttacaacaccaatcttgaatcttaataagctttgggaattattacgtaacgcaatatgacataagaattgtgaatattttatgggtgtagagagaaaataattagttaatggaataattttaatgaaggataactttgacatgtaaaagagtatacagagtagaaaataccttttgaaatgtattggatgagtttgtagagtaagagtattcaaagtagattttggtgtgcaaataatcccacccaatgatgagtcttttgttaaggttgattttccattttttaatttattattgttttgcagtgaactgcttatccattttgaaaatttggagc

SEQ ID NO: 9367 - DNA, 1739 bp, Citrus clementina
  Intron number 2 from transcript clementine0.9_026844m (loc us clementine0.9_026844m.g) derived from phytozome v7.0 (c hr-ID scaffold_148; pos 260173 to 261911)
tgtgctgaggtaagtttcattttccttccattttgctatatttaattgttaatagaagtggttctgtagaaagctcttctctaatgggttccttttttgagtgaatattatgcttagagaatttttgttggaatagattatgcatatttggagtgtctttttatggatgtgattttttataaagcaggtttaggcgcttttacagaaagcgcttttatttgaaagcacttcatgtcatataccttatggtaaaatgctaatgtgagattatataggtgagtatgaagagcacgcatattttgaaatgttttaggatatgtgctttcaagtaagagcgttttctgtaaaaatacttgcaactgttttataaaaaacacttatgaaatgttcttcaaaatgcagttaaagtacttttagtcttttagacctcagttgcttttgaaaaaagtagttgaaatgatttttgggatcaaaaaagttgttttttctatttcagccgagcactataaaatagatacaatatacttttggtcttttaggattgttttggtagtgacaataacctagcagaacacaatgagacttgctaatgtgacactagtctctttgagattctgagtgaataataggggaagagcaggtcttatccctcttaattctgaggaagagaagttaatacaaacactaatgtttttgaaattctgagtgaataatgagggaagagcaggtcttatcccttttaattctggggaagagaagtgaatataactttctttacaattgagttctgattttatagtcttgatgataattttaatttgtttcactaaatcaagttactgatatatagacaagatagcatagtcaaactgtatcaatgattgttttcgtcattgtgtaaataatgtgttaggatgggtaggatgttgtggaaaagataattgaggagttgtttgagtgtcagtttgatcatcgaattgggaaaaatctttggtgaatgtaaggtactgtgggaggttggctctacaatttttaaatacttgacctgtttttgtgtctattttatagtgtttaattgtaatttaaaaaaaaaaaagtaatttaggagtactttccagatatatgtttctttaaaagcctttttttttagttgaaacaactttgaatataaaccttcttcagttatatttttatggtcaaatattaatcagtttacgtaactatagggcttttgagtatctggtagaataccagcagcactcacaaaagtgcagttgatatgtaggtgcatttgggcatgtttttgcaaggagtgcttttaaataaaaccactttctgttttataaagcaccttgaaatgtttcttcaaaatgcacttaaaagttcattttgacctaagaagcattttgttctaaaaaagcatgtatcctgtgcttatttaaaagtgcacctcttgctttttcagaccaaaaaggtccttctatcttatatctctagggtgaaacttaacttagcatcagtctctttgaaatcgttgaactatacatttgcccattagataattgggggatgttggaacagaaggtctaatcagtttctacagtgaagacgagaaaaaattaaccatcaagttttaaacttagtcttgatggtaattttgtattttttggcttaaatcaagtgactgaagacattgtcgatcagattattgaggagtttcaaaagtgccacttggatca

SEQ ID NO: 9368 - DNA, 1073 bp, Citrus clementina
  Intron number 1 from transcript clementine0.9_014803m (loc us clementine0.9_014803m.g) derived from phytozome v7.0 (c hr-ID scaffold_16; pos 2802461 to 2803533)
gacacgtggctgagactttgggcatcgatttagaggtaatgattttgatttgattgttgaaatattgttaattttttgagtaattttgggggtttaattggagtacttttgggatttgctttttgatattttataatgattgactggttatgaatatgaattacgtagtaatttaggtttattgacgaattaagttttggttttatgcatttactttcagatttgaatgaattgggtaataatgcttgttttttttttttcttttgctgttgtttatttgatgggaatattaaggcaaattggatagattatgaagagtttggcttttgtaactgatttagtgtcagttgactagggccttagtttttgagagtgcgggatgaggaataatttctgcttcagtcatcttgcaaggcacatggtgttacgttggtttgtttagttctcatgttatactttctgtttagtttgagaggtttgtggaaataaacttttggtgcttttgcatgtgtgtgttagtttgcctttgaaaatgtggattagttaacttatggaagtaatttacaaattgtgctttggaggatgaaatcaatttcaatacaggaaaattatgattcttatgattttatgttgtttttcaaaagagattggggttggcagagtagtcttatgtcctcttggatcccagtgttgaagaagcaagtttgagagattttagttttggatgtttcttattattttcatattttggaaattatgtaaacttgtagttggcggctttttcattgatcaatatttatgacttaaaaattacaattctttgaagcctaaagagagtttggacaaatctaatccatgcaacctgcttagttgttttagtgtttttagttgctgttgaacttgtacttgttattattatgcttattctcattggcttgtcaaagacttgctccacacaatttattgtttggggtttggtgcttctatcctgtctagcttagtgtatggttttttccccaaggtatcagttgattggccactgctaaatataagttttcaattgcaggaactgt

SEQ ID NO: 9369 - DNA, 1534 bp, Citrus clementina
  Intron number 15 from transcript clementine0.9_000514m (lo cus clementine0.9_000514m.g) derived from phytozome v7.0 ( chr-ID scaffold_30; pos 86344 to 87877)
tcaaagaagcagaagaagctgttgcagctgcacgggtgtgctttctttctccctagctttttaagataatttacctatcatcgtttgccagctcacttagtttgctatcttttctatctttatgtttttttattgtggataattttgcactagcaatttttctttatgaagagaatgaaaaggacaagtattttaggaggacaacttggtttaataagaatgactgatcactgctgtaatctaggcagtcaaaagttttggtgaattattcatggtttcttccagttaacataaggaatcttgttttgttttgcttctttgatgtggtagattttcttccatgctattattagttgatttctgctcatttacacttgtgatgatgctgatggaaaattgcagttgttatgtgcactactttattttttttatttttatataatttctaaatttaaagtctgtatatctttatgacacaaatgaaaaggaaaagtattttggcgcgcataaggaccttttttttttgttttaagtgaaaaatcttcgtgcatttagttgatttttgctcatttaccctagtattaaattgatttaggtcttctaatttggattttagtgttgttaattaaatgctacttgttgacacataatttgctaattaaattgacagaatttgctaagtcaattgacatattgaactaaaattgcacatgtttgtaggaggtccagaatagaacttggactggtttctacaatatttgagtgacctaccacttatttatttgctttcaataggtccatggtggaatcacgcattaagtaactcttaaacaagtatatgaataaatagcaaaagagttagtaagcagggattcttttgcaatacattttggtttgccactccttttctttcttcatttttacttttgctcttcttttctctcatgctcttttgcatagccacactgacttatccgatctctttctgagtcacaataataataatataaaataaatagtttgctattcaaagtgtttatagcaatttattactcgtgatgatactgactggaaattcatttgggaaaatccttgctatgccactctttttcttttctcatttatttttttatttttggtcttcttttctcttatgctctttacacagtcacaattatatatccattctctttctgctacattcatgctttgtcttagtgctgtacacaattcatttacattggcataattttatttatgcccttgaattctgaatgcatatttgaaccaggttggagcctatccatatttgttctcatttaagacacattagcaaggctttctcttgcactttatgtatgccaaaacttctaacgaaatgtttcatattggctgtacaactaatgagctgagcctttcaattagcataactttctctgatataaatttctagtgctaaatgattcatttattgtcactcaataagctcgctaattgattattattaatgttttttttttttcagaagcgagca

SEQ ID NO: 9370 - DNA, 1849 bp, Citrus clementina
  Intron number 1 from transcript clementine0.9_025589m (loc us clementine0.9_025589m.g) derived from phytozome v7.0 (c hr-ID scaffold_10; pos 2739356 to 2741204)
tcgctggtgagcagcacgctctcaagttcagccaggtctttacttactactcttattttatattattctgatttgattttttctgtgatctatctatgccgcttattttgatcgatctcattgctattctatgatgttgtttgttttttggtgaaaccgatagctttcaattgatatatctgctagatctagggtttcttattggctttgtagtttagtacttgtttatctacaggcctcttcgtgatcttcgtttcatttatttaatattaattccatattctgattatcttttgcctttaaattgtagatttgtcgtgatgtttgtctgattttaaaaaatctttttttttatttagatcttagagatacttgtggtgtcatgccactgacagttttcgctttttcaattttaaaatttgaacatattctatttactcagctcattgcttttctttctaaaataatatcttgtagaatgtgtaaaatggatattgccattatttgattttctcgctgtaacaaatattaatataaattcgcttccatatgctatagttggacagatcctgccatgttttgacagctgttctctgccaatgctagtaagaacattgtagtaatttaattatcgataggtgaaatgggaagattggaacttctcttcatacatgatataatttctttgtcacttataacatcccttgcacccttatgctgatctctcacattgataagaaagaaaatgcgcagttgtagggctatgatattgcctaaagattgtctatttgctagttaaatgcttcaagtaatgatgactagacagctgaggttagagtgctgtaacagccttaatctgttcagttttatttggatgatgctattgctattctaaatcatgcaacttgaagtacttcagttttcagataatgttattatatctagtcattgctatataaatttcctgtctattaatatatgcttcttatgtggtgaaattgcaatgagatttgttctcactattggttttttgtctaaagtacatctattgagcatctgatgaactctgtgccggcttctataaaagttttagtgtttttattttgtttttaattttatcttcctgaaattagattaaatcttaagagaattaaatgaatcttttatggtaattaccagtgtcaaaagaaatctacacagaaaattcttagatattgcaactatattaagtaacctctcaaatcaaacttaatatttctttttcctaatttatttgtcaagaaatgaataattgaataaaatcatctgaaaactagaaagaaacccattactagaaacacagaagaggagcatttcagataagctgccttcctttgatagttagtgctttaggatttgtggggagagtgaaaaaaagagattataaatcataaggagcgaagagtgacaaaatagagacaattgattgttaattaagatttaatccaatttaccgagacacaattaataacaaagtaaaactcttttaggaagacaaataaacaaagaatgaagaaatcgagagaggaaggggaggaaaaaaaggtaaatttgactggtgagtgcactattttattttaattctttaaaaaatatgattaagtttgttttaatcttgaccgtcagatgaaatgtaatctaacagctacaaatgtgcgtgaataattgtttgcaaaaagagggctcctatcctgtcccttgtttaattggtttattgttacctcgcatttgttttcgattttctctcttgtattcatttgatgttattctcgctcctaaccaatatttatggtcatccttctgttctcag

SEQ ID NO: 9371 - DNA, 1633 bp, Citrus clementina
  Intron number 11 from transcript clementine0.9_002711m (lo cus clementine0.9_002711m.g) derived from phytozome v7.0 ( chr-ID scaffold_16; pos 3866553 to 3868185 reverse strand)
gagtgttcttagagataggaggtatgaacatgtacagaagtatctttattctaacaaaatgaagcttttaattgggtgattgatatccaaattacctgttagtttgttaggttataggaaatacttacattgaaagtacagttctctggtgcttttttttggctttttattttgatttttgtttaattaccttttatttttgcttgtgaaaaatgtagaggtagatcggcttcactaaactcgtgaagaactgagggggaaaaaaaaaagaagtatttaataaagcgtcattggcataacatgttgattctatagtgctaaaccacggagtgggtatcaagtggagtcaactgcagagtgtgtattgaggcctatttggagtgcgtttgaaagctataggcactttattttataagtattaaaaaaaaagattatttagtaaatttttagaaaatttttatttttaataacgataagtttggggctatgggacttgtgtggttgatgaaataagttgtaaataagttattgatttaaaaagtagcttaatatatagtaaattatgttgtcatggtagttgtgagtttaaaaaatgaagattgtgtgtttaataaattttattacaaaataattgttaataatcaaaatagacatagctttaaatttcttatatgtgtgtgtgtgtgtgtgtgtattagggcttacaaaaaataagttataattatctttttgttaaaatattgaggttgtaatatgaattttaaagagtatagtgacttatttaataagttgtttatggaaaataatcatcacttacttttaaaagctactattgaaatagagaaatatatgaaacaattgtttttaacataatttatcaaaatttattaatggagtttaaataagtcaccacatttttttttaaattcttattataatttaatatgttagcaaaaggataattgtattttatttttccacaaagtctaatgtaaaataaaagataatttaaatttgtgtcttttttgtcattgtataataaaataatatttgtgttataaaatttatcaaaggtctactcttttttaaactcacagcaattttaataatacaatttatcaaacactgaatttattttatctatataagaaaaataatttattttatctatatcataaaaataatttattttatcagtcattataatctcaagtgaaaggatatgctatgtaagaaattatatcacaatcgcagggagctataaaataattacacaaacataatttccctggaaagtaaccaaacacgagaaaacgtaagtactgctaaataacgagttctaatttgagttagaaaagtaattgacgtgttattcatttatgactgataatggaataataatttttttaaaaaaatgatatttgaaagataggtggatccgatttttaataagtaaataaagggattgagacaaaatattgaaactgatacattatattataagaaggtgaatatatcatgctttgaaacagtcccgtatggggtcatccagtgaaagtaattaaacgttattttgcctaatgttctccttgtgacagataattgctagtgttggactggataagaagctata

SEQ ID NO: 9372 - DNA, 2048 bp, Citrus clementina
  Intron number 4 from transcript clementine0.9_003656m (loc us clementine0.9_003653m.g) derived from phytozome v7.0 (c hr-ID scaffold_124; pos 292733 to 294780)
gggaattcaccaaggacttgacaaattctattcaggtaaggtcataccgcctgccttttgttgcatggtctgagttttgtttttccttggccttcgctgattcatcttttttgttcattttcttgatttattaatgtaatgattcagcttttttcttcattttcttgatttataaatgtatctttagtgaagcggtcatgagtgaatgcacatggttttgtaaagtttatactcttagtgatgatttccactatgactgcagtttgaccgatagcaattccccccgccccctccttttgagcacttatggtgacagttgatggtaatgatggacagtataggatgatcaccagtatgagactgttgtgaaaaccagcttgtatgaactttggtaggggatatgtaggtgaataactgcagactgtttttcctaaccacatgttgatttatggcatagaagtttggtgttctttaagtttgtgtgtatctgtatctgtaggttttttggtgtggaaatttaacatgtaagccaaatattttgggatttttatcattagtgaaatttgagttttaccttttctgatggttatattctatgatgggggtatattagatgtaattttaggagcttctgtcaggatctttttctgaaattgttctttttgtaaatgaaggttaaagaatacttaactaagataccatattttattcacctctttttatgcatacctgcatccagttgactttgtggtgaccttttccttcattttctagcactgacattttgtaaccatttgtatcaagtttgtcaactaaattattgtttggaatttatttttatgatatgtagaggaagaaatgccctgcatggaattgtaaacccctctgtgatatgccatcccttatttttccttaatgtatttgtagacgatgttgcaatagcatgttctgtttattgagaaatcttctccattttgagctctaaaagagagtgaccagaaactatatgagatttgccagtcatatgttatgctctaagctgtttattagtgttactgagacagttgttgctcttctattgaaataatagcaatttgtaactccttatataatctcaagatgggatagcaatcttttcttataatggtttggtaatagtagtcatggtccttctgtaagataacttgggtcatggggttagatgtgatagacatttgaccgttgctctaaactgtcttgttcattttgcataaaaacaatcccatcttgaaaaacctgaatatttttttgtttctggaagaatcgagattaggacctatgatgttttgttagtggcttggctggtagttctttaacgtgagaagagcagataaattgttgtatgtggtaaaaattatgaatgttattttattttaacaatgacaagttatttttggtatttgctggcttgttatgttgccagtaataagttttttagtcttcatttggagtttctttctttctttcttcttcttcttattttataatttattatcattattattattattattattgttttagctggaaaaaatggaaagtatcgattaacatttgtgtttggatatgacattgtgttgtagttagttcaagaatgaatacctttcaaaattaaggcactgcaaagtataaaatccatcatgattttgcttatagacttctgaaaaaattagtttttttttaatattctcatagatgttgcatatttacatcatagactgtctccgaagaatagtagatttgatttgtttatacaagttttcttgaacttcttgtgagtggtgtcaattaagaattaagcatgttgagttttgatattgtggccttctggggaagttatattgatttgtcattgtccattagcttgctcattctgccatcgacaatgctgcttttgattctgtgcttgataaattacaaatctcaaatcagttagataccgtgtccccaattactaatcttgctgtttacacttttctttttatggcagatttcagactttagcatag

SEQ ID NO: 9373 - DNA, 2199 bp, Citrus clementina
  Intron number 6 from transcript clementine0.9_001996m (loc us clementine0.9_001544m.g) derived from phytozome v7.0 (c hr-ID scaffold_6; pos 221604 to 223802 reverse strand)
tttggagaataaaccaggtgttgcttacttccattaatttaatatttggagatgatttttccttgggtttctattttctaagttatatcattatcatttgttatcattcacaagagatcttggactccattgctgagcctgagtatcagttttgaagtgaaagttctccttcataaagctttattttattgctgcaacttgtgtgtctttttttttttttcccttttttctggttgctatcctatgttctttggtataagaagtgctccattgaactgaaaaaaaacctgaacatgcacagacatctgacctttggccattatttgaatagattgagatataatttgctaaaattgatattccttggttgaactcgtaacacaataaaatttggtaagaagaaataaattattataagttggtgttttatggcacaagggtattggggattgtataggtcttcttctcttacaatgccttttgattggtgatctatggaatatggtctgtcattcttcatagcttagtgttctaggttcaagaaaattttagcagtgttgattagttgaaaaatggatgaatggtaatggacttagcttggtttggggtctttatgttgtactcatcttccaaaaaatcattttcactcgtccttttttggaatttttagagatcttaaacactatgcttttgtttggttatgtttccggtgtttcttatatatttcccatgtaccacagttgctccacatttttggtactgcttttgttataaatttgttacgtataaatagaaaaaaatagggctttacttgataatggaaattggcatgtgaagtgcttattgcttgtatctgttaaaaggagtgcaggtcctcttttttgttaggtgccgatattatggtacaagggtggcttaggagttgaaattatgtgagattttgaattttgaaaggatatggatcagagtagcatttgagaccaaaatatcaggttaagacagtgttccatgagctgctttacttggttgtgaacagtaatccaagaaggaggaataaatagatgtattcatcacatgtaatgtatagtgcctcagcgtcaattttttcccatacgcttatatcacatgattctaaggagtgcaactgatcttcatttaaaagcgtttggctggaatgtatgagacttgccagttttgctgaattcgctaaagggttgaaattctaaataggaaactgcaaatactaaagatgtggccccaaaaagaaaaaaaccacagaggacctcatgcaaaagccaatcaggacagttataatagagaaggactcatgttctgttgtgaagcctattcaatcaaacctagatattaactcctaaaatatgaacaagctaaaataatgcccagtgattggatttctgttgttaagcgtaacattgaaataaggctaaatggaaattattgccaagtatcaaatttatatataggtcccacattaatttagatcaaattttgtagaattcgtatattttcgaaggcctgttttacaacctttgaaacttaattggagaagaaaagatttcatctagatctttgcattggtaccaatagattttactaagctaggatcttgtttttgttgttgttcttcttctttttccccctttttaatgagaaataagaaagtaatttatcttaattgatgttgtcatcattattgcttttaacaattagcatcatcatcaatcgacctaaaagcttatgctaatagattagtcaactatagcattaacaggccatctggattttatcaactgtagtattaacagaccctctgaattttattaacagccttgtcatgtggattaagctcaaatagaaactaactcagatgcagatgatactgcaaatgcaaatacaaatctgaatgcaattatatgggaggtttcaaatataagacctcttggtcaaattaatgttgatatcatattaattttttgtttggcttaaaagcataaattataaagctggtcctgacgattgtatttgagctccagcaagttaataatgaataaggtgttatatctttttaccatagtagtcgttttagtagtgtttctgtgagaaatgactacctttatgttttttttttttttaatttgtacagctctggaaacatctaagttcagaagatcatccata

SEQ ID NO: 9374 - DNA, 1717 bp, Citrus clementina
  Intron number 3 from transcript clementine0.9_009253m (loc us clementine0.9_009253m.g) derived from phytozome v7.0 (c hr-ID scaffold_33; pos 1258025 to 1259741)
ggggtttgatttaagagaaactgttactctattgggtatagatttccttatttcatttcatttccctttttcctttcatgaaaaagtagaaatttctgatttcagtttgtattgaatttactcttgaatttttttttttttttttggttatttctgcgtttgagctgattgtctgatagtcttgttctgatctcttttgttcataatttgatgtactagagaggacaatatttccacctaattctacagtttagcttagtagaggtgtcttattttccttctcatttgtactaccttttatttcctattccttggtactcaaattagaatattcttatcattatcaatccttcattatgttatgatacggatggtaataccttactagggatggcaatggggaggggaggggaggggaccaatctccccatacccatccccgatgttttgcatatgtccccgtcccctccccgtccccgtcaaaattgcttgagagaatctccatcccctccccgaataataacaggggatccccgagggtccccggtccccgaataattaatagtctaatacattttttattttcgattttaaattaatcatattaaaataaactcataccgctattgtaagctcgtaactaactttgacagcacattaagtcctccaatgtgcttggatgaagtttgttatggtatgagctcacaactctaccactagtgttaaaagctgattcagaagcaactgttgtaattggaattgccaaaatatctctagcaattcgagctaatgtaggatacctattagcatttgtcttccaccaactcaaaatattaaaatcttccatccgagatataactttctcatccaaatatgaatctaattcatctgcaacaactgcacaatctccattgtttacataatcattaaaacctgtcatccatttggttgctttcttataagaatcccctgtagatctagtagaagaactactaccagtataatcaaagcaataaacagttggtgaaaacttcaattaatactcttcaactaattcccggcaaagggtgaccactttcccaacatacaactattttgatatttattatttttaacaatatttataattttgttatttatttattagtaattttaaaaataaaaataaaattaaaaattaaaatggggaaatgggtaggggatggggattccacctcatccccgtcccctccccgaataaaaagttgggtaaaaaattttccccgtcccctccccgaaaaaaaaattgggtataaaattatccccgtaccctccccgaatggggaaaatccccgagggtacccatccccgtggggatttttgccatccctataccttacacctagtatgatgacttttctcttagaatgtattgattggtccttgattggtgattttgtactacagattattcctttctacctaacagtttgtgcttgtgataacctgatccgagtatttaatttcataaatattcaaggaaatttgttcagagatttcttagattcctaaccttgttatggttcagttttatgatgataaccagttttgatctgtgattgtggtcgtttccagcctcctagctgtttaactgtctattctaagtaatgtaatttgattatttcttctttctttgtttgcaggtgcccatagcattggtgttatccactgcaaattc

SEQ ID NO: 9375 - DNA, 603 bp, Citrus clementina
  Intron number 19 from transcript clementine0.9_000989m (lo cus clementine0.9_000989m.g) derived from phytozome v7.0 ( chr-ID scaffold_82; pos 124240 to 124842)
cgttgctgctcccctctaaagtgaaagcaaacaaggttatgtagcttcaattttcatatattgtctttgatttttataatatcttctggtgtggtatatttatcaggctttataaatctgcattttaacagagccacttacaatgtgatagaatggtgcaatacaagctgaatgctatacatgctagtaaataagaactgagtaaatgacatattagaaattttcttttgcaactgttgtacgcttccttgaagtttttgtagattgagtttcctgttgcttgccagtatacaaatacacttgtcactgtactaatcacagagattctttatagttgattcaactgttctatgttcctctaatcagctatccatgagtagaaccttatttctagttaacttttcttccgaacttctaaatttgtaaagaatgattacattatcaaacccacaaatgtcagaggaactttaagtagcaaaggctcaaggatacaaaaccacctaaaacatatcaataattgggtttcaagttgaaggaaatgaaataaaagtttctcatagttttccttcttgcaactgcagatatcaagactaacctacaaca

SEQ ID NO: 9376 - DNA, 862 bp, Citrus clementina
  Intron number 1 from transcript clementine0.9_009911m (loc us clementine0.9_009911m.g) derived from phytozome v7.0 (c hr-ID scaffold_4; pos 3339794 to 3340655 reverse strand)
gaagcctgacggctgtgatcttccaaggtgtgatttttaaatttccctttttttttctggttttatgaatgtttcttgaaatgtgatgatttgtggtttttgtttctgttttggattgaatgcattatttatgaattttttcatcagagaagcaattagtatttgttttgaattacatagatacaaatgcacttcttttacttactatatcaacttttctgatactctttttggttgtaatagcttagtaagttgtaatattgcaattttcagaatgtagatgttaggctgcggtatccatgatgggtcttattagttctcctctgtaagatggctcaagtcgtggagaaggagagatgtattctgctgtaagcaaggctacaaaagctacttcttctgaccaattaatagctttaaattaacaaatcaatcttgccatctggatgataatccttttataatccatgtttgatagttgataggagaatcttttcctcatccattggtattgaggttaagaatgcatttgggcatctgaatttctatttctgcattctgttttcacagcaaaatccatatgaagtggtattttatcttgtcatggggagaaatttcataattttcatcattttaaatcttgtagattatttagtagccagtgagcttccagtgttgaatttcctgcttctgcttgccatggaactggcttggattccatgctttcatccttttttggttatattactcaagttgatttgcctacctatacttactactgttttctatttattgcttcctggtttgaaaattttcagatctgttgtatgatattttcttcaatttcctttcattggtaggttta

SEQ ID NO: 9377 - DNA, 1503 bp, Citrus clementina
  Intron number 5 from transcript clementine0.9_003327m (loc us clementine0.9_001719m.g) derived from phytozome v7.0 (c hr-ID scaffold_20; pos 1962629 to 1964131 reverse strand)
ccctgcaaaattctagcactgtagaagctcaggttagatttccttgcagtgagatatgtgctcttaggtatttcttttcatgctctatgtgtgatggtggctgctcggtattttttgacgcggactatttgtgattacttaaggagttgatcttttactgtttttaattatttttatatcgcccgtattccagagtgttagtctgcaactctcatttttcagacaaatttgtttaatgcacagcagataaccttcttgaaaatttcaaattaggtaactttgtttgtctaagctaaccatggagtactcattcagtgtcctatacaaattatatcttttcgaattctgtgttcaagattttgatgaaaaactcttttcacctattgtgtttcatcttagaaagttatgtaataatgaactttacatgtcaaggagatttgggtaattcatttaattacgtgattgagtgtttattttgtcattgtattttcatcagattatagaatgcttggagctttattgtttactcttttctccaactgttttttttttttttattggttctccaattgttaattgaccaacgatttgaatggtttttcctgagactatcttataattctttcctattattttatttttatttaaatatcattattattgtttttttgttacagttgcttgagggtttgttagtccaaaattctgagtttacagcatagagctatttacttatctgttttactgtaataatgatcaggtttacattctgattgttctctctaagcataaactaggtcttattcttaaatgtttcgtttcttagcaagaaaaaaactaggtcttattcttttaaattgattatatttaatggtttttcctcacattcgtctgctttggttcaaattttcaattttatcatggatttttttatcaacattattttactatttacccttcctaaagcgttatgaatttaattttattaatagtacagttttctttattattaaacttaatgaggtgtttaattcaaaaaaaaaaaaagaatactttaattaggtgttttctctagaaatcttttgtcgtttccttatggggcacacaaaacttgaagttatgattgtagttgccttgttagtttcaaaatagtgtacatgggacatataatatggaactttaaatgattggtttagctgatggcaggtcgaatttccctttctataacctaggagcctatgagctactttgtgaatttagtaacctataagaggctgtctttatgtttgtatgaggactaaaattgccatacccaagttaagacattatactctttcaaagacaaaacattgcttctcaaaaaaaaaaaaaaaaagacaaaacactgggggatatatagactattgaatgacattgccagtttttgcttcttttcttaatagcctgttactgaatctacttgtattttgttattgatctagggtgacaaggtacgtagacgtg

SEQ ID NO: 9378 - DNA, 658 bp, Citrus clementina
  Intron number 13 from transcript clementine0.9_000360m (lo cus clementine0.9_000360m.g) derived from phytozome v7.0 ( chr-ID scaffold_2; pos 6251365 to 6252022)
cctttccttctgaaaacagtagtcaaaggttggtagcactctgcatgtctaggtctatcttgctttaattttcaagttaacagatatgactgttgattgatatttgattctagtttgctgattctcatttgtagtttcaaatgtcggtcttgtctgtgcctttgtagatattgctttgattcaagacttggatttgcttaaatgtattcttaaatcttgttgaattggaagaactgaatctgttccaagcatgtctggaatggaaaattagaaatctgacaattctgaatgtcaaagatgggaagaaacatgattaaatgcttcaaaaccaaacatgaaaagagtatactgagctagttttgttatgtggttttgcaaacatgcagtttcttatatctgaatagtgattacgagcccatgtagttccgcttattttttaatcttttaacttgcagataattcttgaaacctgataaatgttctgctcttttttctctgcaaaatggactatcaaaacttaaagttttgaaaatccagaatgcatttaggtactccatatatgttatgttacccttgtggatatttagtcttcttttctttgttttttttttttttcatgtttattaggattccgggagattaagaaggtggatatttt

SEQ ID NO: 9379 - DNA, 702 bp, Citrus clementina
  Intron number 2 from transcript clementine0.9_013777m (loc us clementine0.9_011768m.g) derived from phytozome v7.0 (c hr-ID scaffold_12; pos 4641832 to 4642533)
gaggttgcggagatagccctgttacaactcctcaggtactactgcttttctttcaggttactgtttataccatatgcattggaatttctgaaatggtttgatagagtttaaaatttttttcattacactgatgtgcagttctattcggcgtcatttttaggagatatgcaagaagtagtagcacatgttggatccaagtacccaaaagcccatttgtatgcagttggatggtctcttggggcaaatattcttattcgttatttgggtcatgtaagataatgatttatccatgctcaatttttggattgaggttcagaattttggatccatgttgcctcttcttgtctttgcataattgctgtgggcatagtgcaccacttgtgtttatgtttgctcatgagatagatcccttctaatgtaatacctattccattcctcaattatctccataaatttgcagccattcttttttctttaatatatcgttgtagatagaggtaatggtttccatgatttaagaattaacagaatgttcttcattattatgcattaaaaggtgctttgatctcaaagggtcctagaagagttggaatgttgtaaactgttctgtctacctggtctatataattgaggctttacttatatttttataatgtgctatttgcaggaatctcacagttgccctctttctggggctgtttc

SEQ ID NO: 9380 - DNA, 1362 bp, Citrus clementina
  Intron number 1 from transcript clementine0.9_034340m (loc us clementine0.9_034340m.g) derived from phytozome v7.0 (c hr-ID scaffold_3; pos 1856117 to 1857478)
ggtcagaaagctgtcaagaacagcttatatcccaggtgagccagccgcgcgcagtcttcattatttacacacacacacacacacgatttataaaattatgcgtgccacatgttcttaattcttacgtgaaaaatctttattaaacaattattgtacaggcaaattttattttgtaggatgactttgttttaattcaaagttctcaaccatgcatactaacatgcatgtgtatataatttcgcttccctagggttcggttatgatctgacctactgagaaccgctgaagttgaagttgataatttaatggaaatatattattaacgtggttgcaatgttgcaaaatctagtgttaattgctcctacacagatcaaaaagaaagagagagagggaaattcttcggatatcggtcaagatatggatgggaatatttaaagatttgatctcaagaacaaaataataattaaaaataaataattgggctagtaggtcttgtaggtacatagacatgataattcttagggcttggacgggctatatttttcatgattgagaggggtgataagtgatcaacatctttcttcattccatctctttaggtttggaaagtagataacctaataattgaggcaatttcgtacagagaagtcgatattccctgtcatgatgtcgaaccatatatggtagaaggttgttgaatttattaattcatagttttggtaaatatatacatagaaatttatgagaggcaaaaaggatactagccagtaaattgtgttttttttttttttttttttttgcctagaatttgatagtttagcagttgtataaacagaagaatcattcattcacggtatatttatacataagagtcatgttagtgattctaacatttgtatctcaactaataagatattttcatctatttaatggtataatattaattttaaaaattatgaaacttatcatctaataatagattaatgacatgtagcattggaatacaggcagtacatataatttgaattataattttgacacttttaaaccattggttttatgtaatataatccaatgatgacgagttggtatcgttagatattactttgactttcaatatttatccttagattgattgagatcaatggctcaaaatttaaagtaaaaagtttaacctactttgcccttataatggcatcatattttttttatttatgggtggaaattatatctaaatttctcttttacattctgtaaaattatatatgttttgtatgcatatgcttaccaatctatgattttgcaaaatcaatataaaacatggccaaatcaaaggagctactaccggtgcacgcatcacac

SEQ ID NO: 9381 - DNA, 786 bp, Citrus clementina
  Intron number 1 from transcript clementine0.9_021970m (loc us clementine0.9_021970m.g) derived from phytozome v7.0 (c hr-ID scaffold_4; pos 3720284 to 3721069)
ctcagcccaccactcttggctccgtctggaatcgggtacctttttttttttaatcttttaattcgctgaataattggcttttatttcagttagatccaacattaagataagaatccactgtggaagtatctaatctctggggataaatttgtaaagttacgtacacaagctcataatttgttgcaagtattatatgtagatgtctgtttgttgcgttgcaactatggagacttagttcttggcaacagaaaatacaatattaattatcaaccatgaatttttattattatatatggtggtatcctatcttatgcttactacttagtagcacgttagacaagaattgatgtgagttttatgtatgatactgagagtatctttgcaggcgaaggttgtggtgcaattatgtaatatatgttggaactatattctgtgtgtatatgtgtgtgttgaagtaaatagatactcttgctatgtaatgtttaatcatccgattagttttgtggaggattggaacaataaattattatttaaacttacctttttaataaaaaaatgaatgctagacattatgtaggtaattcttatgcattaccaattagagatttttaggctatcttcaatctttatcggggtgaacttttccagtaatgttggtcgatttttgatttgctaattatcaaatgagattttggtcaggatatataaattggttgcttattttttggctgtatggttggattttgtgtaggctggaacctgggaggagaaaagccttaataagtg

SEQ ID NO: 9382 - DNA, 2277 bp, Citrus clementina
  Intron number 3 from transcript clementine0.9_002680m (loc us clementine0.9_002680m.g) derived from phytozome v7.0 (c hr-ID scaffold_76; pos 703383 to 705659)
tcttctttctatttattcgtaagttttcaacaccgatcataattcttccatattaaaaattaggggactagtgttacattcaatgaaatttttcagttttttgatatttactttctaacaccgaatatagcttttcgttattgaaaactaggggattggtatttggggttagattttgctaatgtcactacgggggtagccaagctgacttgtcttagaattatagtagtgacaagatgggtgaaatttactagttcgacctgaaattctacttgttcaacctagaagccgatttgcccaacttgaaaatctactaatccgacttgaaaatctattagtccaacttagaaaccttaattgccgacctgaaaatatgtttgtctaagacatgtcaaacctgctctaaacatgtcccattctttagtgaagttaagtgccatgaccttttaagccacccttaactggtacaatctgcttgcaactgttgaggaagtgagctaagatcaaggaaataactgactacggagataagtctctttaagctagaggggccatcataggttagcaaattcaactgagaactctacaaaacatcaaccacatgaccatctacttctacatgatcttcaacaacacccaaaatcccatgaacttcagcttatttttagttttatcaattcattttccttcccctatataccaattatctaatttaagtatcaggggatttacgctgaaaccctcttcgagttgtgatcagatcgacgtttgagttagtattcgtgtctttgccccctagaaaataaattcaacttttgagttcgtttttcaacatcaacaatttatgaccaaagttttatattttataaataatagacatctcaagctttctattgaactattaaaattctgagcattaaattcattagaatttcggaagttgaaataccgtttctgtaaaataatgaatttctgcagtagttccaatttggatgatttttcttattggtaaaagatattcaacgattttgaaaatttattacgcatgcattaaaaaataaagtgatttctgaatgtaatttcgactctttataaggatgagaaaattttattttaaatcccacatggttgaatagaatctctacaaagttttggaattcaaaatgtttaggatgatcaaaattttaattgtttagcaggtttgatgttttcgtgtctaagatggttggggtataaaggaatactattaagttatgactacatgatgatattgatatgaatgttattctaatgattatagtgcgtaggtgagctcatattattattgagatattgattgcttgattcaaattgagatgagtgaatttatacataaagtttaatatataaaaatgaaaatattagtgtttgtattatgaattggcattctatagttttcttattatgatatatctcattttttatttttttttcatgcgaacatatttttaagccgcgaagtttaatagagccaatttttaaacttattaaactgcatgactttatagtgtattgaaaattaactttattgttgtgcagcttaatagcgtgtcagcattaaaaaaatagggtgcctgcatatgatatgattttatatatttatagtctttttataatatagacatttttactttgttaaagtgagagtgttactaaaataccaaaaaaacacatattttaatacattgaaaattatgtttttttggtctgttagtgtattaaaatatgtgtttttttaacctagtattctcactttaaaagtgaagatactctcaccgatgaatttctttttaaaattatacttttccaaaactgttttctaagtgactttaaaaaatactttattttctataaattgtagttgaaaaactttgttaattaattgtcttataagagcattttattgatagattatttaattactgatattgaaaaaaaaaagaaaattgtgtttaaagctttagctcgttgtccgtagttattattactggtatgattaaacagctagttgtattaccattgtgtatacctatattgactattattgaagggtatagtatcctgattgattaagagtccgtttaggagagtggtgaggtagctgggctgtcaaagcccagctactaaggtatttgataacacttgtagttgagctttaacagcttagcagattttttttttcagcttatacttcatagctatagcttttattccgcaggtgctgcagcttaaaagcaa

SEQ ID NO: 9383 - DNA, 783 bp, Citrus clementina
  Intron number 1 from transcript clementine0.9_007841m (loc us clementine0.9_007841m.g) derived from phytozome v7.0 (c hr-ID scaffold_47; pos 795964 to 796746)
actctcattttttctctctctagcgaaaatcttcagtaagtctcaggtatctgctttctctcttactcttgggatctaaaattttcgatcgcattgcgcataatttttgttaactgttatgtgaattctcttcgatttatagtttttagtaataatttgtttagatgattagatctgtagacttgaagtcaatgaatttttacttcatgtataatttagtacgttttcattggaattatgtttctacgatattgatgttgtgttcgttttatttgttgtgaagatcctggagctttatactgctctactgttttgttttcattccatgtttcaattgccggattctttttttttttttttttaattttggtaaaaattactagatctattataattcattctatgtgaaaccatgtgtgacttcaagtttgtttagttgattgaaaatcttgatagtttattgcttgtttgaattatgcaatattcttttgttgttattgaaatactgtgatataattgagatattttcacattttttatgtgtgctggagaatctgcaaatcgatctgtgcttttagtatgtgaagtttaatgcaaattgtgttgtttatgatgtaatattagtagttttaactgtcatgatgagtgtttcgtgatttttaagctttgatatttgatcagattgtgtatatcattattctttgaattggtataatttatggtatcttacgtgcatttcacctctcaattgctaattttcatttatgtgaaatttcaggaaaa

SEQ ID NO: 9384 - DNA, 1231 bp, Citrus clementina
  Intron number 2 from transcript clementine0.9_028165m (loc us clementine0.9_028165m.g) derived from phytozome v7.0 (c hr-ID scaffold_108; pos 153000 to 154230)
tggatttctgagggattcttagaggaatctaataggtttggttgttagagtgcaatttatgcactagttttgcattatttacttcccttaatatcaatgttttgcacttaataatagtgatttacttgtgttttacttttgtaggtgcaattctattgattgatgataaaattgagctataagatgatgtttaaggatgattgttctcttgaagaaattatgagcgtcagaagaactttgttgataaggcgtgggcgcgtgctgtcaactgcggacctgcagttttagtttaacgtgttttgtatttttggttatttttgtaattacgaatttaatatttcagatattaggattttattttaaatagaattctaaaagagaagagagagaaagtatttaagggaggaatctattgtgaaagggggattttggattggagaaaaagaaaccctagatctaatttttctcttctctctatgaggaactaaacccatttttctggttgaaggttaatgaagctttgattcatcactactgtgagatctttcttgtgctttaattgttttattactttttgggtatttgtttattctctgaattattttcatgattatgtttgttaattaggtaattggccactatttaattatcaacttaatctattgtcaattaaaggattcatcgtatgaagaatttaatgtttgtgacaaataacatagcagagagttgtgttgtgagaataaacaatctaatttaaatgaatcatcatatgtgttgattaggatttgggtctctctggtttttcaggctgtcaattgattaaattctatgatcgtatctagggttgtctattgattagggaaataaccaacggtcgtaccttggttatcgactagttaaggagagattggctattagagggtctcagtagctataaccggtctattcatgagtaataataatctatatttgaatcaatgatcagtagtcgaatcaagctgagttaattccttcaaccagagctttctccaatttgaattacaactttaatttgcattcttgttattttaatttgatttttattattgtcaacaattcccctattttacgttttacgtttcaaaaggatttaattaattaccgatctctgtggacacgaccctgctcaatcactatacacaatttatttagagtaggaatttacttttgttggcttcgacacccatcattg

SEQ ID NO: 9385 - DNA, 2227 bp, Citrus clementina
  Intron number 2 from transcript clementine0.9_001131m (loc us clementine0.9_000828m.g) derived from phytozome v7.0 (c hr-ID scaffold_12; pos 4848292 to 4850518)
ccagaaacatttctgtaaaacaagaggtttgcttccctgaatttcaccttattgcttgtggcagacaaaattttgaattttgcagtttaaatgactttttttactgactcccatatatgtttcatagctaattgaggcagcttgatcacttttatagtatctggaatctaaaaattgatgtttggtattttatgcaaattttctttttaatatttcatgtttttttttttccttttttaaaaaaagttgtctttggtagctccattgcacgatcttttctcatttccctttgggcctcctccagtagttagtttgatttaggaaactagatggggtctaaaagttgtgttgtttgccagctgaatttcaagctgggatacattactatatccaaaagttggaaacctggagagtgtgctggatgttggaccataaaacaaaacaatacataagttattgacaatctcagtctttttgggtggtttttcaagcacaagagggttctatgtagggctgggcattgagttcagtttggccaaccgaactgaacctataattttctattcggtttggtttggttctgttataataagccactgggtttcagttttcataaaccaaatggttttcgattggtttggttcataccaaaccgaactagaaaaccgcttggtcttttaacttctaaaataaataaaatcagaaaatatataattgaaaatcttgagccctactctagcccttaatttacgactctcacagtctcactcttagtacacaaacaaaaatttttttttttttttatgttcaacacaagtgtataactaagtatatcagcccacaagaaaaccacaataaagcccacagtaaatcacaataaagcccaacatcaaatatcacaataattgaactcgcacatccacctgggagactcgaactcttcatcttaaggttagggggaacacatacaaaagctgcacaaaccaaccctagaaattcgcagttgcttcttgcctgcgtctctttgattccatcgacacttcccttcctcttattgctgcctttcttcttgagccttcactgcttgcctgccatcttctacttctgctgctgcttgcctgctgccgccgccgctttcgatcactgctgtcgatagcttgctgcctctgtcacctgcccgtggctttctgcttccttcaccttgagtgaaattttttgttttgcctattaattcttttttgctttaattatttctttttgttcaattctttttagcattctgttttgcctattaattttttggaatggattctttggctctcaagcatctgaccttagtttttgttcaataggtaccactgtccaccgagattaagaaagcacatatcataattggattttttttcggtgaaaattttgcattttagttccttttttcccattttaatccattatttattttttgttcttccttttagtccaaacaaaacaaaaccttcaaaactaactgattcggtttggtttgaatatttggtttgtattcaatttgaagtttcccaaactgattggttttggtttggttggtttggttttttcccaaaaaccaatccaaactgtacagttcccagagctagttccatgtcttatatttgggaactcagataggttaaattgataaacagtcaacccaacaggatgagtgaagaaaccatatcttccacatggctaatgatagacagtaattactaattgggctgaaaattaattttattaaaattccttgacacagagaataccaatccaaaatgattctaatacttcaattctttaggcatctaactaaaatgtgttctgttactagtttgcttcttttcagtttggtccttcagcctgttaagatctgctttattagtctttaacagtacacttctgttttaatatctgatgtgcattgaaatcttgtttgtgtcaacaatttgctgatctcctgaaattattactatttcagcttctgatttggggcacaagatagacaagatatatgccctctattaattttgtcaagttttttgtgtgctttgggtaatgatagtgtacttggttttaatggtaatattcggctgtcatttttacatctggtttccatatgtgctttagaatttcacctattgcatgggaatgatttttcttactcttatcataggaagagaattttgctattgataaa

SEQ ID NO: 9386 - DNA, 2650 bp, Citrus clementina
  Intron number 4 from transcript clementine0.9_017021m (loc us clementine0.9_017021m.g) derived from phytozome v7.0 (c hr-ID scaffold_131; pos 259195 to 261844)
ggagttagttattcattcatctcatttgttgcttgaaatctgttatttagcaggaatttatggtcaagatcatcttatgacattatagtaaaattttaactctcattgcccatgtctatgatggttgtagttaatgttatttagctttctatccactattttacattcatgctgtgttggaccctcatgataaagttttgaatggtgaactagactgcagacagaatatcacccaaataataactaccatcaggcgtaatcatgtttgaataaacttttttttcacattgttattttgtttccttggtatcatgcatcagaaattaatgaaaatatttatacaatactgctattaatctacacgaagaaagctgcaatatctttcttgttagattcataggagagttggtctaccttagctgaggcccagtgatatgcaaatttctggatcaaaaaagcatgggatcgggagccaaacctgcaaaattttgatatttgatcagtatttaacttggattccttggttcctcttaactctaccatgtcttcaaatcctaggtattacaatataactctgaaaacctgacaaacaatcgtagacgtcaacaaacattctaacattccccattgtagattataccttaatctgctatgatatcatccccaaaagtcctctggaattgtgattatttcttgctcgcatttattggttgcctttaaattatgatcatacagagagttgaatccttaaatctattgcatcattctttagtaattttctcaagtaatcctgaagatgcagacctcctcagggccttaacagtaattattagccccaagtatgaactgtgggattggcctctctcttgaaatgtaaaacttaggctctgtttcctattgaaaggaaaaggaaaatactaatctttttctttattttgtgtattttattgtcaaggaaaagtgtgaggtcaagtactttccgacaagaaaatgtttccttggaagtagtatgcaaacgaccatgaccatctcacttgcttggaccctcactggcctccttccatgagatgtgtgcactcttttagggtcctccttccatgagatgtgtgcactctttttacttcttactttctaacctgcttacttgagactaaaaatccttctttcaaattagagttttgtcaatcttccacaccgttctgcggatcaaaacacaatacagatgcaattacttcaaatacctaaaatccatacaacttacagttcctcgaaataaacatccagttccacatcctcttagaaaacatcttatttattgacctcaagctggagaatccttgcctgcgaacccttacatctactcggtcatcactatcaaccctgcaaaagtgtgctatctttctagagtggtgaaaaagaaattaatttctgatatattgataatagcatatggtaattctgagagactcagttactttccagaattagctttgatgcatatttaggaggttgcagccattttcttaaaaaaataaaataaaataaaagctaaaaaaaaataaattaaaagctaaaaaaataaaataattttttttaaaaaagtacaaaaataagaaaaacgaaaagtttcctcgtatgttttctggtttatctttttttgtttcccaggaatgctttccactctctactggcatttggacaaaacattacattcagatcttttccaaaccggcaatgccttctgatgtatttctacagcagagtttggtttgttcctaggcagcatgttacaggcttgagattacatctgaagtgagattaatggctgtaaatttagttgaagacttctataactaacacatgatctgcttgttagtgaaacttgaatggttattcttatacctgacttatgtttaggcttgatctgaagcatatggatgtacggatgttgcatgaatgggagggtgctgatttgagagagtcattagaaatccaaattgcctaggataaaaactaatgacgaactttacagattggtggatatgaatccaagattggatttatatctggcagtgatatggtaaagtgcaacagttttgtctttgcttcttgtgtgctgtatcactggtgagtgaagattctgtttcactgtatttttgcaatgaaacatatggtaatacattatgttagagaaatgcaattattgagtccctttatccaggaatgaaagcttgtgagtgcgaaagtaacttatattgtatttttcaaccacgttataaatggaataaatatcttctagtgggggcaacctttctcttgtgtttctagtatatccgactgaataaaaatacatatgtaataagggacatttacataagatgacgatggaatgctctcctatatgaataaatatatttttttttaaattatgatttaaatattgttctactgccctatgtccataatgggatgtgacatttgtggcagtttagataataagttttgatattgacttcttttttacaaaccttatactaagttgctcctacgttcatgattctttataattgatttagggaaatttaaaaaaaaaaggagagatagctagaataaggatgctgacaccgtttcttttttcagtttacagctc

SEQ ID NO: 9387 - DNA, 677 bp, Citrus clementina
  Intron number 1 from transcript clementine0.9_010963m (loc us clementine0.9_010993m.g) derived from phytozome v7.0 (c hr-ID scaffold_7; pos 5902869 to 5903545)
ctgccggggaatcgtctctgttaaatttttgcacggtaagacattttttttcaatctcttttgcgtatcctctcatttggttacatgaaaagtaagttagtggcttgtttgatccgctagacctagaattacatagaaatgatatatctctagaatataattgattttgagctttaagcatatgtttgtatgcgggtcttttgacttctcttgctccttgctcgtgaaacatgttgggtgtatttatatcccaatcaaattgatctgcgttttcagcacttttttttatggtttttgatttgaataacaaagctcgtgttctttacaagttatttttatgtactactgcttctagtaggtgttattgtattgaagttgaaccaagctccagcttctaggttccttattttttgttcactttataaacaaagaaattttatatattttttcagattctgtatttgtgattgtcatcttgcagtgaagtaacgcgaagccttgcttgtcggttctttgctttttttttggggggtgggggggggggggggggggaatggggtgggcggtgttactcaaacagcctatggcctattattgagttttactgaggtattgtcaacatggttagttgttgtggagcagggcagattgaacttgaaggtggatctgagttgcaa

SEQ ID NO: 9388 - DNA, 927 bp, Citrus clementina
  Intron number 3 from transcript clementine0.9_002167m (loc us clementine0.9_002167m.g) derived from phytozome v7.0 (c hr-ID scaffold_13; pos 3423479 to 3424405)
agcttgctagagatttgaagtcatttgaattgaaggtgaaatttattacacactgtatttgatatatggtaacctaaaattttctggctgtgacctattttcatttcattatttttcaaatttttatttccagtggtacaaatatgtaacaatgaaaattgtatccaagagacttccatatattttgttgaatgaaattgattttacattttttagctaggtcgagtaagttccactttttctctcatgccagcccatgcttcacttgctctgattgctaactttacaaactcttgcatttggtttgattatgatgttgactgtctgatgcagagtaagaaattgaagaaatcctaattagagttaaatgtataatatttaggaatattttaattaatttgtattctagtttaatttagtttcctatttagagtcttattgtttaggtattgcttatttgggtaatattcctaatttaggcataagtcttattaaaataggttttctaatcatattaggataagtcttacttagtataaataagtgtcttttgtagcttttacaagcagagaattttgagtttaataatatttcaattttcaaatctctttgtgagtatttgaacagttaattctcggtattctgtggaatcaacgagtcttaatccctaaattcgcggtattcttttgaatcaacgtgaatttagttgttcttttgttccggtattctctagaatcaacggaatattttgaacattaaacttccgctgcatcactgtctatcttgcatcacaaacttttatgttgctttgttgtctctgtttttttttgtttttgtaattcttttatttattcctttttctataatttacatctaataaatgatcttttctcatttgttactttcttttacagacaacatttgagg

SEQ ID NO: 9389 - DNA, 1767 bp, Citrus clementina
  Intron number 3 from transcript clementine0.9_020433m (loc us clementine0.9_020433m.g) derived from phytozome v7.0 (c hr-ID scaffold_13; pos 321113 to 322879)
agctcttaaagaagtacagcatagaagaaaagcaggtcagcatttacttgagtgaaacatgtttagattaattgatgtttcattttacttttgtttatgatctagtatgatgaattatggacaatttgggggcattaaatgtcttagaagtagatcccttagtttgtataatatttatctgaagccgtaatgacaggcaaaatatattttggtttgactgattagtttataaacattactagaaggaaattatcaacatagcattactataagtctgcttttagatatgaaaattcaacatgtagacattgtggttgatgacaaatatattttcaatactcaatattatagtatctgtaagctgtaggcaacttttagggttaaatttaaatctcctgttgtatctataagcactcctgaattttcctttctctctctttcatcaccattcaccattgttatgaccactattgctgtcgcctccacattataaccgtcatcagccataaaatctcaagtaccaaccataataaaatctcttgtggctctttttaacattatcaccattgttccacaatcactatctctagcaattatccttattgctatctccacaatagcatcaccggtatcctaattaccaatcttaataagaactttttttgcatatttctatgtaacaatcgctgtcaccttatggctgttattatgattatcaccattgttccacaatcactatctctaactattatctttattgctactccacagcagcacaatcgccatcactgttggactaccaccaaacaatcaccatctctccaaccaccttggctcaacaaccatcctcataattatccatgaaacttattacttttctgcttttataaataaatccttgaggtaacttagatcatcataatttagaggacttgtcagatctcagttatattattaactaatcaaatctaaattttttcagcattacattttaacacttgttaaaatgctcttttctttcccttctcttctttaagtttgtagtttatggctaacttttaagtttaatgacacaacatctcagtcatagaagacaattaatgactttatatagaatatttggactctgaatgaaaaagttccaaggtagctctaattccatgctttgccaatgatagactttatatagatattattcttaatatttatacttctattggcaggaaactaggggaatgaacctgccatgacagatttgaattcccaagcatatagctataataatattcggatgactgctccatgctagcagatggttataatattaagaataatattaacacttcttgcaaaagaactgaagcaacaaatttgccttcctagttgtttcagtttctcctttccctcgtaaaacagtggtgaaagtaaacaaatgatctcctgtagttataaagaagaaagcttcttagtgtgataacatacgtccttgtttctcaggtgattgatatggggttatgtatgctaaactgaggtctgtaagcatgtgctgatgtgacttgaacagtttgtatgatattttgcataatcaaacagacaactctatgaataacatgaaatttcatatcagttagtgtttgtagatcatagtgactattgcaaacaattgttctctcgctttagaggtcagaaaatatagttgtgatttacttcactatttttttttttcaagaaactaataataataattttttttttcagcttcctaga

SEQ ID NO: 9390 - DNA, 2343 bp, Citrus clementina
  Intron number 2 from transcript clementine0.9_003292m (loc us clementine0.9_003292m.g) derived from phytozome v7.0 (c hr-ID scaffold_27; pos 2611296 to 2613638)
tcaaaactttttgcctcttcgttttcttctgtcaggtaacttctttcacttggaaaatttctttgcatttttttgttatttttgacatatacatctacatgagtacttttttttttaaaaaaaaaaaaaaaaaacttgttgcaattctatagaaccatttcaatatgaaatttgtgagattttagatacatatgcttgcagtttagcttagatgtcaaccgagcattgacttaaaaatctattatcacaaataattttagagaaatgtatttttaatccatatttataataaagtaatctttcagttacatttaatataacttacaatcactaaaataatacaaaaataagtaataagcaagtgggtcaagtgaggctaattttatattaattgtaacttaaggagagccttataataaaggaaatgagaagaacacgagcaatcaataaatcaattaggtcttataattagaatttgacactatgagtgcgtttaaaattgagattgaacagttgtgtcttaaaagttaccgcactaaaacgtttgataaacactaactgttgtaccttacagctatgttgagataattttcacttataagatgaaaaatctattatatctttaataattttatcaaaattattatttaaaatttatatttactatatattattaaattttgtttcgttgttacaatttttttctacagcatttgtagcttaaaagttatagattcagctacagcaccttaatctcaaacagaacttataaaccacaatttaatatttaattgctgcgctatagtgttagattcacatttttctaaaaaaatgtggtatatattataaattttaaaaatatgtataagttttgtgattaatatgtttcatttattttcttgcctaggaaagtgccgtttagtattttacatagtttaatatttaattgctgctctatagtgttagattcacatttttctaaaaaaatgtggtatatattgtaaattttaaaaatatgtaaaatttttgtcattaatatgtttcatttatgttcctgcctaggaaagtgccgtttaatattttacatatgaaatattgaaaattataacattactatacccacaaattattattctaaaatttaacttcaaacatgccgcatccggacgaaaggacatattatttaggagtgagttttggatatgttttatgaactgtcgtaaattgttagctttagcaaatgtttttgaaaataaatgggtaggttaaagacttgagaatataaaaaatggcaagtaataaatatgattttatcatttaaaaattttcaataaatttataaatcaacaattttttcgtatttattataaagatcactttcataattcaacatagtccaaattaagggaaaaattatacagccagccataacttagaaatttccaatctctttgattccgagttttgagtactattttaggattcctgaaaaaatggaaaaatcatttttaataaaagaattcatccacgaccaaaaagactctatcatgattcattggtcacatattaatcacacgcattaaagcagttgttgtagattggataaaaaattttgtgccaacaagcaaatatatatatatatatatatatataaggaaaacagataaacatattgaaggataaaacatcgttatcatttgtaattaggttgttgaattaatttatatgtaggaaccttaaatgaatactcaaacaaatgaattggatagatactatctttgtcattgaaatggaatgaacagatagagagaaataataaatttacaacatttaagggtgaggggtgtcggaatcccacatagcttgattagaactcaagaatttcgtttaaggacttttgagtggactcaaatcaaaagcgatctaattaagataatatatgttatacctaaaagcaacctattattacaagaagctatgatgttgaaaaattaatattgttttggtgcttgctttgaccaaaagatttgggattatagattttttctttgaattcaattacaatagtttttgggtacaaaagtcaagaattaaggtagagaaagagaaagatctttatttgatttatatttatgagaggtgatcaagtgcgcacaatcgcgctctatatcaagttccttatatttatttctttggtacaatatagttagagaggcaagaagctaagcgagtcataaaagaagcttactcttaatacatgacatactaagcaataagaacacaaccggtatacaattaaagtacatttgcaattcacaaattcgccgttccttctgcagcttg

SEQ ID NO: 9391 - DNA, 4436 bp, Citrus clementina
  Intron number 2 from transcript clementine0.9_022188m (loc us clementine0.9_019716m.g) derived from phytozome v7.0 (c hr-ID scaffold_2; pos 6382617 to 6387052)
cccagaggcaagctctacgagttctctagttgtaggtgcgttcctcatcttcttcgtaatgttctcacagacacactaatatgagcttttatttatttatatatattgttgtctggtattcatatttcatgtatctactgcgaatctgttttaatttaaaatctggataattttgcccgtatagcattggatttatatctgtgacagccccagcaggtaagatagtactacgagtacatgagagtataaagggtctgatctttctggttccctttcttagtctttagaatcaaatattaacaggtggttttgttttgttgaatttttggcgttaattgatctttcaagagatcttgcagattcttgtactctctcagtttcacctcaatcggatctgaggttccataaatgtcagttaatgctttggggagggagagagacacgacatagagattaacaaattgtactcactagggttaactgtagttgatggaaaaattatgggtgggttaatcacttcattatacacaaattgaacagggaaaaaaaagaaaggaaaaacagaaaaacactaataatagaactaaatttctctattgcattagctgtggaactgtatatatgacataagctggtcatgtagagcagttttgaggtcagtgactgtatgcacggaaagagcgctatttattcttttcatgcaaacatttgcgtttgtagttggagaaagtcaaggtactccacagcatacatagttttgggttggatttttgtcatgtgtaccgctctctcaagtctcaactaattaattagagaaagttaaggtgctcaagtgcatattttttgttaaatttttactatttgtacctttcaatttttaattatttaagcgtaacacgaatgagaaattttaacagatgaacgaaaataaaccataaaacagcaaatatctttttgtatagttatattgataatttggtttatccatgcaattgagcaagcaaattatcacatttaacaaggtgctaacaaccaaatggtgttttatttcaggaaaacactcaagaacttttgatatatatagcagaattataccaaaagagaaaagcaaattattttagtaatcttgtagactgttatgggaatcccaactccaagatgtacttcgattctcacctacatgttaattaatgttttgcttcacctttgtttatttggaaaactaattacttctaattaaagaaatggattgcgtgcttcatggtgttccactgtcttggtctaaccttgcctttcttaatatatgatatcattaattgtaccagacacattaatacaattaattaggataaaattaaccttaatactgatcatttagctttgacaaaaaaatatctcctttggttaattttggccttaaaggttgctatagtacatttgtagctagcttccaaaccatgttcgataaaatagggcttaacatgtaaacatgagaattatgttctggaaatttgttctaaatcttttgcattttgaatatggaaatgatctttgactccctaaatattggaattcaagtggttgtgctttacaatctagcactctttaacatagagaagaatagaaattaaaatgatccattgtatctaatatattaaaattgcatgagtttcagtacggctttagaaagaattaaaaaaatgattctgatacataagaaatgcattaactaaggtagtgaaggtaggtagtttcattcaaattcctatcatttaagattcttggtgaatctttcttgtttaccttttgaggaacatgataaaagaatcacgtgagaatatcattcctacagttcttacaaggaataacttcaatttacagtaaaattagagactccaacccttcctgtgaacttgtagctttggttttcaatatgcatctatactctaggtggttggaagaagatctaatctctgttgccaagttagagtcatttgatgattagttacttcatccatgtgcttgtgacactacaaacgcttatatagaccgaagtgtttttgtttggttcttatgtcttaagaaagaatatcgcacatcgcctgagattgaattttgggttaattatataagatttgtgcaaccattatctcttaagctagctttgaagtatgagttagcctcatatgattttataaggtgaaaagatagtatgaaccttattcgtgagtcttaaaggcttctataatggtaaacattattttttaatgaatcaactctgatgggatatagaagcccacggatgagtcatttgttaatgaatcaactctgatagcgtatagaagcccacatgtgagcttcgtacattttttatattgtgaaaaaatagagaaccttattcgtgagccttaaaggcttctatagtagtaaacattatttgttagtgaatcaattctgatggtgtataaaagtccatgggtgagccatttgttaataaatcaacttgcatggcaaataaaagccaacaaatgagttttatacacttttatatcgtgaaaaaatagcgagaaccctactcatgcatgagttaactcttatagcatatggtagtccgtagggccaacttataggatcgcctctaactcatacacgtactaggctaaatctagtctaactcatactcaacgttacattatttccttagccttttttttttaatcataactcatgaatttgatttgctcatatataatatatatatatatatatatatatctgtgtgtgtgtgtgtgtgttttgacaaacaagttactgtgatgcatttactttccatttctataattaagtctttttttttggggggggggaggggaaaaaatgttgattgaagttttgagtgactagatataacttaatgtttcatggttgtaattcaagtgaggaaattaattaattaattaataactaagtttttatttgaaccttgaatatcaatgaataatggtttgacagttcatcattgtgacacttccttcttctgattatggtcattccaaagggaaatttaattagtactgattatcataacttgaagactatttttgactatcgcaatattcttgagaagggataaaactaatattatatgaatataaagatataagtaggaacttattgggatcaacttcagttagataatccttaacaatgtaatcctaaatattggatcttggaaaaaaatgaaaaagaatttaacagtttgcagtctgtctcatcattatagcaaaataattttgattgtttagataggatagcaacagagatattcttacttacaaaatcatgttgctctaactgattatatgtatattctaatttagtacaagatggtgataaggaattgtctttgattctaaaacagtttataagttaataactaatcaagtgcaggaactaagaagatgggtttgaatactataagatgcctataagttaagtctaatgagagaattttgaaaaagtagaattaatttgaaggcaacggatctgtttaccatgtccgagaaccatctcatttgagatgaatgtttagaataatttagtagatatgtcgaattactctattgtttgcctcttttaactgacatacataaaatcttttcttataaattattgtcaatatgaggtacctagcatacaatcttcctcgtaataatgcatgacggcagactgacatgagttttgatccatgtaaccatctcggtggcctggttttgtagtagaaattaaaccatccaccataccaaaaccttgttaattagatattttattcttagactgtatttggtattgttattataaaattgtagtttaaaagttagaatactaaaatatttggtaatcatttggtgttatgatttgaaactaagttggttttatctcacacttatatatatagtgatgtcattataatatttttgctatttttggtaaattctatttcatacctacagcttgttttgtgcaataggtttagcttttaaatcatactgcctcaataccaaatagggacttgtttaattatttgcattgccaaattactgattttcaagctttcaacatatttctcatcctctattaatttgatcacaactcattgtatacatattgttttctttgttgtttaattttttagaaaaaattttatgtactattctcgttatctttgatgggtaatatatttactcattaattatttcttaataaaattactgcatactaagtttggcaaaataaataaataataatttgaattatctgtgaaggtactattgaggtatgtaattatttattgtgttatatatgatcttatattttgattgttaccggtgtgattttcagtattaacaagaccatagaacgctatcagaagaaaa

SEQ ID NO: 9392 - DNA, 908 bp, Citrus clementina
  Intron number 1 from transcript clementine0.9_034850m (loc us clementine0.9_034850m.g) derived from phytozome v7.0 (c hr-ID scaffold_40; pos 1936937 to 1937844)
gagctgaacaagggaacaaggtatccagaaagcctgttttggcagtttcatgttgtttgtcagttcaacaagcatgtatctagcatttatagtactggacttcatttcttgaaatcatattgatgcaaaatacaattttaattatggttaggatttattctgtatcagagcttagtagaattacttttcagagttcaagtggggttactcaactgtgttggtttggaataacttaattctgttagtcaattagttttggctgactgctgtttatgacaaccgttataagtaaacattttacattattttcaaaagaggcttgattagtgatagtagattttttctacaactctcacaaaaaggtaattcaatccccttcctctctgttcttctcacctctctagttcttttctactcctcaacccgaatttctgctctttattctttcctcacttctacagtcttccctcctattgtacatcacggaatcatctttgttaaaacatttcaagtattgtggatttgcagcaacagtagtcccttatatgctatcctatttgttttcaattatgtttgccaggctgatgaattcagctggtaagtcaactcaatgagtgttttctgttgaaatggttatattaccaggacctataaaagtttcactttttaattttagaaacttgatgctgcaaatttctgcatttctgcagaaatagatcagcctttagatataccgatttgcatgataattcagttttgattaagttttgtttcctgactctctttatatgtatcatatttcaactgagacaatgtttttatcgtgtatcagatatattctgtggtattttaatttctggttgtgaatagcaggaattacggaaagcaatagcagaaacatactataa

SEQ ID NO: 9393 - DNA, 1687 bp, Citrus clementina
  Intron number 5 from transcript clementine0.9_029658m (loc us clementine0.9_029658m.g) derived from phytozome v7.0 (c hr-ID scaffold_106; pos 412555 to 414241)
ttatctgctattcaagagttgcgtgccataatctggtgttacctctgcaagattgtgaatgaatataatgcctctaaatttattttatacataatgctgatgctgaataatatattgtagctcctgtcatattctactttgactttttatattctgtttcatataaaaatcttattcaactttagttgttcatgagcaaatgtcacatgtataagcccaaatgatgtttaaaggtagcgcggctacctttagtttgagcttacaatggatgaaaaagaaattgaaactgatattttgctgtttttctgatttttcaaagtattttagatcctgagttttgtttggacttgatggttatagattgtgtctagatttgttaagttgtttccaacacctcgtgccaaatgaaagcacaatctttctgattcagatgtcttgttaattatgcttcattttttcgttaaagattggatggttgcatggattgatggagttggagttcaaccaataattctaattttttggacttaaaatgcctttttcttctgtataaaaactttagtaagtgctattgagttgacggaggttgaatacttacaggttgtttcacactttttaatagttttacatatatgaatttctgttttttgaattgcagaaaggaggtggaactattgatttggagccttatcttactcactcatcgacaatggagcctatcctcgctcccatggcagtggaacggacaacaactactagggctgcaacatcagttggtttgggtctgttttgagtttattttcatttatttggctatgttttgatagcgaattttgatatgtcaatataatgtgtaattgttttgggttgagctggtaattatgctggattagattggtttggttttggtgcttctctgatggaactctgctttttttagaaattttgaatgtaatatgagactacatttagtttaatttaacactgcatctagtctaattactagaagtgtggcatttggtttggtttatccgatattctccagaatttcacttgcatctggttttgttgcatatgtttgcttgcatttgatggcagtagcagactgtttggttttgtgacatttgatggcagtttggtctgttcttggtgttgatttaagattgttcctgttgtgctgatgttaattgcaggtgcttgaatcagctagggttgctggtttattcagatggttgactcaggcgttgttactggttaattcaggtggctgactcaagttgttcatttaatgttaggaagcaaactaagaattaatgaagtattcatttaactataattattgtagttattttatttcataactgaattataatctatgatacttgtgaacaaattagagaatttttatatatgaattatatatgtgtgtgtatgtacattttgctatttatataataatttaaagaatatatttcaattcccacaaaaaaaaatggctccaatttcaataattcccgccaaataattaaatttttttaatttactgccaaaatatatcttaaagaaatgttagttattcttgctagatttaacaaaaataatttgtaggattaacatttaattaaaataattaaataattttattattccaattaaatatgtcatgtttatacgtcatacaatagtc

SEQ ID NO: 9394 - DNA, 1168 bp, Citrus clementina
  Intron number 1 from transcript clementine0.9_002210m (loc us clementine0.9_002210m.g) derived from phytozome v7.0 (c hr-ID scaffold_1; pos 1306883 to 1308050 reverse strand)
ttactcttcaaggctttcaccttgcaacccccctggttagtttttacttccttatctttcattttctttctggaattctgttaatttgaacccatttttgctttttgcttttgggtacattaggagtaatatgaggagtaaatgttggcagctgtgttgaagttggaatttgctttaatttggaaacatatacatggtttcagcatttttcttgagattattatcatctgccattgttaggcattattgctggtgttgttagtggtcttgtgttagtagtagcacctgggatattaaagtaaatttgatgcttcagatagcaaaatttgcctacatttttttttttttttttgtaattggggtcaaggtgactccttggaatttcattcagttggttaggactgaatttactacttaattatggaatgctaattacaagtgagagctaattggtttaactgattaaaccgattgtgatgttacaagggatatggcgttcgattcccgttcgcatcagggttgaggaggaggggtttgtttatactgtaattttattataaatccatttaggtttctactagctttatgtctgtggatttgtcatttattaactgataaaaacttagttggttttaacacccctgcatattcatccatcaagttatggatagggaaaaaaatgaaagttttggtttgcaatttaagggcctcatgcatgtaccaagatgatgtctaaatctttttaaaaatcttgttttggtttgccatgaccaaaaaagataattcttctgcaatgttgaagtggagcttttacctataggaggatagaagggaggcattactttctctacaagtaaagaaggattttcccctcgttgtgttgggctttggttaaggaagcatataatgaagcgtggttttcttgcaagttttttttgtatatcacagcttaatttggctatttgtattttgcattgtgcatctttccactgttattaattttattcatgttcctataattatttatggattacttcgtatgctttgttgccttatgagatataatttttttatacaggtagagtttttctaaacaagaggcgtttttttttttttttttttttttttttttttttgtgtatgtgtgtttattcaagttgagctaaac

SEQ ID NO: 9395 - DNA, 2867 bp, Citrus clementina
  Intron number 1 from transcript clementine0.9_015575m (loc us clementine0.9_015575m.g) derived from phytozome v7.0 (c hr-ID scaffold_2; pos 4532918 to 4535784)
agtgaggagcatttgactctcgctatactcgacaggtacaatgttttccctctccatttagtgagcgttatggatgaatttggatccgttctcatgtaattataatccgagttatgcatatctttatatatatatatatatatatatttttttttttttgacgcatacatttaaaacagaggacagttaaaaccaacaacattagatctaaatttatttgaggttgccgttttgtcataaaacaacatgtttattctttcagaatgaagccgaggtataaccgttataaattaattacagatactctaattgaaggtttctgatcattttttaaataacggaatattctgttcctttttttcaatattctatgcattatgcaggattttgcaaccgcatgcgaatttgttctttttttttttttaaattgcgtctttcataaatgtttacaaacgatgctgtttagattttatattttcaaatttaaaaaatatgattctggaaatgagaatcgagaaaaagctttcagaagtaatattttcgttgttcaaacactaaattttaaagcttaaagcagttgaaccacactttttatgcatttttccatagtttttcaaattttaaaatttttaattggaacatttacatatatataatgcgaggaatctcttttttttttttttctatgcagaaatacttttaagtcatgccgtttaagagagtaagtttttaatgttattaaaccacataattttataattcatttaaaaataagtctattaaacctcacaatttaagagcgtgttattaagacacccgcacataagaattatagacacaccacgagcaaggcaacagccataacttgtttggattcccttttttaatagaaacaaaatacatacccacaatttatgtgagtccactaatttttggaactcgacacatcaatttttttccaaattgtgtgaagatgacgtgtccattttagtaaaaacgttctggccttttattcgtacatgcataaatgtggttccactatatatacgtgatatcactctcgtgaaaatggctttccacatatacgattccactaaataattaatttaatttgtgttctcacttgagacattttaatgattagtttacattttctttaacattattccttgaattgacctcacatgatcaagaactaatagatagacatatatagtgcttagctattgagtatttctcttgtaatgataatttatttgaaatattatagttgtatgaaggaaagaaaaatttacagctataaaatcataccaaataaaataataatgcaactacaaaattttaacaactttattacattgacatatttgaatcatataataataataataataataataataaaccacttctcttacgaaggagttcaagtagttataaagaaagttcataaaacacacacacacacacacacacatatatacacacaaaaaataaaaaaaaacttatattatatgagaaagatttcaaatcccttgtatattggaacaacctctaaattaaaaatcagtttacaaacaaaatataattttaatataataataataacacataattcaataataaattcatacaggtacgtggaaaacaacttgtatcataaaaaaaaaaaaaaaacaacgacaaaagaataattttaactatttttccatttttattctcatgcgttgtgttaaaaattcatataacacatcaaaatattaacgtgggggttcctatcaataaaaagtagctttttgagaaaacgccttcctttgcctgcctgttactggggtcacaaataatcgaagcaatttgtcattgcctataaagaaattgcaaatttgaaatttatatgagctaaaaagttggccactagaggacaagttaaattagccaactagaaaactaacctgtaacctccatgaccatttgaaaagtccatgaaaggacatttctttacttttgccaatttgcaatttgatcccacgaattggtcaccctttaatcctgcctaaattcagaaattaaaattaaacataatcacaaacgccaaaaaagacaaaaataaataaataaacaaatgagagttaagggagagttatacaggtcaaatggaattaaactgaattaaaccacttggcttttcttgagttgttctctttctctccttgaaaaaaatcttcccacgtttgtgaaactttttacaatcattatctacctgatagtctcctttggctaataattaccaatcctgatgattatttcaacttttttattcttaatcaactgatttaagtgtgcaactaggacaattaaatttctccaaaactcttatccactttaataagcagttatgttggattagctaaagaaatatggcctggactaatgaacatcgttcattttataactatctcatgtttagcacagaaaaagtcttgtgatgataaacgcaaaagttaactctcttaataatcgatattacttttaagatagtgctcagtccattaattttattaatatcgacttcccatcatcacccaaaatcatttgagatagtgccttatccaaaactatcttcctcttggtcttatacaaaaaaggtgaatccaatatctgagtagatataactcacaaaaattttatgacctatatgatattagcgtgattgaaattcgattttaaaatctcttatactatttcaaaagattctaccaatacaatcaattagtaccggcagatgatcatttgatgtagttttcttatatatatttgtttaatgcttggcagcttttggaggctatcattaccaattggagtaacta

SEQ ID NO: 9396 - DNA, 515 bp, Citrus clementina
  Intron number 3 from transcript clementine0.9_035135m (loc us clementine0.9_035135m.g) derived from phytozome v7.0 (c hr-ID scaffold_127; pos 68092 to 68606 reverse strand)
ttgcagttttacaccgtcgagaaaaagtttttgatgcagcggaagtttaatgttcaaaatattccgttgattctagagaataccgaaacaaaagaacaactaaattcacgttgattcaaaagaataccgcgaatttagggttaagactcgttgattccacagaataccaagaattaattgttcaaatactcacaaagagatttgaaaattaaaatattattaaactcaaaattctctgcctttaaaagctacaaaagatacttatttatactaagtaagacttattctaatatgattagaaaacctattttaataagacttatgcctaaattaggaatattacccaaataagcaatacctaaacaataagactctaaataggaaaccaaattaaactataatacaaattaattaaaatattcctaaatattatacatttaaatataattaggatttcttcaatttcttgctctacatcagtttttaatctaatacatcgtgtaaatttcacaaca

SEQ ID NO: 9397 - DNA, 2068 bp, Citrus clementina
  Intron number 3 from transcript clementine0.9_032388m (loc us clementine0.9_032388m.g) derived from phytozome v7.0 (c hr-ID scaffold_60; pos 844954 to 847021 reverse strand)
caggtgagtttgttttctattttactctcctcttgatttgcatttattatgaagatgtcctgtcagaaattgaaaatttcttcggcaaaacttcactgtcttgtttgtatttgtgggtggacagtagtactaactacaattattgactgttgtttatgttgtttattgctataaacattttacagtattttgatctccataaaccttgagctgttgcccagtttgtaggacgtttgcagcttgagcggttcttaacatcagtgtactaatttcagtgtatttgatagtgttgatttgtgtctcccattggctggtaaaaaggagtcacttggcttataagaagcataggtccgcacaataggctagtcttttgggttaaatacctagacatactaggctcagcttccccagcaattggtattaaagccaaaaactaatagctagaatgtggtggattggtattaaagccaaacactaatagctagaatgtggtggaacaagtcaagtgtgtcagatgaagggctggggctggtatattctctccaccacaggtggttttgccggttgttggttgagttgtgtgccacattagctagtaaagaggaatcacttggacttatactggtccctctacccaacaagcttgtcttttgagttggatacccagatgatttagggctggttccctcaacagatattgtttctgtaaatgacttccaagtctcatattacttgagcatctgggactactgaattgcaacaaaagcacacgtttggctgccatgccaaaaataccagagcttcttccatgtgactaaatccaatcttttctttttcctatgattgctcacttatttcttaataaatataaatatgtaagtgttagttatttatgtgctatagttatttagagacagcaacataagatctagatcgaagtttaatcggaatcttgtctgttcatgtttgattttatgtagaaaaagaattactaattcaaatttgacccaaaacatcaaaaatatgcatcaaaaaccagagaaatatgataaagattgaaaaacataccgtagtctccagataagaaacaagaaacatgatgacaataaaaccttcaaccgtactagtaactgagtacaactactaaaatatagctatgactcacaatacttcaactcataaacttggttaactataactcattatttcaactcgtaaagatgacttggtcaactgcaactcataaagatgactcagtctacacaaacccttgactcagttataacacaaatgttttgtcagtgaactaagccactcaaataaacaagcatgatagaatgaaaagtggagcctttggcaacaaaatccattacttcatttagattataattcaaaacatatttttcattgtacgtatttattggttggctgttggatgcccttttggaatttgtggagtgaaatagatatggcaccaatcaatcagtgagaaagcaagcttcactctcaatcatatccaattttagatctctattcactaatttccaaattctttaattcatatctcaaatgtcaaatccttcacacctgctgaaggaacaaaaagagggttatgtttatatcttggctgttccttgcctttggaattagcatgaagatatagctgatgcctggggaattaaggatttttcagtttgaactgataaaatttgaaagaatactcttaagtcacagcttattatcatttggattttgaactgatggctgcatatgagtcttggccaagtggaggtgagccagaggacacaattccagtgttactatactagcctcttaaagagactttccctgagcaaaatcaatggggccatctaatccctggtatctgtcatgcagcatcaaaatctcagatgttttatttgtgttatgtaatattctggttttagaaaatttgaatgtgagtgcatataaggatctgctataaaaggtcctctttcagcatccttcactaagactttttaaatataattttgtttttctaacgtaaaaaatacctttcatgggcagg

SEQ ID NO: 9398 - DNA, 1887 bp, Citrus clementina
  Intron number 22 from transcript clementine0.9_000165m (lo cus clementine0.9_000165m.g) derived from phytozome v7.0 ( chr-ID scaffold_4; pos 4788483 to 4790369)
gctcgtatacgggtatttccttcttttactgaaactgctgccttcttcttaggagagttatatcaataaattcttagctgaggtattaagggggatcacagtaatagtctttctaacagaaattggaaggctgacttttgttatctgacctaaccacaaaacgataaagttaggaagatgtaagatagttgctttttgccatgcttaggctagagctttccttaatttaagatgctttctgacttgtttaaaattgaacttgaggggaattacatacagaaaagggaaaaaagatgaaaaagatagaatcaatggcttcctttcaggaagttctatcaatggtttgtattcactgggttatccctctgctttgtttttatttgacacagttgactatattgcgtgttcttttagagaaatttcagactttacttttaaatttgctgtagtgtttagttctgtatttaaatctaagtgagaatgtaggatatgtacatcttgatatttcaccttaaaattctacattgtcatctacatagaagtgaacaagaatttcgtgaaaagagaaccctaggaagtcataaaatgatatatacaattgtatacagagcacctgtgcaaaataaagcaaatgatctacaggactgtataagcttagtaatagaggaatatcgaaattctttagtaataaaggcccaaagtgagagtagtaagatcatcctatcccacaaaaagttgatgtttaccttgtatcttcaactaacaagaattttgagcttaccttgtatttgtcttggggaaaaaaattattcaatgaaatagacaagaaatattttatccctttgattgcctgcttgaacattagatttacagggtgaatttacgtttatcagtttatgtaaaagagataatgatctttatgtggacacttttgctgtgatttttcattttctctcttatatttttgtttttgttgttctttttgaccattttgcttttatctttttaaaatgtttttctgacaaatgtaattttaattaaagtttatttttatttttttcagagcatgctattctttagaattttttttggccccataatttttattgagattgtctatggtcagaaagatattttcatgtttccttaaaagtggtttgattacttatgactcttttttaccttaaatatgtgatatacctattcttccattagaaggttttgttatcctgttatgttgatcttgcaagctgttgtacaatgtgttaaataattcttacatggagttaaaattcatggaaattattctgttgaaacttttggctgaagagaatcatttttggcttcttgctgctgcacagtcacattttaatttgagacactgcatgctagttggtaacaaagatattgtctgactgtatctctcttggtttaaactgctattgcaaactttaaaataatatttgtcccttttgattgattcttttttccatgctttcctttgattcagacgctaatgtttagctgctttacgtagtttccggttgttgtgaactaggatatgcctaaatgtgttagtgggcccttttgctggttgactgcccagtagctacatcatgtgtatatgcttaattcaaacttttatgggaaagtaaatcatgagcattgctagatgcagaggcatggcttaatattatatatcagtgtgcatagacatttgtaccctgggacattgaaattttggaatgattagatagactttgtatgtgctatcctaacaaaatggtgaacttctctaattgtgttccctaatgtgatgcttgctttctgccaattttattttagttgtgtgcaattaacgttgggactgatgtttctgctataggt

SEQ ID NO: 9399 - DNA, 1636 bp, Citrus clementina
  Intron number 2 from transcript clementine0.9_027260m (loc us clementine0.9_026908m.g) derived from phytozome v7.0 (c hr-ID scaffold_85; pos 222420 to 224055 reverse strand)
aaagcagtaagttgcccaattaattcatttgctcgcatcaatttgctagattgttttatgtaggtatcaattgttatgtgttaaatgtcccaaagtataagaaaccaaaagagagatgagtacaaagacatggggtgtgtattaaacagactaatttattgcgtcaaattggatattacaacctacagaatcagttaaaaaaaaatgaaatgacatgaaaaatgaaaaatgtttatggcatgttttgttggcttgctgaacatgtacatgtatttaagtgactttaaacaaacaaaacatggctttgttttgcaatttgtatcttttatttaaacttgaaaagtttaatcttgcattatgtctacagggggcgttaacacctatgttagattaattacatgcttggtaacccaaactttaattcattaaaaaaaatatttatcatttagctacgaagcttaggagtattcatgcacatgtaagaagttcatgtatctagtctctatacttttttcttgggggttaaatttcaaatagggtttaaaattttaatcttaatactttttttctgttctataaatgtgcagcaaaattcttcagcaaactgtggatgaagtcaaaagaaatccttcctaactagcacatgccgacttttatgaaacttgcatttttttctcgtctcccatggggagtagctgaacccattgaggtaatgcttaattcaatcatttcttgatggtttattaaaatatagcatatatgttttattgtcttatattctgtacctgtattttggatttggaatttctattaatagacttcactttctacccataaaatgagaatataattatacttttgtagctattttgagccacaaatataaagaatgttcaccttagaaaaaataagctccaccattttttaaataattgatagtgcaccgtgtctaagtgaatgattgagagatctttgtaattgatccagtgatctttcttcaatatttccttttggtttcttcatctcaatgaccttaagccattttttattcttgtaccttaataactgactatgtttagtttctttttgcagaagtgaagtttctaaaaagctggtgttgtattttgaccccagattgttataattgtgtctcgaagatttgataggaaattggaaagtactgcaagagtttggtactatacatttttttcttaagaatacttatttaattcattagtgataccctaagaatacttaggatgaaaaggattaatatcaattctgagcttgttagggatcttcggtaattactgttaggtgtgctatgtgctggttctgtttatttccatgttcttgctttccgtaatttctagaaaatgttgagtggttggttacagattattgttttagtgatattgacttgttagtaattggatttgaagttggatgtgatgagtacacattatggatgatctttcgtaacttcttgatgagtgggccgcatatgttgccaagttatttgtagcatacaataatcatgtaatgtatgagtatattttttattgtaaatgtccaagacttaatttgtctggcatactaattaattctatatgttacacttgtaggtgggaaaaca

SEQ ID NO: 9400 - DNA, 2374 bp, Citrus clementina
  Intron number 6 from transcript clementine0.9_000466m (loc us clementine0.9_000466m.g) derived from phytozome v7.0 (c hr-ID scaffold_78; pos 655578 to 657951)
gctattttaaattcaaaagagttgacgtgagtagttacatatatatttctttttgttcccacttcaacaagctcattgtctttattatatatatgtgagaaacattttagatgaaaaatggaattcaaagatgtcaactagaagttcagtcattacttttcattagggtagtgatgccagaaagtgacaaagctcatagttttcttcattttttcccctctattggtgatagaaagtgaaaaagctcatagttttcttcatttttctctcaattttcatttcttatcctctccttaccttttgagtgggggcagggcagcaggcggtgttgatttgtggttaggatgaaagaaatctgtgggaaaaactggagccaatgttagaactggctcgtttcacttggcaacagctattgcttaatttatgaagaatttctcattcttattttctttggatagcatggacatacattatatagaggtggattgtgattctgtgacctagaaagtagaaattaaatgattcccgacttagcagaatggacctttttctttttgttaaatcaccttccttgaagtttcagacaacatcggactcacttgagaaagttcaaggtgaaattcatgttaggcagcttggtataaataacttggtaaatgacagacttgttttgtttgtcagaagaatgaacactgtatttattccattgatttgtaattgtggctgggtttaagcttttgttttatggttggttatagtctcaacatagcaaaccttatttatgggctatttttgcactggtctggtgcattcataccatgctgatatgtgatgtgtgcaaaaaagctcagtgatgcatgttacaccttgttgccaatgaatcttgctgtgctggtatgtaaatgtttttgtttttctctttgtactctttttctttgctttttctggcattggattccaacctatattcaactctactcttccttaaactgcttatctatattattatctttacaagcccttaatctgtacttcctaatatttttgtatgaaatcaaatatagccaccagcagagacattcttgagtattcatcagtttattagtagcttaaattttcagatatctaagattaccaaaatctctcctcggacatcactgtttttatcatgaagatgcaaattacagtgccttatcttggaagagaaagatgggttttgtgtcctgttttattgtagtaaacttatttttgtaatgctcaatggaaattttaccttggatgggaacacggttgtcacaacaaaaaagttaaatcaatcagcaataaattcttttgatttgaacaactttaggtaactatttacttggaatgaaattagtaccttttttctatgctggccatggtaatcaattccttggctgaggtgaaggattccagcctcttcggaagagaaaggtgatctatggttcaatggaactttctcatggaaatttatatgtttttaatgagggaaaagacttctattaatgatagtatgtggtttatgacacatgctaactaataagttagaagttatgtctttagtcttagcatgcatcatatttctcattagtcctggttgggggagatgaaatgagaaaatgcttgtagttttagatttttaagcttattaaaccttgaaagtctctgttgagaaacttcaatatataagtctcttgtttcatttgctgagaggagttaaaccatgataatcggaagatttcactgaaggcaataggcttttggtatctgtttaatgaacaaaaccactaaaactagagttggattctgcataatgcctaactgtaccattggtatctgtttgtggtgtgatcaggaagacttttaaaaaaaaaaaaatttggatttaaagggaaaaggatttgtgaaccgttttggggataagttagtggaaattggaaagaggaaaattaagttggaatggaaaggttttgggataagtttataaaagagtgtaaatgaaaaaggaagagagttttgctgctcgggttctatacgctgaatagcaagaaattagaaaaatgaagagaacttcattgttaaatgcacaggcttttatagactgtattatttctagtgtttccatgctgttccaaccttgtcatcaaataaaatctagacgctactcttttaacttgctatttttgttgtggtgcaataattttgattcaaatttctattatgagtaactacaaaatgtcaaacatttttaagcttgtgtggtactccttcgtctctttttttgtttttgtgtcttttcaacatgcatctaagtgctgcatatctgaatttgttgttgcagaccattgcattt

SEQ ID NO: 9401 - DNA, 707 bp, Citrus clementina
  Intron number 7 from transcript clementine0.9_010532m (loc us clementine0.9_009308m.g) derived from phytozome v7.0 (c hr-ID scaffold_79; pos 847624 to 848330)
taaggacactttggcggatagttcttccactacaggcaagtatattgcttcatttattccttattgtaggtagtatatgcaaatgttattcattctgatgattttatattctaactgtgttagttgtggaaatcaaacaatgagtacaattattgttgtgctggccttatttttgttagaattcaacctttttttttattgggggaaaatcctctttgatagggaaaagaaatcgtgttttctgatattaatagaatggctaaaactactaccttcgtgtaagtttctttctcaaagtaagtgaacaacgcctttcaagaaagaaatagaaggtgtacaatgtgcatgactgactgcatgtataaatgtttgcattatgattagagtgttgccaatcaaccagctgaagatggctggaagtacttgatcccatagcttccctagtggttttttgtgaaatgttgttgagcgactatattactaacaatagtctgactaggccagggcatttcttaacatgaccgagcataatctccagtgggcctctgcatttttcgtagtacttggagaaaaatccattttctggtctcaattaatggtttgaattttaagtaattttaagtagttaatgtgccgtgttattcttaaatttctttaatgtgatgtatacaggcaatatctttttctgacttcttcttggctgatat

SEQ ID NO: 9402 - DNA, 1444 bp, Citrus clementina
  Intron number 1 from transcript clementine0.9_002943m (loc us clementine0.9_002943m.g) derived from phytozome v7.0 (c hr-ID scaffold_3; pos 7131337 to 7132780)
gatttaagaaaccagctctggccacttcgacacaggtatgttttaatgaaataaagcttcaaatgtgtatgtaaagttctgatctttctttttaatatgctattttgtgaatgttttcaatcaaactttgtgggttggtgattatattggtaaaagtttttttttttttttaatttggatttgctaactttagagctcttgtgttttgttgtgtgatcaagaaatgaggtttgttgtttttggagcatattggcttttgatcatttgtagttttagtcttcatgggtttggtttttatagaatttttggttaatagattgggtggaaattgtttctactgagtaaatttgcaaactttctgtttggttccagattgggtggacattgttttggttgagtaaattaccaagctttctgtttggttcctgtggtaattcagggaaagaggagggaatgaagttttggatctcacaaggattcagtttcctgaaaatgtgttttcaaatttcaacttgtgtactagttaaactatgaaacttctattagctacgccattggtagaattactctctggttacggaaggctcttccactctataataaagtagtgagaaatctgagatgcagagattttattttattttcattttgaagattttgaatgtgaggaactatgatcgctttccaaatccttattgagatgccgtgtcttgagtctgagtgatagacgtgcaagagtcaaaaatgaaaatcagcagagctttttgctttctttgataatctagtcaaatgggttcctcaaataatgggagaaagtcaacatggaaagcgccatggagtagctttatttatatatatttttaataagctatggcaaaaggataccttcatttactcataacggctgtcttttgttagtaattggtctaagtctctttgtctcttgcacaagtctggctgtggaattctgttgatttttgtccaagctccctgccttcagcatatctttttcagtgggatcaatcttgaattttcagcaacaacatgcttattggttgtttctattttccatgaactacttgctgattaatattctaaacaaaagcctagtaagggacacttggtagtgtaccatcgaattctgtggaagctcagtttatatgctcttatgctattattgcgagtttagaattatacttgctccaaatggaagtcagtatgatgggtggttactattctgaagaactgttgggtgaatttcgtttatgtaacaagtaaaattgtttcctctaaaatcacgaaaccatgctgttgttacgatgaaagagagtttgtagagacactttcagtattaactgattttgccaagacagcacaaaattgttttgtaattgttctattcaagaaactaatattttgttatgcttgatcaaaagcaggtcag

SEQ ID NO: 9403 - DNA, 808 bp, Citrus clementina
  Intron number 2 from transcript clementine0.9_005257m (loc us clementine0.9_005257m.g) derived from phytozome v7.0 (c hr-ID scaffold_70; pos 191093 to 191900 reverse strand)
gtggccaataaaactggctgggaattgaaggataggtactcattcttgttctctattattattattattattattttgcatgcctagcgactacaaaacagattttagttttcatgattcaacattgtttcaattaagcagcttctatttaatacgtatatatatcatatgatatgtcgttataaaaacagtagtactataaatgaattaatatttctgcaaatgaagagacatggacgttgatacgttaaattattgtattctgaacctttgaagactatatattgatttgatgctttatgctctattaatcatattttttaaaaaatacataaataaaactttattcttagattgactcttgagctagattgctaaatactaataataacatcaatcgcaacaccaatgatattcaataccattacatatttagctaatctaattaatttcatatgtgtaataaatgatcttatcaaaaattgatctaaattctctttcaatctaatttgtcgggctatagaaagaaataatgtatcaataatgattgggaaaaaaaaaactgcagaagatattaaataaatttcgcaccctcaatttttatttggttgggtttgaattttcttattccaatcgtctctgacttgtgtgataataacatattactttggttatatgacttcaatttgatgaaatgaatattgcatagtttggattttatgcataatatggaactgactagttactacgttcacaccaactttaatttaaccacaacaatcttttcttgttatttcaatctgcagca

SEQ ID NO: 9404 - DNA, 2026 bp, Citrus clementina
  Intron number 7 from transcript clementine0.9_032196m (loc us clementine0.9_032196m.g) derived from phytozome v7.0 (c hr-ID scaffold_118; pos 417156 to 419181 reverse strand)
acctttgtttaggagagaatcaaagcgacgggtaagtttacttcccttattccccacaagatttccaatcactctatctagggtttatattggcatgattttatattgttatagatcattatgcgtgatttagaatgtgtttagggttttgatttattatgagtttagttaatcaatctttgacgtatcaagcatacaggataattctggacagcatgagtatctcgaatttaaacctatattttctgaacgtgtttgcttatgaaatttatatttctgaaactagacatgtagatcttcttgaaaaaatgttatttcattaaattcgacttcgtgttcaattttatatgtattttcgaattagaaactactgcactggaaaactacgattccagaattgcgatcggattcacaagattattggtaccaccaaatgaactcgaaaacttctgaaattttatattgaagttaatatatgtgtttagtattcccatttgtaatttcataattttctgattagtattttattttataaatatctcagaacccatcctatttggtttaggttatgtgaaaacagtttcaaatttgtcatgaaataaatagttttgaaaatgtttttaatatcggatcctcttgaaaatgttacatgggttactcatggatgtccagaatagttccatagaatattatgtcattatgagttttatactaagagttaaaattctgagaatcagacctgtacgagtatgcattagaaaatcagattcttagaataagttattgatagtcatattttgtatttgtttaaggtattgagctgtttaaggctcttagaggctttgaggtgtgtagttcaaattcttttgtcaaggtaagtaacttcattcctaatgtactggatatatatatatgattattttgatattattataagtacaaatgtttttatactacttagaagattaatggattttcataacaaaattagcttatgaaaatgttttcaaaacctaaattctttttaacaaagtattttataaatgattttaaatatgtaaattattttatgacatgactaccttttatgattttatctataaaatactttgcaagcctaaattgttgttatggacgtttatgaatccgatatgaatgttttgtgcctatgtatgatttaattatttatgactgtacgggggctacctcttgggactatatggggaccacctcttgaaggccaaagcattgcaaactgccacatataatggaaactgccatgtataagtcattatgttttggctcattgtccgtagttattctgattctgattctgatcgtataatacgatatatgtctgttctgaaccagtactaggtttctgttctgagtgtgcacacgatattgtaattctgtttctggccgggtcaccgggactataggtgacacttttgttttctatgaatgtgatatatgatttgctttcgtaagtaactatgcttttgatattctgagttacaatgaaattatgttattttatcgtgatatatcgttttatgaaatttatgaatttatgaaatatgttttactaaaaaggcttgcaatatcttcggtaacgataaaacctagtgtgttaggaatggttttacttaccgagttgacggctcacccatcgtcattactttttgctgattaagttcattttgaaatgtgtgcttagctttggagttagagatttcgtttccgtttgctatttgaataagaagaggaatacacttatgtttctatttagtttatttttgttatgaacttgtaatttggagtttgagacttttgttattgttatgttttatgagagattatttagtgttagacgtatgaatttgtggatttaattgaataagaatttgaggtatttcagtttggaatttatgagtaaggattacgatttgtaagtaacctccttcttcacgtgctctgcacgtgttaaatttggggtgttacagcttctctcttcctctctatc

SEQ ID NO: 9405 - DNA, 679 bp, Citrus clementina
  Intron number 1 from transcript clementine0.9_012324m (loc us clementine0.9_012237m.g) derived from phytozome v7.0 (c hr-ID scaffold_48; pos 1600964 to 1601642 reverse strand)
aagtatttgccgcaaggggaaaggaccagagtatgtcaatttgaaaattttctttttccttctttcggttatgggaatcaaaacgaggatatatttagaagaatattcgaaattctgattagggttttgcattgcttctccttcttgaatttctaacgtaacggacatgtgtgattggatggaaatgaccaaaatgcccttgagttctgtttggtatgataaatgatgaattgtggatggaatttggtgggaaatttttgtaattgtacttaattggatgataaacatatctaatgataaagctactctttttaccgtcacagaattgtgcattttacaaaattctattaagctgttatgaacatatcatgacttcaacaaccattttagctgagtttctaagggtattttcaggactaacatgctgaagcctcactttgaaagcacgacaacttagagtttgctaagtgcccctcttttcttggtagctgatatttactgccctcgtggacacttgacagctagtgatttcagccattctttttggaaatattcatgcccattttaatttaactgtcatctgtatttaaatgatttcactgaagaagacactttataatttgatttgaaatttcctgtgttaggttcagagacatagggattaccggcagaagataat

SEQ ID NO: 9406 - DNA, 1019 bp, Citrus clementina
  Intron number 30 from transcript clementine0.9_000232m (lo cus clementine0.9_000232m.g) derived from phytozome v7.0 ( chr-ID scaffold_36; pos 2212599 to 2213617 reverse strand)
acaattaatatattttctattgcttctggacacctgtaagtctactgttttatcttgctaattattatctctgtcagcattctatttgcacaatgtctcactgtgcactttctcttgtgggttttatttgtatttgtggttcatgttcaattttcacattacatatttgttgtatcgtaatagataaaagctacaaaatgcataagtaacctaaccttctgcgacaatgaggtaccttctgcgactagttatattataatattccatgtttcaatgtgacaatgaggtaccttcaattcaaattttgctttgctgtctattattttgtcctcattaaggtggaagccagcaacgaaagccgctgaatgttaattatttctattttttacagttacatactttttccggtcatattacttggtcttcaaatagtaccgcatagcaaagtgaagaaatacaaatatgtgcagtggttgcacagataaccttccttttgaattgcactcatcctgcaattttgatttgatttgttctttggttgtcttgaatttcatgtaatgatgaggctggtcaagggctaaacttggtgtaggaagatgcaactgcatacaacttagctaggcatcagagttagaacatgacaagctggtctttttggaaagaaaatggtgtactattttagaaatgtgctatcttctgttttccatatacagtagttggcctgtagataaaactatttcttgtgtttctttccagtcgaagaatatctattgtgagatttccatttaggaagggatttcttttgttggatgtgtctaacaataaggaaaagtccatgcaatcaacacaaatcctccaagaatacgtagattgtgtagtgcacccatccacatatcccatcccatacagccctgtcagcattatttgttcagatacttttgtattttggattcttttgttttctttcttaatcaggttttgctaaaaaaaattatgtttgatgatgtattatggcagat

SEQ ID NO: 9407 - DNA, 4689 bp, Citrus clementina
  Intron number 1 from transcript clementine0.9_035150m (loc us clementine0.9_035150m.g) derived from phytozome v7.0 (c hr-ID scaffold_29; pos 1347531 to 1352219)
tggtgagctttaacttaaatccgtttaatttttctttagcaataatgataactgtagagtgctagtactgtttttttcggaagccagaatgttagcacttaaacaagctaaccaaagcttatcttccaattagtgtgtaaaagctttagctcattgtcactatgattttgggataaagtatagcatgtcttactacggtaaagttagctaggcctttttggtcgagtgatttattagtgatcacggaggtttattgagctaactagctgcatgaagatttgattttatataaacctggcattgcaatcactgatgtaagagtgtttgatctatagcttgcttgtgtttagatagtgtcattatcagtatgcatttatgaattgatagaccgaggtccaatctaaaggttcaaacttcaaaatgctaatcatgatctcatgttctcctcggtagccttgttagttattattagagctgagttcagtttacagccttagtcaatgaaaaggaatgtgaaatgtgtagagtgatagatttattaaaaaatttgtaccatgtattttcaggcactggtgacaataaataacatccaaatgtatcggtccataatgacccctggttggaccttagggtggatgtgggctaaaaaggaagtgatttggtcaattgtgggagcccaagccactgatcaaggagactgttccaagttcaaaaataacattccccattgctgtagaagaaatcctgtgatcgtggacttgctccctggagtcccgatgaatcaacaatttatatacattgttgcaaaagtggtgaactcgcctcttggggccaagaccctgcctcagctgtttcttcatttcagctacgtgttggactttctggtacctcaaataaaacagtgagacttcccaagaatttttatatttttggtccaggacctggctacacatgcggtgctgcgaccatcatggtgcccacatcattcttctcatctaatggtcgaagaaaaacttatgctatgagtgagttactgttgttctttacagacacacacacacacacagtccttcactaatgttggacaccctcattttttttttttatacggatatgcttttaaaccataaaatttatgaaagttagtttttaattctcttaaattgcatgcttttataattcattcaaaaataactctttttaactcatagtttaaatgcgtgtcaatattaaagaaattaagggtacccacacatgagaatgattatatacatacatacctattatagtgtttgggatttaaattctttgttcaaacagcttacaagtagcttctcatttaagctaaacaattggcatatgttcttcgtaacatgcgtaacactgcacaagctcgtcctaaataactgcaggcttgttaatattttgagtcaaaaactcaaaaattttccaagtaaatccaagaaaaattagcattcatgcatggcacatgataaatggtccacagtacatagattaggccatctgatttgatttattctgttttttgaagttcctctccaatgatcttttgtctttaatctttgtttcttatctgcagtgacttggacagtgacttgcacttactcacagacactcgcatccaagaacccaaaatgttgtgtttccttgtcatctttttacaatcctatgatcactccatgtccttcttgttcttgtggttgtgggaatgaaaatagctgtgtaatgtaagtagcctatttggtttccaatatcaaattctctcctttccctggcttagtggtggctttgccaatttgtattattctgaaaactgtaatcaaaatggagccactgaaagaaatttgaaaactatgtttggaagaagagttttcataatgtttgcaggagagttttcaaaattttgaaaaatctcaggccatatgtattaaccctctaaattgttctttctcggaaaagtgtatgagccatgaaactgggtatgatgcaggaatgatcctaaactttcaagtatggcaagatcggactcaccaataagttacaatgtgccacttctgcagtgcacacaacacgtgcccgatccgggtgcactggcatgtgaaggctaactacaagaagcattggcttgcaaagattaccataaccaatttcaacaaccagagggatttcacacagtggactctcgtttttcaacatccaaatctcaaaaatgtcactaaagtttatcgctttctctataaaccactcaaattttaccaacccttgagtaagtccacataatgatcattaaatttttgtgctactaattaatacaattgcaagtgcagaatgcttcttctaacttattttcttcaaacgcagatgatacaggcatgttttatggcataaagaattacaatgacctgttgatggaagctgggccatatggttatttgcagtcagaattgatccttggaaaggacaagaacacattcacattggagaaaggacgggctttcccttcgaaagtttacgccaatggagatgaatgcatgatgctgcctcctgattcttatccatcccttccgaattctgctgatgctggccctattgcatcttctgcactggctgctgttctgcttatgatattgctagcattttggtgatttctcatagaaagaaattggaggataattctttccattctaacaaggaattatctagaataattcgcaaatctaagttccgtcattctcaatattacatcagtgtggatgcttatgataggaactggaagggtcattttaacgaatagaagtgttttatcggtcatgtaagatagattagatgctgaacagaaatttctactgaactctgaaacgaaaatgtatacacgtaaaagaactttgaacaacagactgtaagaatatgaccgcccaagcttttctgggagtaaatagtgatttatttcagaaggcagcagcagtctgcaccgtgactttccgacggatgctggaaaatctacttgtgctcaagcaccacaaatttgatggtttttgttttgagtcttcaccaatagtaaattgctgtttatccatcacaaaacaagttgacatgataaaatccgaaataggtacatcgctactactaaatggcataatgtgatggaattagatgtttgtgaatattagatggttgaagtttgactgttgagatgaacaatgaacccagagctaggatgaattttcttgagctagaaatatcaaattctgcatgactccaaacaaatattatgcttttataacatacatgtaacatattgcatgtgtctatttgtgtaacatcaacaggcaattgtctgttctgcagcgattaaaatggccagattgtcatctagaaccaagattgagttgaaaatgactcgatatgcttcagatgattcatccaataaaaaaataattccattaaataaagaaacctcggaggttgaacaatccctgtatcaatttgtcaaacctgtattgtctcttaaaaaaaagatataaaaatagagggagaagaaaacgtcaaaccagttaattcatttttaacctttttagaatgcaccatctgggtattgctgactgaaaaatttgaaaaaaattctgtgattgtctaagctgttaataagtcataatcattcccaactggagttgactattagatccagctctttgctgtaacaagtctacttgtgccgaagtcccaactggagttaacaatcaattccaattgaattatgatattaacaatcaattccaatagaattatggtatctaggtgattcctgttttatttagaggtaggtcaactcatttgtttggtggatcattctttcaataacaaaaatgctgtatctagcgaatatagccatttggatttttgcataatgaattttgtctgttggggatttatggccaaaacagttttaaaatatcctgcttgttctaaatcataccttaactaggatttgttcagaggcttgaactggcacatgcacaaaaactaaataaaatggatgagaaaatgacagcaagctaatgatacgaactacctaacaaaatcattagttaagccgcctctgaataactcttttctgctgccttgtatttgacttaaaaaatttagccatctgcattttgcacctcttgtttagcagagtttctctggcatttgtgtactttaagcatggtttcaaaaagatatgcatgtctttttgtgttaacttttgttgtcgctatgattttttctcatgcaggtgagttccaattcatgaaattccattggaaagtttgatctcatttatgttctttacttaacacttccctgcttgttccgtgttgtaaatttagtggcgtacgacacattggatccgactgggaacataacaatcaaatgggatgttgtgtcttggactccagatggttatgtggttagtatgaattgaatttgacatcttatgtactcgtttcttttattaataagggaagtattcaatgaaaaggatccttgttatttcattcatagttacagagaagacaatatggaaatgataatcatgtttggatatctctcactaaatatcagttgttacattgtagtcattagagatggaagcttaagatgataaatgtgcaggcactggtaacg

SEQ ID NO: 9408 - DNA, 1948 bp, Citrus clementina
  Intron number 4 from transcript clementine0.9_019750m (loc us clementine0.9_018246m.g) derived from phytozome v7.0 (c hr-ID scaffold_80; pos 460537 to 462484)
cgccactccaatccttaaacaggtacgtctgatcctttcccccttttaagtccttcatgacaggactaatttaatcacaaaatggaatttgttagtgttatataatataatacaggcaatctctattgtatgtatcttcatgcttacaatgatttacattctatagcaattatatgatggtctggttgttttattttttataagaaattcaaatatgtattaatgaagaagatttaaaacacatggagtaccagctgtccactaaggaaaatctggaagaacttgaattattctagtggaatttcaagattttaatagaagaactagaatttgtgaaaaaaatgaagcatgaccatttgatttcttgccatgatttcaacatcacatatattcactcaggattcatgttcattgtgctgactgaggccctatttggtattaaggttggacagctgtagcttaaagttacagtactaaagtgtttgataaagactagttgccgcggtttggaagttaaattgatttaatccaccacttgtataataaaaaatctataatatctttattacttttgttaaaattattatttaaaagtcatatttattacacataattaacttttatttcatagttgtagttttttttttccataacagcttaaaagttagagcaccttaatatcaaacatggcttaaagctttcagaggctgtgtatcttgacatgtgagatgcatattttcctctcatgcatatcatcataataaatgtaatgtatgagttcacttttcaatagctttgattaggtcaggaatgatgttataagatttcgttatggggatgagcagcatctggatgaggcattgaaaaggattttccaatatggcttggtattattctatttccttgatttcttatttcatcaaacaatttaagctatttgagagaattctgaagcataaaacctttctgtttgtcttttatgacaaactgagaatttactgcaataatcaactagttgacaccacagatttgtcgcagtggcttaagtttcctcgatgaaactttctctctgtcatgcccatttcttaaagaaaccattttcatcatcattaaacgtgggaatgccaatcctgtcggtatttgatgaagcctttgatatgcatttcaaacaaaaaatgaagaatgagaaaatatatttaaaactattttccactttctctgtttctcatgtggaaatttattcctctgaaattggttgatccaaattggatgctctggatatgagaggatcaagtttctttgagcaagaatgaccaagtcttttggtgtttgaaattgactgccatgtatctatagaagtagtgagatagtcaggattgtacctcagttcaaggatttaacataagaaaatgaatgatgatctaatgcagactctttttgaaaatgaatgcttcatttaatgagaattgctgtaattttgggtgtcacatcttattatgaggaatagctctattaatatcaatactttctgccaatagcttggtccatgttggttatgggtacaaagtagaaacttcgtggatttcatgttttgagaacaagtgtacagtacaaaaggagggacacgggtttaattaatgtgtagaattgtgtaccaactgctacatctcttacacatttcatgtcaattttcgctggttgtcctcatgctctgataatgctactcaagaaccagcctccttaatacttgatcagtatttctctttatggtgcattcaaaattcaagtatcatctttctccctttttttttttttcttgaaacaagtgcaccaattcaaaactctttcatctttctgcctttgaaatcaagcttttgtgttccaatgtcagttcttaatgctttgcattccagggtggaggaattccacggaggagtgcacctgtact

SEQ ID NO: 9409 - DNA, 651 bp, Citrus clementina; identical to SEQ ID NO: 8999
  Intron number 8 from transcript clementine0.9_010288m (loc us clementine0.9_010288m.g) derived from phytozome v7.0 (c hr-ID scaffold_3; pos 4866306 to 4866956 reverse strand)

SEQ ID NO: 9410 - DNA, 2823 bp, Citrus clementina
  Intron number 1 from transcript clementine0.9_030414m (loc us clementine0.9_030414m.g) derived from phytozome v7.0 (c hr-ID scaffold_31; pos 2033888 to 2036710)
agcatagatcataatctccctccttgtactgaaaagtgaaaacactgattctgttcctcatcatctagtttccaaactcattgaagttactttatcgtttaagccccatttcaagaaactcgtcaatgatcttattcactaaacccattaaatccatttatgaatacttaataaatgtgtcatggaatttcttataaatttattaaaaatctagaaagttctagtagctcgtcaaccactgaacattgacttaagttggcaacaccatgatcaaataagaagatgacccattcgcctcaaaaccaagggcggatccaggatttaatattaccccgggctaaattttaaaatttatattttgaagcgaacataaaaatttataagtagaaataagtatattaaataaggaggaataccaaaaactttatctctctaaatatgtactataaacaaaaataattataaaaaaagagtagaaaacaaaaaacaactcaaatatgaaattattttttaattatagaatttgacattgcaacctataataacttgtaattatataaggattaaaaaatcaattaagaaatttaaattaacatagatcaatacatgtaattacaatcaattaaaaattgcaagtaaaacttttatgcatgaagtgaagtactaaattacccgacttaataaattaaataattaaaatttatttatccttttaaattgtaaaagtatttttaatcaaaagttttaataataaactaaactcaatttagcaaaaagatatttgggtgcagttgtttctttgtcagatgctctatctctctttaaagaattagaagttgatgattcttctattaaaagctcttaaaatactcaaattttattttctacttgtcatcttagttaatataactaataaataaaatctgaaaattcacattaaaattttatgaaaatattgataattgttactatatgttatttctgtaagtacttttaagtctagtgatgatgttatattacattgacatatatattttttaattagaagctttttaaaataaattaaagcagtaataaaattttaacaccctaatgttttcaatctattcaataaatatataatttaatcattttataaaataagtcactaatttcaattgaaaataatataattgacttagggacacatttataaataaaataaaaactctattattatataaaattaatgaaaacatatgggtaattgagttagggacatatttaaatataaaatgaaaactctattgttatactaaattgatgaaaatgtaagggtagttgagttagggatatatatgaaactaaaatgaaaactctattgttttattaaattattaaaaaagtaaggggtgtaaatgatttttttaaactagaccgggctacagcccggtctagcccacgtgcaggtccgccactgctcaaaacaaaatatcacttctcaaataagccagatgattgatgtcaaagaaaaggaccacaaatcaaacaaagaaaagagtaacgtctttcaatttcagctaaatacttcacacaaacaaaaaagagtacaaggtggaaagcacttacacaacactagaggagatatttgcagtataaatgatccgaaacaaggatagggtttaacaaaagtatgttgaatgtaaagatgggttcaaatatcaaaaattattattttttattatattttagtatccacaattgtaatttaatttaggcatattttaatcattaaaaattattttcaaaaataagtttaataagtaatttagtgagtttaaataaccatatcttcttaaattatgaatgttatttggtctttaaaatgaaccaaaattaccaaaatgaccccactccccttctttacctcttattcctctgcttctttctcctccgatgatcctcatcaacgccaatggcgcaaagaaaagagaatatagtgatgttcccattcatggcacaatgccatataatccctttcctaacattatcccatcgcttggaagaaacaaacagatacaccataactttttttaacacttaacatccttttaaacctcaagaaactcaaatcatctatccctcaaaattcctccattcaccttcttgaaattcctttcaatagcacagactacgacctccctccttgcaccgaaaaacacagactctattccatatcgtctctttccaaaattccttcaagcttcatcgtcgcccaaaccccacttcaaagaatgctgcattgataatgaaacagatggaaaaggaagcatcaaagaatgaggtctgatttgcgtggaaggaagtctctgttaccatttctgtcaatgaaaaataatgtaatctcttaacgagacaattctgggaaatttcttgtagtaacgttatcttttaatgtaataggctagttagtggcaagaatttcatatttcttttattaaatatgaaataaaataagaaataccaaatccgaagagtttaaatgagcatcagcccccgacaaaatttgagaaacctcaaatacaaaaccataaatttacactcctaaatcgtacacctgaattgttagatgtcactatagcctttaaatcaattgtcctcaatttttttaattatattcaactggccctgaattctgatggcaacaaaaaacttaagctttcataagcaactatgaacaatactgacttttaatttttgaacactgatagtgtgtctgaattatttatgatatcaccccactccccttcttctccaatggcataaagaaaagagaacgtgata

SEQ ID NO: 9411 - DNA, 1866 bp, Citrus clementina
  Intron number 5 from transcript clementine0.9_006231m (loc us clementine0.9_006231m.g) derived from phytozome v7.0 (c hr-ID scaffold_87; pos 238775 to 240640 reverse strand)
tcgaagacaatagaaaggtatgtatgggattttaaaccttgatgatattataatcgatcatccatttgtatgtattggctgacaacttaaattggaggttgggccatttatttttgggtaaactgtgactctttgtactttaacccatggacattttctgtagttactgttttttaggaccatataacccatgaacagaacaggaagaagtataccattagacccttcttcttgcaccctttttgtaaaaactagcgagaactgtctgaagtaagtccaggctagcaaaaccttcagcataaatcctctctatatctatctgtcttttcccttgattttggactgatttattttgattaattattttttgagtcgctttaatcagtccaaatgtagttctatggtcacaatttactaggctcaatgctggtgatggagttagactggaagttcttaagagagaaattagagggaaaacacacagtttcagatagagaaagataagttgcaaaagaggcttatgttttgtcaaaacccatattctacttgaagaagcaaaggataaaaagtttaaaccaggaaatagtctcttgagcattgttgactatgaagccatgcccaaagtcattgaaagagctttaatagaaattgaaccaatctgattgatctctctgagaaaacttataaaacctagcagtggtctctatattagatttctgattgatcaaagaagtctcaagaatgcatttcttccacctccctctacgaagaaattgattggaagttagagatgaaagtagatagatttggatgcatagagtgtgcatggtgataatgttctggtgatggtggttgtagattgggagttgaaaacttattttctggattatgtttttatatatcagaagagttggttggcaaagataatatgtatatttgaggttgatattgagaactaacaagaatctgttttcatgtcactttgagttgtgtgggttttctttttcaaatgaaagttctgaggattttacttctttttgggtcatagtatgaagaatatcagtaagattcgcctttcttagattcacctttcttttttctttacagactgtcttaggtatttcattttgattttttattgtgttgaaggatccagttattgtggatattcttatgctgatgagggtagttgcaaattaaaaattcttataaaccaatgttgcagtgctgtttacattggacatttatgcttatgatattgttctctttttgtatttcctagatttatgttattttatttttcaggcaacgagtgagtctggagtaccccatttcaattacatagttcacacttcctcattgaaaattattatcttttcgtatctctttatgattctgcagtatagagaatgattgtaaacatttaagttctcaatgattgttgtagatttcattcaaattgtgaacccctctgttgccattagtgagattggagtccaatgttattattattattattatatatcttttcattagattgaaaagttgaattgaatattgtttctgtaatttattcttttaatgagattgtacagtcttgaatgtcaaacctgcatttggatcttttataacaaaaaatataaccttttttttttaaaaaaaagagacaaaacagtttactcctacaatcgtagggagacttcgcataaggggaagaggtgctaacctactcaagttgttggcacccaaaatgtaactttatttgcttccttccatgttttctgtaattctgagccatgtagttcttaccctccttttctattgcatactgctagaccaagtggtgtcctgctccagggtgcgagc

SEQ ID NO: 9412 - DNA, 2470 bp, Citrus clementina
  Intron number 3 from transcript clementine0.9_031915m (loc us clementine0.9_031915m.g) derived from phytozome v7.0 (c hr-ID scaffold_11; pos 183308 to 185777 reverse strand)
cttgaagaaagatttaaggagaattcagagaagctgtagacttagaggaatgctttgaaggaagcagcaagtctgtctggctttcattctcagaacatcaggcgaaaagttacttttaatttcgcatactaatatttaacactgtaaataaaattcacgcagcacttttagttaaaatttccagatactaaacgacacttttaaatttttttaggcatcaaattctaggcttcccgacttcccgacttttgtgctctcataattataaaataattttgacaaaattaataataaaagttggagaattttataatatatatctaacaaaattagtggtgggctgtcgttttgtaggcaatttcaaccgctcactcatataccaacactaggaaatagaaccgcacttcgtgcggctttaaaaaagaaattagtattatttttttattactttacacttgataaaactgataaaaaatatgaattgatttttttttaaagatgacgcagccttataaaactaatgttatttatgaaagttattttttttttaactttaaaaatatatattaatgtgtatagttaagtgtacacaaccttttcatcaataaaaattatgttcacactaatcaactctccattcttcttagtattaacaaactcccacattttacaaagcctaacccttatcatccaactatctttattattgtttaactcatgaagaaaagaatactacatgaagcacacaatgcaaaaaatttaaataagtcaaaaaataaaaacacaagaacatttctaaagaggatgttggttaaataataaaaaaaaacccaaacataacaaatcttaaatacttaatatttatatagtttgaagaagccaaaagacgctaaataaaaggttgcatgattaaatatgaaattatgacattaaaattcggtcctagtggtattggtgagggaagatgaaagaaccttccttcctatattaattaattgatgtattttaaaccactaaagtttagttgttggcttaataaaataaatgaatgtttcaaaactataattaatttattattaatagttacatattgttgaatttaaatagaaagaagaagagacatgtaatcttttataatctactaattattttctatttttaatattttgtaatgtaattattttttaatctcaaccaatatattagattatagagaatataaaaagatgagaaataataatgccacaaatcttaactacttaatatttatagagtttgaagaagtcaaaaggcactaaacaaaaggttgcataattaaatatgagattatatcattaaaattagaccctaatggcattattgtgggaagatgaaggaacattccttcctatattaattaattgatatatttaagccactaaagtttaattgttggcataataaaataaattaatgtttgaagacttataattaattattattaatggttacatattattgaatttaaatagaaagaggaagagacatataatctaataattattttttatttttaatattttgtaatgtaattatttttttaatatcaaccaatttattagataatagagaatacaagaagatgaaaaatagtgatgccacatcacctcatctagtcccaactttatatatatatatatatatatatatatatatatatatatatagattgttaatattttgtaatgtaattattttttaatctcaaccaatatattagataatagagaatataaaaagatgagaaataatgatgccacaaatcttaaatatttaatgtttatggagtttgaagaagccaaaatgcactaaacaaaagattgaataattaaatatgagatcatgacattaaaattaggctctaatggcattattgagggaagatgaaggaaccttccttcatatattaatattaattaattgatgtattttaagccactaaaatttaattgttggtataataaaataaatgaatgtttcaagacttataattaattattattaatggttatatattgttgaatttaaatagaaagaggaaaagacatgtaatcatttataatctaataattattttctattttaatattttgtaatgtaattattttttaatttcaaccaatttattagatagtagagaatatgagatgatgagaaatggtgatgccacatcacctcctcaagtcccaactttatatatatatatagaagattagggaaaaaaaacataaaaaaaaactcacacatattcctgtaatttaagagttattaatttactgggagattgtagattagtagtggtgtatattgtagactagtagtggtatatattaatctcccttatttcatattcaatgcaaattcctcctattaatttgaagttattgcggctaattttaagcatttactaggcgtgagtcagaacttataa

SEQ ID NO: 9413 - DNA, 1277 bp, Citrus clementina
  Intron number 2 from transcript clementine0.9_031181m (loc us clementine0.9_031181m.g) derived from phytozome v7.0 (c hr-ID scaffold_140; pos 225157 to 226433)
ctctccggcgcccctttccaggggacttgggcccggtccgccgctgaggacgtgttagagtgcaatttatgcactagttttgcattatttacttcccttaatatcaatgttttgcacttaataatagtgatttacttgtgttttacttttgtaggtgcaattctattgattgatgataaaattgagctataagatgatgtttaaggatgattgttctcttggagaaattatgagcgtcagaagaactttgttgataaggcgtgggcgcgtgctgtcaactgcggacctgcagttttagtttaacgtgttttgtatttttggttatttttgtaattacgaatttaatatttcagatattaggattttattttaaatagaattctaaaagagaagagagagagagtatttaaaggaggaatctattgtgaaaaagggggattttggattggagaaaaagaaaccctagatctaacttttctcttctctctatgaggaactaaacccatttttctggttgaaggttaatgaagctttgattcatcactactgtgagatctttcttgtgctttaattgttttattactttttgggtatttgtttattctctgaattattttcatgattatgtttgttaattaggcaattggccactatttaattatcaacttaatctattgtcaattaaaggattcatcgtatgaagaatttaatgtttgtgacaaataacatagcagagagttgtgttgtgagaataaacaatctaatttaaatgaatcatcatatgtgttgattaggatttgggtctctctggtttttcaggctgtcaattgattaaattctatgatcgtatctagggttgtctattgattagggaaataaccaacggtcgtaccttggttatcgactagttaaggagagattggctattagaaggtctcagtagctataaccggtctattcatgagtaataataatctatatttgaatcaatgatcagtagtcgaatcaagctgagttaattccttcaaccagagctttctccaatttgaattacaactttaatttgcattcttgttattttaatttgatttttattattgtcaacaattcccctattttacgttttacgtttcaaaaggatttaaataattaccgatctctgtggacacgaccctgctcaatcactatacacaatttatttagagtaggaatttatttttgttggcttcgacgcttctccagactacaattcggacgccgggggcgcccgattttca

SEQ ID NO: 9414 - DNA, 3091 bp, Citrus clementina
  Intron number 3 from transcript clementine0.9_021804m (loc us clementine0.9_021804m.g) derived from phytozome v7.0 (c hr-ID scaffold_77; pos 725372 to 728462)
gagaggtgattttctttgtttcttttataatttatcaatttagttgcaatcttcaaatttttttgttcgttatttttttataaggttgctttgcttttggaaatcatagatattattcctcataccttttctcgtagttgatgatgttctcccattgatatttgtttggtgtaaattccaatgaaatatttcaaaacagtttcaatatggctgctctttgtaagtctacactgtggaagcaaattatctaacatgttaagggtcttaaaatttagtgattttgggagaagttttgttggacccaaatgcaaggaattgatattgtttcatcaaactcatcctatcatctccatccccatgttttctaaaacagatagaacatgtcagatcaaacatccatatttccatggaaaagtttgagttcatagtttttttttatcctttttctgtcagtgcattcttttagcagctgtgtggacattccttggttgataatatccaattctagcgtcaaaccccagagaattagttgattctagtccatggcaatttgcaaacttaagatttcttttcccttaattcagtccctgcaacattacatttttttaaaaataaaatatgttttcgaccttatctgactttgtaattctaaccaaacagcccaagaagtggtgaattggggtttctaaaagtttcttcaataataatcacaaatcaaccattccaaccaccaaaaccaacaataatagttacaacaattgatataaagagataggggtagagaaaatgaacacagagagttttacgtggttcagtaaacttgcctacgtctatgcctccaggcgattcaaacttgaggattccacaaaccaagtcctatatcctaaggtttcaaaatgtatacgacttcaatggtgtcattgaacctttataatctagagatgatcccacctctttacctaagtgtttcccacacgtacaactttttaatcttgcaaatagaaatgattcttacaaaatcaaactacttgcaagagtgtataagcaagtaatagttcaataatgaatcaatgtatgtaataacaagtgaaagctcaagtatgcttagaatgatcatgtcttagcttggcaaaatttatgaatcgattttatagatggatcaagaaactagctattgctctctcaaaataggacattctgtgtgcaattggattgccaataactttgaagtggatagttgcttgctgatgtggcatcttactgttgaagcgatttggaagcccaaattgatcactgctaaaaaataagcagatagccatttcaaagatagaatgtaatacgtcgttaatagatggttgctaactgggaggaggatgatcactaattctaatttctcaatttttaagattttacaatttatccttaaaacttcataaaatttgagattggccaaatatcttttccagaatttcagcaatacttgtatgatttcatgatttccgaaactcttgaaattagcccatatagaagacaaacattttgataaaaacattaatttccctttttcttcaagcatagaaactttataattatgaaaacaatgatagatttaaatgccataatcatgataataagttgagcttttaaatatttactcatgctcacatttactcatactagcttattagaaatgtgacaagaaagatcacctaagctactatccttgatggttgtccatgaatgctttgaacttaatctcgcatggatgatttttgtccttcaagagctagttagattgaaaaaatatgttttctattttactcgacatgtggtttgttatcatcaaaatcaagatttgtataacctttaggtcaacagacttgttgctactgtcttgcgttgtcaatttagatctagtcttcaatctccctactaggtactatgcacccttatgacccaaccaagacaaagggccataaaatccaccgtagttagattttcttaccaacaacctagatgctaatccatctcaaaatttatgtattccccagacttgaaattgccattgtaattgtttcaaattctataaaatttaccagacttctgttgtcagtgactgtatatccaacgctcttccatctatagcaaatttgggttaaaactgattaattttatatttttctttctcgaaaaagactattcttgagattttatattttattctgtctccatccagtgaggaacagaacaaagattattattattatttttttctgtgtaaatatctttctactcatttatcttgttatgggttaaatgtatgttctttgttttttatgttcttgagttaaaatgttcatataaatgctatgtggtcgtaaatctggagttgactgtttatcacattgcaatctcattatctaattgagtatatgagattatcatttcaagtaacaaataaactgtttttcttcgacggaagtgtaatttgtgaagctatttttatcatctgccaaactaaaagatacttggcagatagatgctattgtctcatgagaaactgctgctctatgtgaacataattgatcacactatctatatttgtgaatgcatctggtactgttttaatatcaacctggcagcaaagccttttcaactctggagtgacaaatatctgcatgatgtgcactctttgagaagtattgtctgatatttcagctctataactgctcttctttgataatgcatctccttgagttgtaagagtttgatgtcgtcagaaatgacatgagaaatgggatttttcaagcaaggaaaatgtgaggttgccaaatgtgaaaatatgagcttttctgttttagtttcgtgtatgtttataatataccgaataatatgaactaatcacacgagtgcttcatcataatggtgcatgtaattatattaatattgtttattatttaaaaatgagtttatgactgaaggacaaacagatttgaaaagaaaaagctcgcttattataataagctataattttttatatcatgtcactgttgtaggcacaccgcgaggcaactggaacagtatcatccag

SEQ ID NO: 9415 - DNA, 2279 bp, Citrus clementina
  Intron number 1 from transcript clementine0.9_033337m (loc us clementine0.9_033337m.g) derived from phytozome v7.0 (c hr-ID scaffold_4; pos 308072 to 310350)
cgctcaaagccaggccaagccgccactgctctgaggtaaactttctgttcataggacttgcattgcttttcataataggagatcgagcaaattcattttcatatatgttgatttttgttttgagattgtgctagcgatttccttctttttttttttggtggatttgaatttagattctcagagaaatatgtgagattgtaaatagattttaaattgattaagttgttaggtcttctaaattttgtcaatttttttcctttttctgatttttgggttggattcatggttgtttctcaaattatctctactgacatgctaaagcttaagctattaaatgttcatgtacattcatgtgcttatgtctatgctgaatgcatcttgaacgtatgaactttgcattttgatgatattattcagcagtttttttttcttttttgaggctaatattggtattttctggactgaaaagaaaaattagacgaaataatagtttctaaagaagcccactaggtgtttgatggaatgcattaaagaaaaagaattgccttaatttttattttgtggcatattctgttgaatctttcattttaatttgtaatttttgtaggttgaacctacatctttgataaagtgactacatgaaaaggtttttaattaacactttcagaagtggattgtaattgtcatgttatctatgcaacatttccggatattacctttgttatttggccccaaaactacaagggattagaatatggcaaccaacatttgtaaggtaatgtaatgtctctgtttatacctggaactcatattataagtaagccagttgatttgttttgtgtcttattattcttgtattctatattcgatatatatagttattgtaggcacttattaacttggatttggctttggatttttatatggaataaatttttattttttactctttggctttctgtttttgatgcctctataattctgttagtttcttcaatgtgggacagtgtttgtttaagaaatgagatgctgaatggtgatgctactctattgataatcaatgtgcatgctatcctaatttccaactttttttcctctttatttctcttctttaaacacctctctcttccttttgcatatacttttgacactcttttctattcagtgatacccaaaaataattgatcttatttaagtatttgaaattttatctcaagaatcataattgtactagaaattaaaaattgaatagcttttttaagcaaagttgttgatagtgttttatttagccaaaagaataatcagtgctttggaagaaagaggaaaaacattatttctgtggttgatattttctagagcatatttacaaaagcttactttcctaatatgcttttggaatctactttcatataatcaccagagagcactagtgatgattattcttaaatcaatagattccaatcttgttactctcattactttactgctgcttgcagcatgaaaatatagagaatcagagataaaaatgctctctagcttttagtggcatctcattcaaacttatgttttgatatggattgccttcttttctggcatacgagttataaatttgggagtttctctttaataaaaatatcaactcatgcttggaagctttctgtcttgttcctgcatctcagttttcagacaagtgtaaactattttctgtaactccctagtcttcactgtgcctctgggaaactcttttctaacttgtggcattaaatattctgggttcacttaatcatttaaatttagtagtttatgagttatgttatgtgtcatagaatacaagtgtggtttcttaagctatttggaatattttaattattatcgcttcactgttattgtaaagatgtttaccttaattcttcattgggtgtatcatattcatgaccccttattctcatttcaaactgcaaaataattcaaggtgacatgttaaatgaaacattcttataaagagctccactattagttggattttatttctactccttatattagcatatgaacattaagtcattaacataacatagaacttagaactttcgttatgcaatattgggcccttgagagtttcagagttctcaacccttaacaatttgtgttttagagcaggataacctgatgagtaaaaatgattgatatttttctcaaaagatatatagtgagagtaaacaatttttttttttttttggggaggtttttccagattggctctattattcttgctttgc

SEQ ID NO: 9416 - DNA, 1621 bp, Citrus clementina
  Intron number 2 from transcript clementine0.9_032622m (loc us clementine0.9_032622m.g) derived from phytozome v7.0 (c hr-ID scaffold_70; pos 1138695 to 1140315 reverse strand)
attacttgggtcttgagtgtccaaagcctttaaaggtttgtttctgaacgacaatagttttcgataatttcattagccatcttgatcaagttgtctttctttggttcttttgtgaagttttagactcctttactgttggactatgggaagtttaatatgaatatatgcaagctgaaaaatactagatacgtttatagtaggccagccgtcttaaagttccattttcaatagtgcttcatttcctgaatggttttattctgccaagcgggattggccggagaggtgattgtttggtaatgttctgctggcattacttaattttagtcatattttaatgtcttcgaatgagatgtcattaattcatttgctaaacatttatgcttttcttatttgtattctttgatttcgagtgtgtttggaattgaggttggacaattgtagcttaaaagctagagtagtaaagtgtttggtaaatactaactgttgtaatgtaaaaactatattaatatgattttttatttgtataatggagattctattatatttttaacaattttgttaaaattattatttataatttatatttactacatattattaacttttgtttcatagttacagctttttccccacagcagctgtagcttaaaaactacagcatctcaatcccaaacgcaccgtctatctgctatttgatcttggttcttatttgattaatttgtgttcatttgtttgtttcttaaaatatatgcctctttgatttaaacgcttaaaattaacctacttgtaagattttaaaagtgtgccaaggaggatatgacttcctatacaagtccattttattaggcgttgttagaataaaatatcaagtctaagcctcagaattggtgcctaaaatttcaatgtgagatcttttttcagtttcaacacgcaaatctctttttctcataacttacttgaagaatttggttcctaaaactttttaagttgagaaagatttatatcaagttcctctattttactgcatacttgatttaacctatgagaagtaggaagaaaaataaggaaaatgaagataaagacccattcaagttgtagctctgcaattaaaaaaaagagttattttacagttaaagtgaatttttttttattgcactaatttttgtagttttaaggaatcaattttttttaattataatgccgcaaaattaggtcaactatgtagatgccacagaaaatgttatcatgccttttggcagttttgaggtttggtcacttgagtttgtttatgacaatagtacagtcttttgcctattgaagaggcaggtactaatttgtagccactaattttgattgggtcaatgtttttcactagaatatatgcagatgatgatgatgattgttattctttttttttgttattgcttgcccttaaatagtttttgcgcagatgcatgatattaaataccaatgatcacaataaaaacaaatttggttagctcaatatctgcaaacttttagaaactacaagtgtttgattggttcattagtgcttacgaaaggagctaacatttgctttatttcttatcatttttccatcattttaggaaatccttcaact

SEQ ID NO: 9417 - DNA, 708 bp, Citrus clementina
  Intron number 3 from transcript clementine0.9_029674m (loc us clementine0.9_029674m.g) derived from phytozome v7.0 (c hr-ID scaffold_20; pos 502769 to 503476)
ggaattgaagttttgtctaagattactgagcttagaaagtgtagaattttgagtgtttaactttcaatactactccaaatgcccccaagattacaaatcaaacaatcaagacgctaaaagaatctaccagatcaaatcacagcaagaatgattttctgaaagagttatgacacaatcttaatacccaatcagatgaatcgaaaaagaaaagaggaagtaatagcagcaagaatagaagagttaacgtggttcagctagttctcacttgcttacatccacggggaaaccaggatcagttttattgatttgtagaagatgattacagagcgtttacagagattattacaatcaagaagctttctctcgaatcttctctcctctaaatagctcactgtctcctctctccctgttgcatcagaatcagctgtttataacagcttctttaacgaaccaagatgaatacagaaacacgtgatgagcatgtgctataaccaattcttaacgaacttgagcagctgtctaacgcacgtgtttccctcgtgcttcacttacactaaaacgacgcttaatgaagtcgttccagtgacaaaaggaattgctcaccaaaacgcaacatcaattgtcgtattgaaataacattagctgcataacgcatgatcactctgccgtttcatctctcttgatttgcttcacaacacaacagaaaga

SEQ ID NO: 9418 - DNA, 449 bp, Citrus clementina; identical to SEQ ID NO: 8960
  Intron number 5 from transcript clementine0.9_020488m (loc us clementine0.9_020488m.g) derived from phytozome v7.0 (c hr-ID scaffold_24; pos 2587140 to 2587588 reverse strand)

SEQ ID NO: 9419 - DNA, 1095 bp, Citrus clementina
  Intron number 8 from transcript clementine0.9_015107m (loc us clementine0.9_015107m.g) derived from phytozome v7.0 (c hr-ID scaffold_37; pos 1270545 to 1271639 reverse strand)
gacttctgattaaaggcattgataactggggacatgtaagtatacaagtcccaccctctcttgttttctctctgagtatgtgatattttttccccgaaaaaccaaaaaaatatggaatttttttttttttataaaaatgcatatattttaaaatcagtttcagtatctatgttaaaaataaggataacaagcatttggattggcttttcctttcctcaaaggccaaaactttctgccttggttcagttgttgtgatactgcagctctgaccgtattgtgccaatgtggcacaagtgtttgctattctgcataaagttagaactggttactgaatctttgtagatctaggcctttaatattctggcggattccgattttgactgcttcatccattggcaattgcgcatttgctattgttttataaagtttcttttctgcgtatatctcggtgttagaaattatgatttcagtgggattgaggcaatcatagggaggttccgcgagagtcttgtcttgcttacaatgtcatagaatatattggagatatgaatcatgggttatttatagtattctgaaaaatctccttatcaaatagcactgcaaaatgttgccaacaaacagctgttgtgtgtctatcatcgctgatgagttatataaccaacatttggatgatgtgtcaatgacttgactaggttataaccacaaaatgaatgacacctaattacttatgttttacatataaatggcttatacatgtaatgacatttctacttcacctgtttctctaggatatgccagggagaagagtgcctctacaactgttaggaattacctaaacttccctagaattatacttattctcccaaatcaaaaccctcacaggtatccatgggagagccatcgactttgacgcacaaaaagccccattatatgctggcctagttttttctcatgtgcttatcatacagattttctttatgcaagtcgctattatatgtcgctgatatcaattgatttgtttatgcacatatccatgtgtggtatgcacattgcttaatgtcaggtaggaggcttgcttggtggagctgcaatttc

SEQ ID NO: 9420 - DNA, 887 bp, Citrus clementina
  Intron number 2 from transcript clementine0.9_008957m (loc us clementine0.9_008957m.g) derived from phytozome v7.0 (c hr-ID scaffold_3; pos 6267996 to 6268882)
tttctccctccgaagagtacgacgacgtcgttaaggtttgtttagtttattaatttcttgaagaaagtgaaggagaccaatgtctcagctttctcagtggatctctgccacactcagcgtagtacttctttctgttacagtgcttttagtagtatacactctacaggtcaggaaggaaaccaacacagcgcaggggtttgcttttttcttttgtcttcttccaataaaaaacttttatcttgcactgcttaaggtgtctcatcaacaaaggctgattttcttcaccacttacacaacatacgaagaagaagaaatcaaaatctaggctgctaccttttttctgggttggttcaagcttgactaattacactaatttatttgactgacctagctagctactacatgttaagtatatttaaggcaagaaatgagctggagctggtgtaaacagccttacgttacctgtatgttttcatgcaaagaattttttttactaggagtaaaaagtggagtgtgaaattgggtaacgaggcaaatcaagctgggaatagtcttgtcaagtgtcatgtttctctgtcatctaatgtgactttcccttggtgcatgatcatatccttccgtcaaacttaaacaacctggcctttagtcctcattattaactttaagctaaaacactagtagcaggaagaagctacactggttgatatttttatgttacatcagttgcttaacatggcaatctcctgagaaaaagttgaattttgacgaaagcattattacaccttatataacaccttaattaatacttgtagatgtgacaacactcctgacttaaaattggaatgcatgcagtattttcgttgccacaacagcatccagcctctatt

SEQ ID NO: 9421 - DNA, 2864 bp, Citrus clementina
  Intron number 1 from transcript clementine0.9_017431m (loc us clementine0.9_013796m.g) derived from phytozome v7.0 (c hr-ID scaffold_49; pos 1605386 to 1608249 reverse strand)
ttgcattctcgggattttctggtaagattccgaattcaatagacaatcttaaatcattatctcacttgtatttgccacgctgctacttttctggaaaaatccccccttcacttggtaatcttaccaagctcgctcatttgttcctttggggtaatggattttcgggagagttgcctacttccattggaaatctagcttctttggaaattctagctatcagttcatgcaatttctcaggtgaagttccagcttcgtcacttcgtaatctaacccagcttacatggaataaagtataaatttaatccaatacggttgcgtttatttctcgaattgaattgaaaatcttgaggattgaaattctaggattggaagtgtggagtgaaagttagatgggattgtttatttacattgaaatgagagtgtagaatggaaattagaattctatttataaatttattttgtctttaattataagttgtttcaaattataattttatccttaaaaaaaattaattgagcctcttatacatgagaattttgtaaaacttctctttttttttattaatatattttcagatttatataaaataaactatttattttttattaattttaactatacaaattaataatatttattaatattctgaattatgtaaatcactattttttattaattttaattatgtaaattaaaaattattgataagagcaacaaaaattattattaataaaatagtacaaaattaatattttctaagaataaactatttattatttattattggcattaaataaatataatactattaaaattaaataaatatatagtaatattattaattctctatgaatataataatattattttaaaacaattttaacttagatgaaataaattattatttttaactaaatataataatattatatctaaataagcttaatattattatttttaataattgggacaaataatttttcatccctaagttctcgttcattgtcttggatcgctgatctaaagaaactcactattttagaccttgtgttaagatagtcaaattgattagtcacgtgctagttaatatagttagttaaatagaatctgttatacatgatgacatggctgcttatgtggtaaattagttttagttactagctcagctgatttgcatgtaaacagaatgaagaatattccagattgtagtatataaacatgtgtaactaatcaaacgatttaatgaataagaatcaagttctttcttctctgcttctctgatttttccttttcattttcttagtaaacaaacaaactcatctttcttaatttggtatcagagccacgatctaatggctgcttttaactcaaatcaaaacacaacatcctcatttacattcacctcactagttaaacttgatagaacaaattatacaatctggaagtctcaaattctcacttcagttcgtgctaatggccttgaagattttctcgacaactcaaaactttgtccagaacaattctcatctgatggagttataaattctgattctgatgcaactgagatcactactgctgaaggagttcgagagaatccagcctttgttatctggaaacgaaaagatcagatgctgctgagctggctgatgtcctctatcagtctagagattctcagtttggtggtaaattctaaaacctcacttgaactctggattagtcttgaacaacagtttggatctgaaacctttgctaaaaaggtacatctgaaaattatgcttaacaatcttagaaaaggagctatgtccatgactgaattttttggaaaactaaagacagttactgatgaacttgctgtggctggtagttctgttagctcactagattttcttactcatttgatcagtggattaggccagccttattaccctgtggtagtatacattgaggcaaatcttgccaagatgtctgtaaatgaagcttattctatacttctgactcatgaggctaggttagaggctaatcaattgaactctagtaaagaagctaaagtgaattttgcagctaatgttgctcaaactggacagaatactaaatctggacagtataatgctaattggaacaaaaatcaaaatggtaatggtaatggaggcagaggaggttttggtagaggtttttcacaaggccaagcaagaggaaattggaataatggctggaatggagcatcacctagtaactatcaaggtagaggtggttttggttttggaaatggaaattttgcaaaacctggtggttttcacaatagtaataggagaggtagttctgatcttaactctgttggagtaatttgtcagatctgtttcaaacctaagcatactgcagctgagtgtagaaataggttcaatagagagttcatacctttcaactcatcatcaggatataactcatatcaatatccagtgccaaggcctgcatatgctaactcagcacctagagctgcttttatggctgcttttgaaggtgattttgctgatcaagggtggtacatagacagtggtgcaactcatcacctcaccaacaatctacagaatctgagtcttgcaaatgaatactcaagtaatcacttgctgcatgttggtaatggtcaagggctgcatatatcacatgttggttacactgatcttcatacatcattagactcaatcttacacttaaaagatattttgtttgttcctcattttaccaaaaatcttataagcatctcaaagctacttgaagacaacaacttaaccattgaatttgttgccaatatgtgttttattaaggaccagaagaagggagtgcatcttgctcaagggattgttag

SEQ ID NO: 9422 - DNA, 1115 bp, Citrus clementina
  Intron number 4 from transcript clementine0.9_004119m (loc us clementine0.9_002390m.g) derived from phytozome v7.0 (c hr-ID scaffold_36; pos 2152297 to 2153411 reverse strand)
actatttctggatccgctgcatcaagcttttatttgtaagcacattctgcaacttaattattatttcccacttattctttgtttttttttttaacaaatacggttggcataattcttgcatgaacccatttcgtacagtacggaattttatacactttttttttgtcctgatttactatttgggttgcgactcaggttaatttttgtccacgttcaatactcaggacgagatttggaatgtttggaaatttcgatcggaatctcgaattatctgactattttgttaaatgaagctcaaatatgggtttctagaaacatatcacaagtcagtttaaataagaatagagatatctaccatgtccttttgataaataaaaaatatttgacatgtaggttatatgaatatgacatgtcgtttagtgtatgagtgtaaactcatgtcatccgagacattcaaaatccaagttggaatttgggatacgggatcaggacacattgtcttgttacgatttacaattcaggatgattggcttggccaatctccatcgggatgtccgcttttgtaagcactaacctttaatttcccaagttttcttgttatatttatcaaattaaatgttacaaattaattttttttaagttcttttaattaaaatttcaaaacagaagagtagcactttcatccctcttagaatttatttttaccaattagatccttgttaaaattttaatatctaacttcatccgtagcattaaaataatattagaaaaaacttagtgctgaaggaaaaatattaccttttctcttacaaattgattatctgaggctcttaaaaatcaaaattaattattaattatttgttgaaaaaatcaaatataaccttcaacagtggtttttttaattttgtgttttgtgaatattttaacaccaatgatgaaatggtgtgtgagtcctaggggtaaaaacaatttttttagaaggaccaaaatgtcagtgcactgaaattgagaaattaaagtgcagcgactgcaacacataaagcatctcaaagtgtaacattaatgaatttgtgtctacaggtgacattatttctggtgcattgtgctggctgcct

SEQ ID NO: 9423 - DNA, 1944 bp, Citrus clementina
  Intron number 1 from transcript clementine0.9_012035m (loc us clementine0.9_012035m.g) derived from phytozome v7.0 (c hr-ID scaffold_2; pos 7079064 to 7081007 reverse strand)
aagagtgtgtcttcttccgaatctagagcacccaggtgattttttgttttccccccgtttgtttctctatgtgattcattgcttctttctttctgctttggtagtcaaaatgggtgttcaatgctagtagattcgtttttgtttagtttttagctggtgaaaggtggttgtttaatgggctttggacctcgttgcttataaaggtttgttatattgttgaatgaagtagacattttattgctgtagatttttttttttttttgggttaaaaattcattactaaattgcttatgtgcgagcagttgtcatgtagaagtgatgaaagagattctttacttgactaaatgatgaaagcctttcaagacttggaatttagagtccgtatatataagggtttttgtgggttggctttactagtttcatgatatattaccatctcatagggaaacagaaaaagtagtgttgcttgctcttattagagactgccatgcatgcttctgatgatcagtttgagctgaaattttgttcgaatctgccttttccctgaggatagctaaccttctagaaatatattacttacaaggagtgtgagtgaagccttgtaattcatatggttgcttcggtctttggaaggactaacttagtattaccagaatagttcgaaagacatatctcagttgtgagtttaatagaaataagaattcgggcttgtacagcatcagtactgctctctatgaagttgtaagagtttttcagcttttggttttgtgaaggtgatgtagaaaatctaactcaagtctgaaattgcagaaaagtgcaaattctggttcatttggctaactctgagaagttgacatcctatacattactatttttcttgttgaccagcatttacttggctcactccaatttgaccagaagcttgactgttgtctgtttttgtgatgcattaattttggtagaaaagtttcagactgtttattcgtagcctcttctgcatcagttacaaggtctggtgattctgtaggttttaaaaaaactgcaactaaattgctgtaacagtccttgttagttttctttatggtttaaactagacaatcttgtaatacaaactaaaatattcagggatgttgaagttagctatgggtttttagatgtaatctttcaagtatctgctctcagatttaatagtgcccggtttcacttttggttgggaaagcaatacagagaaacagtttcaggctttggggccgcctatttttgcgatttggaggactatgtgtagcacctagttttaagagcatgacttatcgaatgtcaatgtggtgatctgaagttgatctgcttgttagcaaattcttggagcaaaggaatatggttttcctcattagctatactcatttcagtgttgaatggacttatgttgtaataatcgtcgtaacttcttgttatattcttattttcctgttactgtatatggttaatgcttggtttcagagtacctttatatctcctgcttgaatgcttttaagttttgagctttgaaatattatcatcctctcatgggtgcttagtccatgacatttgctctacatttcatgtgttgaataactaatcagtgaaatgaacctcgtccatggtattggtgatgatgtcctagtacaacctagatttgccatgaagctaactcaacatagaacggagcatgctagggtcttcccattttttattaaactagatgtaacaaaagttgatcctggttattggtctatgtgctctgtatgataactctagcctggcctgcgggaattttcatctgatttctgtttttattcaatgaaatgaggatttggcttaaaaatgaaaatttgactgctgtatccactcttgttgcgtgcctaaaacaaaatacagactcatcaatagagggtgcaagttggttgg

SEQ ID NO: 9424 - DNA, 1403 bp, Citrus clementina
  Intron number 6 from transcript clementine0.9_015763m (loc us clementine0.9_015763m.g) derived from phytozome v7.0 (c hr-ID scaffold_73; pos 356914 to 358316 reverse strand)
gttggggtttttttcaggtaagctgatcattttatatttcatttatttatatatagtgttttttgatagaaaacatagaaacttgtattaagaagaaaaaagtgtacagaaagtgaacgagtccacaaataaagaaccccaaaagatcaaaaaaagtctatgcagttcaatgctgatcagatgacaaaaaaagtataggatctatatgactaaatgatctcacaacaaaaacaagctcaaaagcacagaattaagccaacaccccttacaatttagatgaatgaagaataaagaagaatcttgaaattcctttgtaatgatgcccaaagaaaagccagtaatcccactctctaccacaaaaagatgatgtcttcctcagaatcttaaaaacaatctttaatttctttaaagccaaatcacccaaaaagtggccagaactgaacatttccataacactctagtttttttacctttcccaaaagcatcaataatctctgaaagctgagaaatgctagaagctggaatcactcaagaaattctagctgcctgaagcaatgaacggcattgtgacaatgcaaaaacaaatgatctgcactttgctatttctcttgcatatgacacaccaagaaggacaagcacacattatgattccatctctgaatagcatagtttacctagagccaaggaccaaacaaaaagtggaactttactagggtctttagcattccaaatcactggataagttgatctattttcactaaggttaatatttgttaaattaaaaccttgatgagccagttttcaaactctaatctcagtgctacgactcaaaaggaaggtttatgaataataacaatactaggcactgcgatcagttgtcaaaaagaatggtagattctgctgtttcagttactttgataggaaacttttttatccaaatttttacctgccaataatgtaaaaataagtgtataacgatattataatgcaaggaaaccatgataatgtgagatgcaaagtttccataaaaaattactgttagtcatccacaggaatttttggcctaaaaaatcaatagctggagaaatggcccatgtggttgatatcttctatcaaatattcttgacttagtgaactcccttgaatgttttctctgtggaggaattatctttgtttggtctaattggtactccaaagatctcagagaatttaacatatcgctcattttctagtttagggaagtgaaaaagagtagtgcttttagcacttttatttgatagaaaactgaaaaaaggtttagtaacagcaggagaccatctgttcttgttactgatcctaattctggtagtttaacaaacatcttttccagtgcagttgcttgtaccttcggctcttataccaac

SEQ ID NO: 9425 - DNA, 746 bp, Citrus clementina
  Intron number 3 from transcript clementine0.9_006308m (loc us clementine0.9_006308m.g) derived from phytozome v7.0 (c hr-ID scaffold_10; pos 4069307 to 4070052)
agactagtggaactgttgtttcaggtactgtcaaattacctattctttagtgttagttgcctttttgtttcaatctatgagatgggtctttattatacctatggatagtttttgtctttcctgaattctgtgaaatctagaattaacattgtcacagacgaaaatcaatacaatgatcttaatttcagatgcctaacctttaattgatcaatgtgtattagtagttggttgggaataaatttgagggggatcaactggcttttcccttggagatgtagaacattgcatttttacttttcttcggagagtcgttccagaagtaatattggaaacaaactttaaactagtaactcctgccttttcaccttaacctactggagtctgagtcttttaggagtagaagtattgtactttattttatgagacattcttggtaatttttatgcaccactcagtctggacgcatgaaaaataagtaatctatatttgtgctttcctatggatttttccatcattttcataagtaggcagtacttcagcatagactatgcggtttgatccaacagtggtcaaaagtaacttttgacatgttggacttcgaacagcctatagtccatcttctctatattgtttcccaaaagtgattaaatcttccatcttctctgtattttatactatatcatctttttttttggcccttatgtgcttcaggatcagtggacaagattgagcgtgttatactatcc

SEQ ID NO: 9426 - DNA, 2989 bp, Citrus clementina
  Intron number 1 from transcript clementine0.9_004993m (loc us clementine0.9_004993m.g) derived from phytozome v7.0 (c hr-ID scaffold_12; pos 269802 to 272790)
attgaccgttgattcagtctaaattccaaatccaggtctattatttacttctatattttgtgcttctggtggattttttaaaaattaatttgattaattggcttcactgagaaaaatgctggaatattgtgtgttatttaactgaagatagcattttcgttttttttttataattagttcaattactaggttttaatcattttgatactcgcataattgttgtcttcaacttttgtttaggtttaatttgattgttgtgattatgagatttgtagctcaaattctgtgtgcttactgagaagatgctggaaaatggcctgaattagagcctgaatctttgtttgttcatttgttgttttattattttttaaagcctagttagttatataatgacatatgattttattttcatggattgtttactgtcgatttttctcattttctttccatgtattagattctgagctttggggtatgtatgttctgtttggtttcctagaaaacaaggtaaaagaaacttttgcagccatttgtttagtaggatattacatatgtagacatgagatactgttagcatatttagtgtcggcatcttattgtaaatcattgaagaatttggatcacttttgcatgaagcaagaagaaacacctgtgctttacttgtggagaataaggttccattattagaagactccatccgttataagtagatttggcatttattgcactctttattagggtttgacatgtaacatataaaggaggagtttcactcattgaatttaacattgtatattctgtgaacttgtgattaagatttctatgtattcttgagtggagaagtattttaggtttgcgtcattcaaccttccaatgtctatctgaacttatgattaacatcttagggagaagtactttaattgtgcctattctctaaactctattgcgattatgatcttagagagaagcattttaggtttgcatctattctctaaactctattgtgattaagatcttcaggaaaattatttcatgtttgcttgtgttgaagagatggaagacttgagtcttcaaccttccattgtttattttctaaactcgtattgtgattaagattttcgggagaagtattttaggtttgcttgtgttgaagggatttcaaggaagcagtagacgatttgcaacgattgaaggagttcaagttgcagcagacattgaagtcaagtggtgattgctaagcaagttcattgggtttggtttcaccaaggggaccaatactcttaattgaataagtccaagaggttgtaatctttattacttagtgaattaattaaaatttaggcatgggtcgttgtgggtgtgtccccgtccaaggacttaggtagtcgttgtgggtggggccctgtccgtcaggggtgggcaaactcaggtttagataaacccaattgggtttcgagttaatcaggttgggaaaaagtcatctgaactcaacctgagtttttgttctgatccaagccgaacatgaatttaggtttaattcggattggagtgggttagggttagatatagatatagaaatacaatacatagaacaatatcgggtttagatgtcttgctaattccgaagtcaagtttatttaaattcaaacaataaaccccattttacaattaatttcaaaattttgaaattaattatttaatataatatagtcatataccatgaaaaacttggtgatggtggctgtcgaggtggaacaagctgcaggctggtggagcaagcggcagcaggtagattgcatcggtgcgttgcggtagcagcaggcagcagcagttgcggtgcggcagattgctgtggcactttgtagcagcagcgatggcttgacttcgtgcagtcacgtcggttactgctggctgctgctttgcacggttgtgtcctgatttctatgtgtgtgtgtgcgcacgcggcagtgcgtgcctgtggctgctcagtgtttccaacctccggggcctgagctgcatgtgtcgtgtgtctgtgtgtggtgtactggtgtgagtgctgtggtcatgtgctctgtgtgtgatactgtggtttacagatttagaattttgagttttgtttgtaactttgtgtgctgcggctctgcgtgtgtgagtgtgagttttgtttacagatttcatttcgattaggtttactggtttagttaattttatagttttgttttagattttttttttgacccaacccaattggatcttcagattggatcatgttgtagtaaacatcactcaatcggattgcacaagtaatctgatccaatccgaacctgaacctgagatcggatcgggtttgcgtcacccctcctgtctgtggacttaggtagtgttcatgggcgtggctccatccgtaggtaattgttgtgggcatggccctgcagacgtaagaagtcctcataaatcttatgtcccctttatctttatttttattttttatttttactttcaataatttttttaactaaatttggctgagtttataaaccgatccaacagatactaatctcttatgttgtttgactcatgttgttgtttgctttcatttatgcaaggattgttaaatgttgtttaatttagtctttatgggacctggagactactgtaattctgaatcttgagattcttagtagtctgctatatctagtttcttcatataaggctttctttaatctgtttaattctgcgaaggcatttgcttaaatttctgtttagttaatgcaaaaaatttagtacaattgcattgttcactattcagttataagtttgttgttacttctcttttcttacgttcatcttttggctcatgggagtctttgctcatttggttcaccttgttgctgttatgctcaatatttagtttctgagttataattgctttttttaatctagagattaatgatgattatgtttatttttcaggttgttttaatatttc

SEQ ID NO: 9427 - DNA, 762 bp, Citrus clementina
  Intron number 1 from transcript clementine0.9_016522m (loc us clementine0.9_016522m.g) derived from phytozome v7.0 (c hr-ID scaffold_10; pos 4092417 to 4093178)
ggcgatcttgatcgtgctatctagaagaagaagtaaataatttatcttcaaatttgattttttgtttgatttttcttctttccttttgctatggttagggttccgcattagtttttgtttttaacaattaattaattgacttacaaccctaatttcaatgagatacagtatgcgtttggtagagaaattattgggttctaatgttttttttcccctgctttctgttatttttagattatgattatttgattttgcttatgatttagagaaaattatcaattctgtgtcttcttaaatacagttaaatacccaattgatcattaatgttatgtgattgagctagtttaagctcggcttgttatcgataccaggagttagagcatgagactttagtgtgtgaaatgttataattttagaaaatttaggcggtgaattcatgataataacaaaagtaccaatatttgcaatgaagagggcttatagtttagagttttgcaggaaatagtgttggggttgcttcttatgtacattgtttgtttactttggcactgttaactggtgtcccagatttgaaatttggggtttgatgaatcataattgttatgagattatggttcttaatttttttccctattggtttacaaatgatgcttttatttgctggttttcctgcttggtgtcatcaatttgttaagttactaaacttgttgtgtttgtgtttttgcagtcttctcttgcagctgctagagcagataattttta

SEQ ID NO: 9428 - DNA, 1261 bp, Citrus clementina
  Intron number 3 from transcript clementine0.9_008728m (loc us clementine0.9_008705m.g) derived from phytozome v7.0 (c hr-ID scaffold_123; pos 174196 to 175456 reverse strand)
acaagtcaaagggtgagatcaattttctcttgcaaattgtgttttgctatgataccatcatccactcagatgctttgaactatatcatgtgtttgcaatgacttttttgtccatttatctgtgtgaaatatgaggatgcagacaacttcttgcttttattaattttatctttgcttcagtagttgaataaaatttgtcaccatctgaaccatccatatcatgcacttatgtgaggaaagtagttgtaaacttctttttaatccatatcccctctcttttttaggtttaatcccaacattaatattatttaaagcttatgccattttaatctgttacttcgttaatcaaagaaagctattttcttttcttcttggcgtttcatcacttattgccaagatatattacttggttaattgaacaaagttattttcttttcttcttggtctttcatcaattattgccaggattgagaaactttaaggctgagttggtagatgaagcaaaaacctgcatcttttgaacatgtcaaccagaaggctttgctctgaatttagctagttgcaacttgcatttataaaatttagatgccaagaatatggtgagagatttctagttttatctagaagtgaaaacatgtgtagtttactgatctttgcagaattgggtgaattttcattaattgtcgcataacaaacttactgcaataagtttaggagtttgcatattctcttttctttcctgccttggttttagaaatttgatttatgttttatttcttcttgtttatgaacaaatgattcatctatttcattttcattgtgcttatatttaatggaaatcgatgcttgttcctcatgatttaagagtttcattatgggcatttacattcacctttgttttatatctattgcaatagcttgtcttgcatactaaatgtatccttgttttatattttttgtaataacttatgttgtgtaccaagtgtgcctacctaagcagacgtcttggagttcagttttcatttaatttgtcattaagttttcttcataagatgaaatgttctttgaagttattgtggttgtttaattatgcaattgtgaaattaaattagtattacaattttttgtaaatttcccattttttcttagatattcttgtagtatcttaattattttattattgtatttatttagctatttatttctttggtcattgctttccctcaggtaaaggtagaagaatcctttgttcctgcttttaa

SEQ ID NO: 9429 - DNA, 3410 bp, Citrus clementina
  Intron number 2 from transcript clementine0.9_020527m (loc us clementine0.9_020513m.g) derived from phytozome v7.0 (c hr-ID scaffold_135; pos 187383 to 190792)
aaagaaagaaggagaaacggcaacaggtatatttggtgttctcttcaatggttctaatcttttagccttattgagttttgagcttggtttgctaggaagaagttgtgccgtatatgtcttttttactatagcgtgatttcttatggtgcttaccaacgaataacaatttcttaggcaagttagtttttgtctgaatgccacttattttgtttgaatgccacttctcaagtgtgcttcataaacattataaatggttggcatttcatgcaatgtcatgcatgtgtaatccttcatgaaatgttacacatcaaaagattaggaacattttcaaaatggatataaaattttctgacaccttcaattctagtttttactatgatcagttgttaagaatatgttgaaataacatggtctcctttgaggattaggatcatctcctagattttctctctctttgtctctctcctagttttccaaatctagtgaaaaaaattggcttaattgtaaataaggtgaatgcaaaccttccaaatcattttgatgagtaaaaactctccagcagaatcatcaatccacagcttctcaatgacttgcaagtatattgtcctgacgcttctagcttccgtttcctcttgtcttcctccaattcatcaatattgataatttcaatactcgacattagcgttgcaagttcttcaacctctctatcatcaaaatttcttttaaaattgaagttccaattctaattcatactaggtggagagaaagccatgctagagaaaatcgagatattcttagaaaggaataacctgtacaagtgggggaatttcccacacaacaaagcatcactcctccatttatcgtcccagaaacgaatagccttcccattacctacttctatggcaacaaaactaagaaaagcggggtactctttagatatggccttctaggggcttctattggacccattcctaaccatgtttgcatcccatccatttggatgaattccatagttgctgcgaataaccgagtgccaaagagaggtcctctccaagggaaacctccaaagccatttttctaagagagctctatttttctttccacattgctgattcctaaaccatctctagttttaggcattgcaaccttcttcataacatgagatccatttccattttcataacctttccacaaaattcaagtttttatgtgggccttggcataaggaaatcaaattctggagaagtgatgcaaagaaagtttgctaatttttgtctttctccttcttggtgtctgatgcctaagagaagtgcagaaacttctaaccatctttttcttcgctgtttggtggcttcaaagttgtggtataagttgtgcaaagaagataattttttgaaggtcattccgggttcttgtgattctctttcttatggagtattcctttgcttttggtagaggaacaaaggctaaaactgtttggaaatgtgcagtggcagcactgttttgggtaatatgggaggaaggaaatgtttgtacttttgagaggaaaagtgctgataatgctgatgatctacgggatagagtttgtcttcttgcttcactttgggcttcaatacctttttcttcatatatctaaactgggttagggttttgagatagggagttatagctgattctagccttgtaggggtgattgggtatacttttatagagcacaaatagtgctagtatttgtttccgagtggacagctggtccacaatctgtttttaaatcttcttcattaatacatttttgagtttcttatcaaaaaaaaaaatgtaaataaagtgaaaagcactggcttgattgtcaacattaaaatccaaaactcaatcttggccgctcattaagctaggagaggctacagggaaaaaagaaaagaaaagaaggggggggaggggggagagagaggctaggagaggagccttatccctacattgatctcttgtcaagccagaaatattgtcaattcaggagttttatggatctggatgataaccttatttatcatggttaattggttcttttatctgtttgccaactaaattgttttgacaaaattagccatatactctgtggttataaattccaagggggagcaccagatataaaatctttctttctacaaactacgaaattgttaagacatttctgcaacgtaaatggtgaaggatgattaatatggcttttgcaccaattgacacatggcaagaaaaggaggagagaggaaggaaagagagggaagaggagataaattccaagggggagcaccagatataaaatctttctttctacaaactacgaaattgttaagacatttctgcaacgtaaatggtgtaggatgattaatatggcttttgcaccaattgacacatggcaagaaaaggaggagagaggaaggaaagagagggaagaggagataaagaatttaacttggagataaagaagagataatttagaaggagattgtaggaaaagcaattcaatcttcatattatttctaatcacagagctcctcaaagataagcatggggcctctctatagtggcttagtcttaatctaataagaaactagagtatgcttctaaatagctagagtaacctactctgaataactaacagaaaactcaaaccaacagcaataagtaatatatcaaattttctgagaaaataagattccaaaagccctggtatccataatccctgaaataattaatactctgaataagtaattccaataagccatataatccattggctcattctccattagtagtttatgaaataatttgaatgtgaacatgacaatgatttctgttgctctgctcatgaacctcagaacgcagaatgttttaagagtgattgaggagaaaattctcatggaggagttgtgccagaataatatatctttatgcaccaatcatccccaacttcctatttcaccatcacatgcctgttgaatagtgtgtcatttaagttattagagcgtctaaaaaatgaatgggatgaagtccctccagtctcaatatgcaaactttcattttttttttagaacttgttcattcaaggattatttagcatctatgatcttggaaactgaaacgatatacaaatattttggtaatgtaaactggttagtttaaggaacgtgctacttttctgtaatgaacttgaaattatttattattgctgttactttggtacaaatttctggtttttgctgtcatggtaatggtaggaaaaggctaatgttccttaagtttccagtttcatacaatcagcttcttcctcttttatatgtaatgcatgttaatttatcaagttacctgcagcaggctgctcttgaaaagggtaaaattgtggaaaaact

SEQ ID NO: 9430 - DNA, 2601 bp, Citrus clementina
  Intron number 35 from transcript clementine0.9_035024m (lo cus clementine0.9_035024m.g) derived from phytozome v7.0 ( chr-ID scaffold_120; pos 353762 to 356362 reverse strand)
ttgagcgttctggagctgctcaagggctgagtgaggttagaatgtgctgtttatattttacttcttccatcattatagtaacaaaactttaagtttatgatcccataattgataattccacctagttcactcaatggcttctggttttaagtcacctccattctttatatacagatttggcatttgagttaaaataaaaggaaattatcactgcaccacctctattttgctttatgttcatccaaccactataaagttctaacatgttctctgcactacctttctttttaaatttgtatcaattagttacttttgcactaacaccgttaaataatttaaacgaaatgacaattttactcccaaataaattaaaagaccattttattttataaaaactttgaaaaattataattataaaaatacccctaaatttaattaaaaaataaatcccaaaattagaatttttatttttaataaaaaattataattataaaaataattgcaaacttttgggatttaataaaaatctcctaaattattaaaattagacttttgggatttatttttaattaaatttaggcgtatttttataattataatttttttatttttcaaagcttttataagataaaatggtcttttaatttatttagggtaaaattgtcatttcatttaaattatttaacggtattagtgcaaaagtggctaattgatacaaatttaaaaagaaaggtggtgcagagaacatgttagaattttgtggtggttggatgaatataaggcaaaacagaggtggtgcagtgataatttccctaaaataaatgaaaatttactcacatttgttatattacatagatagtaaatctcattggcgatgttcacttttgctcatctctttttgtgctaaaagtgcttggatagtagtttttacacacacacgctgatagattgtagcattatgtggaaacaatttcttagcttcttgttattgattgagaagaaattataccttgatcaggaagcacgttaagttttccatttatttggactgcccctacaattaattattcactttcacaatactcattattattgccttttatttagtaatatctatcgaaggttgacatttatgcaataataacttaccatttgagggtatattttcatatgctctttctgccccatgtagttttccccattctttaattattttttcctgtgacttttatatttaatttttttgttattattcctgtttaagagcaacgggctatattagtttcgtcgttgcattaacaaatggggatgtcaacaaatttgcaagctgtaatctattattatttattcatttgtggtagaaaacaaagtatgactatatgtataaagaatagaaatttagagaagtgacaagctgtcaacagaaataaagacaagctatcaaaaaagtaagaggactctgaaaagtccttacaaatcattgtgactcagattaaaaatttatagcagtaacagtcccttggtcccaaattactgcaaaccaacctctctccagcaccccacttcctttgctctttttaatgccattgatgcttcccgactgccatcaacaaagaaaaatgaaacactgtgaaactctagttggtactgatcatgagtagtacaactcttctgtagtaatatcccaaaagatttcatcccaagtgatgtgacattcatccattcatattaggatggtaataagtaatttaatcagttatgaaaatcttttaccattctattgatgattgtcgcaccctttgggatggaatctattggttattacttcagaagtgtagtattgtggtactaactatacttcagaagtgcagtattatggtactacgttcatggcggtgacataattgtattttattatgaaaattatatggctatatttcaatgtttttcttttttgttgttaacatgtgtatgtcttaacattatttttatgcaatatctagcacactgcagaagaaaaagatttggtaatattgcatataattttcagaatacattcttatgggagagggtttcggggctaaaggttttaagggctggtccagccttgtacaagggtggatggatatactttttacagtgtagtcttaacctgattttgatatacttttgtgtagctttttgttttgcttctttttgcgtttttgctttcttagtggacacaggcttcatattacagatgtactgatagctcttattaattgcatttttcagttcttattaataaaatttaaatatgtattagtaggtgtttggcagtcaacatgtcaactgaaataacaatagtacttgtaattgtgattttgtaagttatcaatttggtgctttatgtgggattggttttggcaactgatcacaagttcatttgttttgacttaaatgttttcctagtaaggtgtttcattctctttgataacaaagatgactacaaaaattttaagaatgactctttttgtaaattattaaatttggcatggttgactgaaggagatccatgtattgccaggttttagctgcacttgggactgtgtactttgagca

SEQ ID NO: 9431 - DNA, 1107 bp, Citrus clementina
  Intron number 3 from transcript clementine0.9_013970m (loc us clementine0.9_013970m.g) derived from phytozome v7.0 (c hr-ID scaffold_47; pos 709311 to 710417)
agcagtttagacaagctgctttccaggtattctttgggtattttttgaaactttgattcaattagaagcgatctactttgacctcctttgtaaagaaattgaaggattgtcattgttgcacttaagacacactactggttcttcttcttctgttatcagtaggatttgaattttggatctaatcacttggtaataacatgttgcatgaccatggctgctaatgactggttttagaagacacaatgttgcatttttcatatgtttcatgttgttttgattgtttcttttgcagttttgaatgttctgtgaatttcacatccataatctgtactattgagaagtttatcagtaatttgatcaggaacatggaagtagttggcatttgagtggtgatttattttttccattcaatgctttccttccttagaaagaaaataattttttgctgtcgctggttctgaatttttaacatcagttggtgttcaatctcttctgccacctataaaaagtatctcttcatccacaaccattccttttgactgttatatagggaggactgtgcactgtttcccatagaaacagagcggaaagatgtcatccaagtttgaaggtggatagtttttgtagaacagtcaaatttatatgctttgactattttaggtctatggttttcactgctatagtcacgaatatcgaatcgtacatgagcagtgtatctgtgcctgcatttgtttcctgttttgaactgtctcttctgttgggtgtgggcgcccttttttttttaataaataagtagcaattataatttattttatccaagcaactgagcagtagacctgcgaaatggctgtaaaagaattttcaagatactttgttatattggtgcgttaaaacatttgggatatattggtgcgttaaaacatttgcgaagatctttctgagttatttaggaaattgaatgattgatgctgtgcaaattctttagattttcacctgtggagagttgtgtcattctttgcaaggttatgtatttgtatttggacctaattttcttcttataatctaattgcaggttccattctgtcagcaacctctgagctttgatta

SEQ ID NO: 9432 - DNA, 1722 bp, Citrus clementina
  Intron number 1 from transcript clementine0.9_014344m (loc us clementine0.9_014344m.g) derived from phytozome v7.0 (c hr-ID scaffold_70; pos 689659 to 691380)
gacagctggtttgtctactctctcattttaattctctgtaattttgttttttaattagggtaaaaattcatgggctaataatacaatctctctcactaaaccttcagatccaatcacgcatgtcttctaagtcttaaatcataatcaacttcataatcaacttatttgtaaattcatttttggtcatcggaaaagaaaaaaaaattaattataaaagagatcattaaaatgtcaaatgtatactctcaaacttataaatcattaataaatatacctgcagtcaaatcaattaaagaatggatgaaatattgttggtagtgttttaattacttgcagaggaaacgaggaaaaatgttttctttcgggagtgaaggcatgggtgtaatgtgaaaaagacaatactttttgttctatttgagagcattaattgagtgatgttctttagttcaatagaaatccttaaagaaaaaaaatacaaaaagatttccatactctaaagatttgaggaaaggatgtcaagactttttttatcataagatgctttaaaactaataattaaaaaaattgattttaaaattttttaataaatataaatataatataagtaatgtaatctgtttagaagactaacaaaattaaaatatttaaatatttaaatatttaaatatttaaatatttaaatatttaaatttttatatttattttaataatatatttatatttgttgtagagataattgggttaaatactttttagaattaaaaaaatctctcatactaataatgttaaaattattatttcacaaaatattcaaaataatttaaattttaatacaattattttaatattatgtttacatttattataaaatttagtttaatataataaaatatgtctaatagattgttaaaaatattaaaatattcttaaatattgaaattattttaaaatatatatattattaaatttattttagtattatatttctatttattataaaacattgaagtcaatttttttggttcaatagagaaaagggtatcatgataaaaaaaaagtcttagtatccgttgttgaaagctcgagaatcttcatgactattttcccaaatcatgggatgtagatgttcttttcccacaaaaatattctaactttatccatagaatttcatcaggttaaaagagtcttgtgggtgctataatcacatgcatggagagaaaatagaaatacaatctggtagggaaatcaaataaaaggcagggacctagctatatgtaaaggtactacaaactacatatctcctaatttgtgacgttgctagaattctgtaacccctggatcctaatttgtgacattgttaaaattcaatatcccatccggatgataatattaccctattttccgattttcttttttattgtcacaaagttgtatgtgacaattatcagttaagatataacataaaattctggaagaaaatgaaatcctctactcatcttgtattttaagaatttcatgacacgtacacatcatatatatagtttaaatgtattcctttattattattgtttttatcaatcaccaatcaatgtatctaaaaacgttaagccaaatgcaaaatgatgagatgaatagaggatcgggatctgaatccaattctagactgattgattaattagtcatataggtcccaattgaaagaagctattactgaaggaggag

SEQ ID NO: 9433 - DNA, 2306 bp, Citrus clementina
  Intron number 10 from transcript clementine0.9_002825m (lo cus clementine0.9_002825m.g) derived from phytozome v7.0 ( chr-ID scaffold_10; pos 5526937 to 5529242)
acttgttgagcaaaatagagccatacgtccaccaggtaaaacagtgccttactctctctctatatatatatatatatgaataaaagctaagaagattgtattgaaagaagaaagatttactaaaggcgaacaaattttcctctagccccgaaaacaactccaaggttttacaattaagagaacatcttgaaaagaaactatcttgagaggcgtaaacaaagtttctatccagggctcgctttattttcaatcagtttaatatattgtagatggggatactcagtggaattgttgggagtaaatcattaacaagccctgaatttattgtttgcatgatataatattaattcagataaagtgacatcatctagaaaaccatcttgaaggttcctttcctttctgactacctagttccttttctttttccctcaaaatttcaaactaattgttgcagactcctttcttgtcatccagcaatggaggtgtctgacatgctttgtattgtgtgtggctcatttactgatggcatatgggatatacgcttaagattatctgaagtgcacaataagatttggagctggtgtacttataattttattctaaataggaacctacatatgtaatagttcacaccctgtatgcagggtattaactatttagcactagatttatttcagatagggtgggaacctttgcttttaatcttcccccgctaaataggatgcttgctttgtctaaccaactcaaatttcaatctaaaatagacttgctcctttgctcaatgtcagttctgaattttcaagtttctataaaggttttcggccatcattaccatgtcaactgtctttgcaatcgtttgcatataactttctaacactaaagatgctacagttgtgtcaatggatgaattcaaaacttttgaattaaatgttacattgggtagcgttcgtaagatgtggctggttctatgttggtcttcaggatactgcagtctgggcttagtgtatgacctttaagcacaacatgggtgtctgtagatgttaagatttttgtagataaacaaagttcagttcagttcaattagtggtcaaatggaaacaactggaggtttcaagaaatactagcatagaatatacaaactctagaactggaaatcggtttacggaactcatatggtgatttgaaaaaattttcattaaccattttttattggatgttgcacaaagtgggaaaatgaagataaagatttaatgctagtttagggtgtgtttggtatcgtttttgactagtcattttttgttttatgaaaacataaaaatgtaaaacttgtttggtggatgcatttttaaaacataaacaaaaaatataaaaatcaaaaactttttggtttccactttttctttgtaggtgtggagaacgccaaattggcgttctctagctttttgttttctgccatcatgggtcccacagttcgaatgtaataattattactaaaatcttgtaggtcccacatatttgttagataaataatttattttaatataacatatctgtgataaaaaaatactatgcatatattattgaaaaataaatttagcataattaaaataaataaatgtaacaatcaacaaataatttttaaaattctcataaatcatttaaatacaaaattaatttctttcaaagcttagaaatttacaaaatcaacggatgatattcttcttaaattttgactaaatttttattttgaaaacatattaaaatatgatatatatatatatatatatatatatatatatatatatatattataatgtaattattgaaatataatttttttaaatatataccaaataagaccttattatttttatttttccagacaaacaaccgaacatatttttacagttttcattttcagacattagtttaaaaatgagctaccaaacatgtttttatttttatcaaaaactaatcattcttgttctataaaacaaaataaaaaacactatataaaaaacaatactaaacgcacccttaatttttggaaactccatttaatttcaaaacgatttagaagtttgggattgagttatatgatgcaacaatcagcctgtgtagtgagaaactgatgccttgaacaaactatgagtcatgcacagatgtgtctttgtatgcatttgtattaatcaatttacaaaattattttatcagcttgatctcaacataaacttatctttccttgggaagatattgttctagttttggaatgagcttctttctttgcctgttacaggtgttgactt

SEQ ID NO: 9434 - DNA, 3546 bp, Citrus clementina
  Intron number 4 from transcript clementine0.9_017884m (loc us clementine0.9_017884m.g) derived from phytozome v7.0 (c hr-ID scaffold_120; pos 159368 to 162913)
tcccaacagcaacttcttcttcaagaatcgaaaaggtaaacaattactctgtatttacatcatacaaccttacattcatcaaatactagttcagtacagtttcctgagacagattaataatttttattgcatttaaggatataaaattctttctccacttagattgccttcgaggtagttcttctgaatttgttgttaatttgaactacgacatattgaaagtgtatttcctgccaacccaccctatgctaggtgaagctgtggtttactatgatctctcagtcctacttaacagaatatgtcaaaaaggaatatactcttttctgttctccactcccgcaaaatttctttaatgacgcagtggcgtccacttcatgggctacttgagatgcgtttttgggtgttgttccctttgaaaatgtaaactgtcacttttcgtcatttgctagtggagcatgccggtttatattgtatcaaattgttgatctcttgttacttatggtctttcatatgctttctagtacttgggagatgctaaagcaatcccggttttgaacactggaaggctgcagaagaaggtgctctgataccaattgatgcataattttgaacataaatcccatgatcttgcatatccattcaaacatatgtttagagaggcacaatttgttgccttgattcaccattttgcaagatgctgttgagctcaataattgtagaaccagtgatcttagaccttaaatccaaaactctatttaatcttcttgttcagcttatgagtgatattgaaccatagatccaatactctatttaagcttcttgttcagattatcaccaccctgcacatatacacaagaaataaatgggaggtaattagagcaaactgctcttggccaaagtaccaaatggccgaatagtaactcccaatgggccagagttaaatactttggctgagtgtaggctcttatgtattagttataaaattgttcatcccattatagtgctttttacgcattttagagttggttatgatttgggtgattgctcacatttgaccttttgttattgtcacatgaattaattaggttgttttcaaaatatctatgttttctaaatttgtcactagaatgacttataccatccaagtgggagattttatttatttctcatatattggggactagtataaatcattctaagtgctttggttgtgtttggtgcatagtattatagtgtattaaaatactgttcacattaaattaatactagtatcatgtttggaagaacataggaatgggttaaagtaactgtgctaatgcggcagtttgccgcgttagcttgcgttttttttttttttttcttttcgttgttttgcgtttgcagcttgcgtttctttttttttttttttcttttcgttgttttgcgtttgcagcttgcctttttttttttctttttcttcttttgcatttgcttttgcttataataataataataaataatataattttttaatttaatatgatattatataacatttttatttttaaattataatttaatataaattaataaatatataatttattattcaataatataatataatatttttattttataatttattaataaatttataatataacataactaataataaatatttagatatgaataaatttgaataacattaatttaaaattaataataatatagaatattaatataataaaatgtataatttaaattaatcacaaaaaaattaatacaatacagtgtagcactaagcattgtacaacattattataatacagtgctaatgtaatacaacataatacaatataccagtattaaaataatgcaatacaacataatacaatacagtgtgccaaatgcaccctttatgttttatcagattaatatgtgtctaatgtcaattgtcaaattttaaggagtaattttgatagactcatttattagatgatcatatagggtgcgtttggcatactgtattgtattatgttgtattgcattattttaatactggtgtattgtattatgctgtattgtattagcactgtattataataatgttgtacaatgtttggcactacactgtactatattaatttttttgtaattaatttaaattatatattttattatattaatatttaatattattatttatattcttattaattttaaattaatattattcaaatttattcatatctaaatatttattattagttatattatattataaatttattaataaattataatataaaaataaaaatataatattattgaataataaattatatatttattaatttatattaaattataatttaaaaataaaaatattatataatattatattaaattaaaaagttatattttttttattattattacaagcaaaagttaaagcaaaaagcaaatgcgaaagaaggaaaaagaaaaagaaaaaaaaaaggtaagctaatgcggcaactgccgcattagctacagtacccttaaaccatgtcatgttctcccaaacatgatacaagcattaacttaatgtgaacagtaatttaatacccccttaatactacaaccaaacacacccatagtgtgttgataagtcttattttgttacaccctattagtagtatattatggacaagtataaccttaaattaaatagagttttggataaaggttcaagatcactagttctacaaatattgagctcaagatcaaggtaacaaattttctttccctctctaatcatgtgtttgaatggatatgcaagatcatgagatttaaatttaaaattattcatcaattggtatcagtgcaccttctttgcagccttccatttgttcaaaactaggattgctcaagtatctcccaagtactcctacgatgtgtacaatcctgagcatacatcaagctcccacaactaatggatacaggaccggcggcatttcagctctatgtatattattacttgtacattgagacttagaaaatttgtcacttttctggaccaagtaaacaaacctcttgataagattcccacagttaagaactgaagattaagaaacaagtaggatcctgagactgcttggattataagtggataatgaggctttaagcgagggaactctggcttaaattgtaaaacattgtactatttgaggtgaaacggtggatgtttaccttttatattggatatttggcaatagagagtctgtttgactattttagaggacttaaggtgcaggaacaacttatgtgcatccttttgtaaattctttcctttcagttttcttcatttaccttttcaaaatctttcttagtaaggacgggtctcatatagaacaaggaggttaattaccagttctataatactgctaaattcatcctgtgtctgtacttatacacttcattctttgagtgctttataacattgatattggaataggtgcttatgattcatcctgtctattctataaattttatttagacaagaagttgtactgctggaca

SEQ ID NO: 9435 - DNA, 467 bp, Citrus clementina
  Intron number 3 from transcript clementine0.9_011768m (loc us clementine0.9_011768m.g) derived from phytozome v7.0 (c hr-ID scaffold_12; pos 4642067 to 4642533)
ttggggcaaatattcttattcgttatttgggtcatgtaagataatgatttatccatgctcaatttttggattgaggttcagaattttggatccatgttgcctcttcttgtctttgcataattgctgtgggcatagtgcaccacttgtgtttatgtttgctcatgagatagatcccttctaatgtaatacctattccattcctcaattatctccataaatttgcagccattcttttttctttaatatatcgttgtagatagaggtaatggtttccatgatttaagaattaacagaatgttcttcattattatgcattaaaaggtgctttgatctcaaagggtcctagaagagttggaatgttgtaaactgttctgtctacctggtctatataattgaggctttacttatatttttataatgtgctatttgcaggaatctcacagttgccctctttctggggctgtttc

SEQ ID NO: 9436 - DNA, 948 bp, Citrus clementina
  Intron number 2 from transcript clementine0.9_019519m (loc us clementine0.9_019519m.g) derived from phytozome v7.0 (c hr-ID scaffold_34; pos 1156213 to 1157160)
cttaaacgaccccggtccgattacggtacgctcttttacactttcttttttgttttaaaattccaattatatgattccttttggtgagcttgtttatttaactagttaaccatggatcgccatggtgttattacataggattttattgttttatttccatggcatgagaaaattctctaatttatgttccgatttgggagctaaagttgcaattttatgtaaatttatacagataagggttatgacattagcattttggtagaatttggagcactgactctgtgtgaagagatgcagggtaaaagaatttgtcaacttcaatactgataacataatctttgtagtttgtatgtgtgcgtttggggcagcgcatcctatattctaggagaatatatctattttgtgatttatattcagatatagcaggagagaatgactgtatgagtgtgtgtattctattttgtgatttatatctcgaaaagaaataaagaagtggacatgaataatgggtttgaattcaattcaaaactgagccatcgaagggtgtgaatgtgctaagtgacagataaatttgttcagaattatttacaacttttgttttaagtttcaaaattagaagatttatctatcctttttttggactaatgagagattcatgtcccttgccaactttgtaattatttgacactgaaagtcattcttctgcatggatcatgtattcttggatcttcctgtagaattggattcattcagtgttctccattttacgatggagtccatgttcatcggtcttactttaacagaaatcactaagcaagtagagagttgacagtaggtcaactgcatctatgcatgcttattcacacattccttttggagaaggaatttcactgacatctttgatttttaatactgaagatcttcccccttctgaagtgctgtcacgtc

SEQ ID NO: 9437 - DNA, 799 bp, Citrus clementina
  Intron number 2 from transcript clementine0.9_025740m (loc us clementine0.9_024235m.g) derived from phytozome v7.0 (c hr-ID scaffold_53; pos 414323 to 415121 reverse strand)
gcctaaaggtaagtttggtgttcattaaattccatcataatgaattttttaaatattaaatataatgaattttttaaatcaggattctggtttggttattgtttcattatagagtatggtcttgaatagaacaatgtcggagcatttattattaatcgaactatacatttacttctctctgctgataaatattctgaaaaattcctcatctacaaatttgattcattccattgcctttcatatcatgtgtattgtgtcatatgaatgcagattacaatgcttttagagcacagtgatcatagaatgcttttggcatcaccagatttatggctaagttctgaaataggttgctgaatgaaatccttgagatttgcatgatcttttgaaggcaactaaaagactcgtgataaatatttttcagcgatactgcagacttgttttgaaggctgttcaaacctcagcttgtaatttcatttatgtgatcttatctcatttaatatgcctaagaaaatatttctctactctttatcgtgattaaatgaacatatttgtcaaataatttgctacctttcttgcatttattctatcgtaattggtaggtgccggactgagtcactgcatggttttttttttccttttttgaaagttgtcgctgcatgattgatatgcctaaggatgccttgctttggattttgtcgtcttcttgcctaccatgtgattatcaaacgatctcttatttgctacttcttgttccctttaaatatgcacttaacattattattctggacagagaaagaga

SEQ ID NO: 9438 - DNA, 690 bp, Citrus clementina
  Intron number 2 from transcript clementine0.9_004806m (loc us clementine0.9_004806m.g) derived from phytozome v7.0 (c hr-ID scaffold_7; pos 5235688 to 5236377 reverse strand)
aagaagaagtcctacttcaaaaaccgaaggcgggggtaggtcactttctgcactgcctctgtttttagtaggtggtcacagtctgaatgcattttgttttgaattaacttcttgaagttgattagctttttcgtaggtgtatatggtggtttgaaattttggacatagagttgaatgtatttttagaaatactagggattggtgacactaataccagctaatttcaactgaaattttggacatagagttgactgtatttttagaaagactggggattggtgtgaataatacctgttaatttcaattcagaatttatgattctgtgttaccaaacttagtactaggaatgttctatactaagcatgggtaagtgataaaggaatcttgatattttatttacttcaatgttgtgttgaaatactgttgtcaactgttcccttgatatgattgcactaaaagaagctgcatgtttgtatggcttccaatttctactaaaagaagctgcatgtttgtatggcttccaatttcttagtaattcctttttattctatttaccttggattatctagggagcctgaattggcaaactttgttttatttgattttgaagattactagagtgatgtttttttaatgttcaccataatgattgcagcttctgaagcccgctttcacaattatacgggatag

SEQ ID NO: 9439 - DNA, 845 bp, Citrus clementina
  Intron number 1 from transcript clementine0.9_023098m (loc us clementine0.9_023083m.g) derived from phytozome v7.0 (c hr-ID scaffold_12; pos 2266389 to 2267233 reverse strand)
ggttattcattttctgtgaatctggataagcttctgtaagaacctaaactctttttttttttttttgaaatgattataaagtaaatttttattcgaggccatagatcttgatttaactttttgtttatatttttctctaatgaattgaaaaataaggaattaggtactttttccttgaggatttaaatcttatttacaaatctaaattccttgcttttatttttgtgctcgccgtttctctcgcaattggaccaatgtgattgctgtggttgcgtcttggatcaggcgccatagtcctgtatttgatgatattctgataatatttatttgaattcatagtgcaaattttgtcctttatagtgaagtaaaattgtttgagggcagttaattatatttccattttaagttacgataattgtttggttctattcttagtcatttgtgttttgcaagttgatttatttatttatttctgataaccgtgagcttaattgggtacaactgtttaacttgattgtatcttaaattagatgttactcatatagttgtgtcatcaaatgtcttgacatactgatttcatttattttatcgacagacttgtcacctgttccttgtttgagcattggacaaaagtctgaggtttctgattctgtgatatttgttttactgtctcattttgcttggagcttgtgtatctctgtttggtaggtgcttattctttttattttatgaacttaaactgtataaagatcattacttcttcatttgcactgcctctgggatagagcgttgatctatataatggatatataacaggctgtgatttaaattgcataaagatcaaa

SEQ ID NO: 9440 - DNA, 3597 bp, Citrus clementina
  Intron number 1 from transcript clementine0.9_022049m (loc us clementine0.9_022049m.g) derived from phytozome v7.0 (c hr-ID scaffold_3; pos 773552 to 777148 reverse strand)
gctgcgttggccacatcgttgctcttcagcaacaggtcagtataacaagctagccataactacatattgatccttttctttttcttcttttttttttcccgttttccaaccatccatattactaacttctccgttccgtttgtccgaagccactagggtttccttttttatgacatttattagcttattattgaaaacatattttgtgtaagcaaatgttttcttctatggagaagaaattaaactggtaccacgtttggcatgctaagatgaatatgagagaaattatactaaattaagcctgtaagtttcagattcctgacaaataataatcaacgcttgaatgaagcggggcgattgatgtatttcttaagctgctcttctagtgtttgtcgggtggctagctagagctctagatgtaatctcatacgagctcattgtttgcttcagtactagaagctagaatcttataattagatttggtagctaggtctgtccaagaagaaaccttagtcaccgtaaggcatggtttagaaaagtggaaaaacaaatgtttcgtggtaatcataccatctagcgtcttggaatgcaacaatggtaccattatttagtcattttaacaagtggctgtattacagacgcaacattagttagtcaacttttcacatttataagactgtttgtttggtcatatttttgcatcttgtttatgataacaatgctaactggccgccggtgtagggttaatttcatatttcttggtctaagcaacagcatacataattgtggaaagcaatttattgtctagtaagtcggagcttggagaaacaatgaccatggtacatgtaccctcattttttagttgaaaaatctcaagcttttacaatttttcaacactaagtactaaccctccaagttttcattcttttctcctaaattatttatttttttatactgattcaatatttagaatgtcatcaattggaaatttggagattattgaaaaatgagaggtttctagaaagagctttttaccaaagagcataccattatatatattcccaattttagttaactggagtacttctcttggaaagaactgaggatgttttctttattcaaaattgaatgaaacccaggttaattaaatttcagcgttagacgacttgagaggctactaatttagggttttagttagtataccatgggtatacaataggtgtgactaggtctcgtttttccatgtaaaatatatatgattgaaaccaatgctaccggcctctttggaaagagagagaccaaatacagatcaggaaccggaggaaattccatcaagctggcggctgtcaagtgtcatgtagtggtggatggctaataataagtcttgttgcttgcctgagttactaagcaaacttatcagctcgagaaatattcaaatattttgattttgactttcttaattgcttctataatcttagtatttaaatatatattatcgtagatcaactttcctttgcacatgggtcctaccacgtgttggttctaattgtaactacactgctctatagaaaagatctttttaatcaagcaatcagataagaatgagactgtacaaggatcattctgatcctgataactatcattgctccttgtgtaatttggaattcaagaacaattaggtttaattaggtaagtatacaccaacgcccgtagctatctgctttagagcttgtgtggcagaacagaaaatttataaaattggcaccatctgtatcaagggtcttttttctttttctttttttgggggggcggacgtcctcattttttaacttataaattcggtgttatttgttcattttgttgttagtaaaaagatttatttacttatgttaaaggttttattttatagtactgtaaaacattggatttacatttaaaagataacgaaggcctacatctgaggataattatttaattgggtagattacatcacaatttaattatatattacatcctgactactttcagagttgaggattagaaagttaaatttggataagattgcatggtaagtggcattaaaagcatagttatattcacatggtatgatagtatgactaagatggatatgatattgttcatctgtttctaatttagcatatccacaattgtttgttgttgattatatataaatataataatgtacaccttatcttgtttatgactaaatcccaacaatacgggatcttgagcgatttttctcattcaggaaaggagtagggacaattttaaactcaatttcttatttggacgtactcagtttttaacttataatttcggtgttatttattgttagtaaaaagatttatttacttatgtaaaaggttttattttatagtgctgtaaatcattgaatttacatttgaaaggtagtgaacgcctacatcagatgatgattatttatattaattatttaattaggtagattaccgtcacaatttaattatatattacatcctgactactttcagagtttagaggattagaaagttaaatttggataagattgcatggtaagtgttagtataagcatagttatatttgcatggtatgatagtatgactaagatggatataatattgttcatatgtttctgatttagcatatccacaattgtttgttgttgtttatatataactataataactataataatgtacatcttatcatgtttacgactaaatcccgacagtacggggtcttgagggatttttcccattcggcaagggtgtagggacaattttatacttaatttcttatttggaggagggatgagaataatttactacccactattgtggaggggatgacgattcatgaaatccaatcttcttcccatttccccatttttatttttttcatttcttctaaaatatttagtaaatacatttaaaatttaaattgtaatggtattaatgtaaataacaaataacagctaatataaatacttgaatattgataaatataattttgctaatgatttataccttttgatgcttatgaatgtgttcaatcttgaagttgtacttttgcttaatttcataaattatctagtcattttgatagtttgatgtagagatggcaaaatctgattctggatctggatctgcaaaaaatcagatccaactcccatccgcaaagatccagaaaaatttgtatttgcataattcaaaatgcggattcagatgtacttgcatctgaaagcccgatattttagatccacattattttttagaaatccgcccgcgaatcacacggatttcatcccatctctacatcaaactatatatgcagatccccttccctcctctccccattaccacccctattcctcttggtagcacgcagttctttttcaaagctttttacttacagcttcttactatggtatggctgcttttaatcttttattttaataggataataatactataatttacagaataatgcatgtgtacgaacaagaaaagtcagaaaatgaacttttccctgctgattgcaggtagtgaatttgcaggcagaattagctttcactca

SEQ ID NO: 9441 - DNA, 3119 bp, Citrus clementina
  Intron number 5 from transcript clementine0.9_030260m (loc us clementine0.9_030260m.g) derived from phytozome v7.0 (c hr-ID scaffold_65; pos 1360170 to 1363288 reverse strand)
gaactgaagttaagcaagtaaggatccattccatgttgtctgcagtgtttctcttcttttttttttttttttttttttttttgagaaggaaagttaagcattctaataactatgttgtctgcactgtcacttgtaagtttttcagatctctgttagtaattctgtttgtgccatgtacatcgtttcttaagaatgtctaagggtgtgtttggtattgttttccaattgatgttttttatatttgtttagagaagaaaaattgtgtttttgatgcgatacttttaaaaataaaaacgtgtttggtaacttattttaaaaatagcatatgaaaatgaaaacaatgaaaagatgtttggttgtttgtctgaaaaagttggaacagtgagagagggtaaaggattactcattatttaatgatttttttatagttgatttttttttttggggtgagttaattgtcataaagtgtcatttttttaaattgtcttttattactttagtagataaatatgaaagtttctatataatatcataatgtaatataataaatatattatgtcactaaaaatttatttagttagataattatattttttgtgcattactttttaagtttttacaaatattccaaaaaagttaattttgtattttttaaaatagtaatgtattttttattgtgttgtatttataacataataatatttaagataatatgaatcaatttataattatattcacatttgttcatattcttatatattataataatggaaataagacatctttattgtaggacccacaaaatttattgcaatgatcatacaaagtcaaattggtgtgacccttggcagagaacaaaaatttgagaatgccaatatgtcgttttctgatttccttcacaaactctaagaatggaaatgattcatttcatttcttgttactgtagtattttcctaaaaaacgagcccactaaacaagttttatccatttaccaatttattttattttatttatttattttaattcatttgagagtattgttaaaccactctgaaagaatgaaaagaagcttcaaaatttgtttcctgtcatttgctctctctctttgtctcctcaaaagtcgctaatatcaatttattttattttatttatttattttaattcattagagagtattgttaaaccacactgaaagaatgaacagaggcttccaaaattgtgtcctgtcatttgctctctccccgcaaatgtcccttatatggaagcaagatccaagtgctaatatatcacctttaactaagaattgggcttctgcttgatttcagtctgtattctataacgatttcttcaatttattgagaatacagaattcgagagttaatggctagtgattgatgcaaaattaaccaggtttcctaaacctgtagacaggcacctactgttagtaatattttttttttcttttatatctgttctgtatgatttcccaagttgcttatgcaactgaatcacttcgttaccgcatttcatcttatgcaattgttttttacccactgttttcagtaaagatatagctaattttcaccggcccaaaagctctatggtatccacatgacagtgagatggctgtcaaagaacaaggaaagctgccaacacaaggacccatgaaagttatagtaaagagcttagggggcaaaggaagtaaactgcatgtggacactgaggaaacagtctattccatcaaagcaaaggcttcgaagaagctaggttgtcatttttctttgactgacatttatcactctatatgtgtagttcttatcaataaatgtttggtgtcattgatgattttaaggtttaagacttcagaatttgttaagaaggataacatcttaatttgttcttttgttcttgtagatttcaagcctgcagaatctgttaaactattttacttggggaaggagcttgaagaccataaatctcttgctgaccaaaatgttcgcccaaattccctgattcatcttatacgcgcaaaaatacattttttgccaagggcacaaagcttcctggggagaataaatctttacgccctcccggtgcatttaagaagaaatcagatctttctgtgaaagatggtcatgtatttctaatggagtaagtacttttctcttttctctgtttatatcccattttattgtctttcattatattcacttggacttttattgtgtgtcatgcatagaagatcactgcacagatggattgatattatcggatggtcatactaacagaatttatgtggacttcaaatatgttctgaaattgaaatctattctaatcaaatcaacgagaataaaagtatacattttttgtagtcagtaaaacttaggagcaaagttccttaattgggagagcattgcagtcaagccttggtggataggtttttgctgtagtagttgctatgagaggcacatgaagtgagtccatcaccatcagagatttctttataaataaacgtagttcgttaagcatgtatgataataattggcactacttaactgctgatatttctaaacttggatgacttgttaattagaaaatataaatgccgttaactgagtttttgaacaagaaatgtcattaattgagttttggaataattaatgagccattttgcttttactatctttgtctgaagacttaacagcacagttccttaatcttacttctcttttctttttgctattattatttatttatgtcaaatgcttaatgctgtgctagatcaattaaaatagaaattaaatagattattattttattttatgtgcttttagtgtactgctggttcgctatgaatacctgctagtattcatatttttcatcatagtgtgtaaataaaaaaaaaagtaagttgggaagtaaatattcgaagtattgctaggattgatgatgtgataccagccaacaaaccaacaagctttgcttttgccttgggttctgaatggtaataaatttcatttgtatataaataaagaaagtttgagaataaagaaagtttgagattaccattactctttattttggcaggtattgtgaggaaagacctctgctgttgagca

SEQ ID NO: 9442 - DNA, 619 bp, Citrus clementina
  Intron number 4 from transcript clementine0.9_005855m (loc us clementine0.9_005855m.g) derived from phytozome v7.0 (c hr-ID scaffold_38; pos 1226400 to 1227018)
ggccaaatattaatttctacgagctttcattccaggtacaatatatttttaatttcatagaattcaagacttaattcatattttgatctgataagatagtttgtttatgaatcatcccttctgtttacttgttttttgattctttgacaagcatggtgtagatattgaatttctaatataaacgtaaaattcaactaagaaatcctcaatatctagctatgattttgttgtagttttatgtgtgaataaaattattttgcagaattttatactgttgagaaaaggagaacccaaatgtacaagcatgcatcttttaacgttgtttatgttataaataaaaaagggcatagattcacctcaatctgtaacttatttcattctttcaaggagtccacttattgtaaaaatgctgaagctttaggtctgtatgttggactgaatgcatttgtgtgttcgagtatatggttttgtcaagcaagaggagattgtctttacaatcctattcagcatcatctcctcataattcatttttgtttctcctttacaattagattctcaagagacctttttattcccatttttcttttgtttcagttctcatataagaagaaacttactt

SEQ ID NO: 9443 - DNA, 1150 bp, Citrus clementina
  Intron number 1 from transcript clementine0.9_030792m (loc us clementine0.9_030792m.g) derived from phytozome v7.0 (c hr-ID scaffold_106; pos 328775 to 329924)
actactagggctgcagcatcggttggtttgggtctgttttgagttttattgtcatttatttggctatgttttgatagcgaattttgatatgtcaatataatgtgtaattgttttgggttgagctggtaattatgctggattagattggtttgttttggtggttctctgatggaacactgctttcttttagaaattttgaatataatatgagactacatatagtttaattgaacactgcatctagtctaattactagaagtgtggcatttggtttggtttatccgatattctctagaatttcacttgcatctggttttgttgcatatgtttgcttgcatttgatggtagtagcagactgtttggttttgtggcatttgatggcagtttgatctgttcttggtgctgatttaagattgttcctgttgtgctgatgttaattgcaggtgcttgaatcagctagggttgctggtttattcagacgactgactcaggcgttgttattggttgattcaggtggttcatttaatgttaggaagcaaattaagaaataatgaagtattcatttaactataattattgtagttattttatttcataactgaattataatctatgatacttgtgaacaaattagagaatttttatatatgaattatatatatgtgtgtatgtacattttgctatttatataataatttaaagaatatatttcaattcccacaaaaaatggctccaattccaataattcctgccaaataattaaattttttaaatttaccaccaaaatatatcttaaagaaatgttagttattcttgctagatttaacaaaaataatttgtaggattaatatttaattaaaatgattaaataattttattattccaattaaatatgtcatgtttatatgacaggcaatagtcatgaatgggaagtattagttacatatttttccttgggatttcaggcaaatgaaaaaaagattgagaatgatttcaagaggacaggtggatgataagtattcatttttgcatatttggctaatgtcctcagcagtggatttttatggtattgattttataattttcaattagttgcagccctagaggaagagtaggctgatcaaattgatttgtcttgtttttggggcaa

SEQ ID NO: 9444 - DNA, 4586 bp, Citrus clementina
  Intron number 1 from transcript clementine0.9_001688m (loc us clementine0.9_000901m.g) derived from phytozome v7.0 (c hr-ID scaffold_75; pos 983872 to 988457 reverse strand)
gcacttacaggacaggttctttcctttaatttatttgttattgtttaattatttatttatggtaataattttttgcttatttatagtgacatgtcaccaattgccaattacaaactcacacacgtcgcatctttggagatctgatctgtttagaagctacaacgtagtcaaatttttatcagaattaattttgaattgtttttattatgagtgctgctgtttttacccagagtcaaactccgaatgggtttctttatctttttcttttctaagaagaattggtttctttgttatactttttaaatttcttatagaactgtgaaaagtctaataaattaagactattcttatttcaaataaaacttcttttaatcccttgactacttgaatttagattaactccacaattatttttggattttggttttcttaatcaagtcattgttcgaaacccagtccagatagatgcattaggaagaaagttagcatcaaccatgcttaacctaatggcagtacgaaaatgatttgtggtggcttatatccaataaaaagcaccagaatggagattcaaggaagatgtatattatgagtttcaagcccaacattcatattttttcttaaggggtctaacaacattaaaaaacttgaaaacttaaaaggtttgaatattcattggatctacacaactaattctttaaccaagtagattagacattagaaaactgaaataatagtaagggaatttgagatttgagaatttactggtctttcgaaattgattgctaaagattttaatcaaaagatatattttcgccaagatatactcgaaatcccttttatttctaagaccacaaattatcaacttgtagatttctatcgagagcaatacaaagaagatatcgaggcctacaaaactcttatgaaagatcaatcaagtgaagaagaagatgaaggtagaaacttctacaatgatttagatggtattgaggcccataaccttgacaacatattagaaccttgattcggtagtggtccactctccaattaatcaccatcactcactacctttttaaagcacaactttaaaaagaaaaggttgcggtgatgattctgtcgatactcaccttttttgcatgaatgtaaagacaacatctttttcccaatggatgccaaactccctagaattgggtccacacatgtggaaagcaagagataagaataaatgcttttaggaactctataaataggagttgttttccctaagttacaaaactttgtaagatcatataaaaataaaaaatcttgtggcaaaattcaatttgtagaagtcccaaagcacttgttcaatttcttaaaagtcattacaagtaagttagttttattcaacataatgtattgcaattaagttacttaattcttctctaataaagaaacccaaacttttgtaaacttctatatgtttatagaagaacaagtttatatattgtaaatcttttaccttttatttgtatttaaagaatgttttctatatgtaaagaataaaattagattatagaataaaatttaggttttcagaaaaatttgaagccttaaaaaatgacatttgagtggccaattttgcttctaagtaccgttttagccgaaggataggcatttgaaagaaacaaggaggttttgcattgggatttccatgccccaaatagggagaaggttttttcaaaaaaaattttgttttaatcgaaaagtttaattttatactctaaactgttacaagactgtttttcaactttttttctttttacgaatttggttaatattgttgacaaaacttgttatctaagaaatttgacgaaagtttatgaaagaatctgggagtatctagcagagaagaacaactgcttataacaaattttttaatcaaaattttcttgcatgcctttagataattatacttgttttactctataaaattgttttgttgaagcattttgtgaatatattaaacaagttgataatttaagaagactagtcgtaataagaagtcataaagattatagtattaaactaagagctgtagcaaatagaagaatagaagtagcatttaacgaaggatataatacaagaaatagtatagaaaatacaattcttgaatgattaatttagaagaaactataattagaaatattataaatagtttaatgttatcattatttagattttgttgttcttgacttagcagatctaagttaatagtaatactagaataccttaaaaataaatgtaggagaatacatagagttattctgatactagaatccaaaattaagtagtcaatggattaataggaaaggtttaaaatagtattagtctttaaatattagactttttacaatttcataagaagtttagaaaatataacaaaggaagcatttttgagatttgactctggacttaactcaggataaatagcaacactctattattatagtatagtctgcaatgttttgactcaagatcctgttaatttacaactattgttaaatataaattataattctttgatttgactaacaagcacattggcaatacgcgacgacttttgtttttattaaaaatctcttttatttaaacattttcccatttatcccaacaagtaagttcgtatataactaaatttaaaataatcaagcataaacaaatttcttagaaaaaatgagaaaatatttaaagaaaaagagaaattttcaataaagacaagattagccacgtgttatcaaaatgtcaactccttagtcaaatcaaagaattacataggggtgggcaaaatcgggttcgggtcgggttcgggtcaacccgatcgggtttcgggttgttcgggttagacaaggaacaatccgaacataacccgaattaataacccgacccgaaccgacccgaactatattcgggtcggttcgggtcgggtcattaattcgggttatgttcgggttggatttaaaatgggtagaattgagttcgggtcaattcgggtcagttcgggtcaattcgggtcggttgaaatagggttagttcgggtcaattcgggtcagttcgggtcggttgaaatcaggtcaattcgggtcagtacgtttttttttttttttaagaacccgatcgggtattcggatcgggtcgggtttgacccgaaccgatcacaacccgatcgggtttgtaaatttcaaaccgatcgggtttcgatcccgacccgatccgacccgaacccgaaatttatcgggtcgggtcgggtcggatcgggtcgggacgggtaaaatgcccacccctagaattacatgtaacaaaagttgttagttagcataacccttagactcaatttaggccataacataaatctactgtcaattcaagactctgcagaaaagtttcaaaatgggcctcgaatctcagggctcatcatagccaattgagtataaccatgaagaaattctatgatccataagagataatacaactaattaatacatgaatgacatgtgtaattaaatttaatataaaaatcacttataaagtaattttttaaaataaataaatacatgtaataatatcactcatttgttatattactaatatggtacctttgatttattgtagaatttctcctaatcatgaccgtgtcattagaaaaagcacaattgtaaaagtagagtggtgacagaaagctacctcaacctcgcaaagtaaagttgaactaataacaacaagatacttcaattttttcagataagaataaataaaaattaaactaataataaaattaggaaaattatcattttaccaccaaagttattctaacatacatgtcagtactatggtttgccgaaaagtgcattttactaccaaacgtttatgtcgttatcaattcactactattccgttaagaaaacattaatgtttaacagaaattgagttaaagtcgattttacccccaagagtttaaaagacaattttaccttttgcaatttaagcattaaaaaagaagtcaacaataatgattttagggtttaattttctaattctttaatctttaattattttcctaaaatgcagtgtttaggctttaacctaaaatgtctttaatgcccttacagttggaaatgtctttgatgcccttatgacatcagcaagatatcaaaaaatttttaacgttcttaacataatagtagtgaattgataacggcgcaaatatttggtagtaaaatgcactttttgacaaaccatggtactgacatgatatgtcagaataactttattagtaaaatgataatatcctatagaattattccgaattctaaattaataataaatttacctgaaaattttgctttgttgggggttgaagtggggttcattcgtcggggacatgtaatttttcataagagtaaaactattacaagcggtttcatcaattatggtctatggcaacatttttgttttgcgagtctgcagttgagcatcaataaatattttaggcactttatttttggcaaattaatgtttcctgtttggatttattgttcttcaccgtaggc

SEQ ID NO: 9445 - DNA, 1806 bp, Citrus clementina
  Intron number 2 from transcript clementine0.9_022573m (loc us clementine0.9_022573m.g) derived from phytozome v7.0 (c hr-ID scaffold_32; pos 1705898 to 1707703 reverse strand)
ctattgtgagttgtagtttatggtatttaatatagttttgtttctgcttttcattgaagctgctgtcaagaaacttttgtactcacttctttttcaacatcattctgcattgattaagtcgttctttagaaaattttggaactaatcatggatactaagatttaaatctctttcttttgagtaattctcatgagtcctttatgccattcatcagttacatctcatgtcaaacactttgtctgttaaagccctagcttgaattctttatcctcgttgcatctataacttgagcctcagtgcatattttggtggctgtcttttattatgtaagatcgaaaagaggagttttgttgttcatcatccatttttctatctattacttctccatcttacttaagaatagttgtgcaatttatttggtagcatcttgcctcttgcaaggcaatcacccttatggacacctgatgctgtggtttgttcataaattggtgatgaagtcgttgctcaagagcatgtatcttataaagtggatgaaagtattctagagtgttggttttaattcctaaattggtataatatactgaagtgaggttgaaatgcttgctttgaactgataagttgaattctcagctaacttttccctccatgcacgagcatacagcacgaaatccatttgtttttcttcagcaacaattaggccagttgagcattttgtagttgtggactacggggtgttaatcacataaatctttaatctcctcatcttctgttctaattgagactatttgaagttgaattacatactgcattatgcctgacaaatacatctgggtttatggtagtgattgtggttcttgtaataacgacttgagagatggttttataatgcagtaggcctgtcaactggtttaactgacaacagcctatatcagtttagctccacatatcatatcaaacttactgttctcagcttatttggtaaatgagtggggttgagaccttaataacactgctcatttaaaacactgataccatgctaacagatttcatagattcatcactagtaggaacttcaacccaaaacaaggttaaacacatgtacctattaattcaagtaagttctttcattgtctgtagaataacgtaaaatcagtaaatatcaaacataaaattcatagacacaaaattttgcatttactttagattagtcaaactctggtttatgtcaatttcaaataaaggttagcccaagctcaatgtgtgaagctggccacctcagcccaattgacaatcctagtgtacagatgttcagaacagtttatgtgcacaagcagacagtcttgatctcaaagtcagtttggttctctgtctttgacttctggattctatattctttgaattgcaataataatttatttatttgtttccttttctatgaggagtggatgtttttccacagaaatgatggaaaaattgtattacacagattgtctcattagcttttgttggttttcttgacattgatagctagatccagtgggtgtttgtctagcgactggcatgtagatctgctggcaaagccttttgactgctttatctcccctccattatttgtcatttggaattctacttctatttatttatgttttctcttccttatttaacttgttcatcatttgtcattttctcacacctccgcgcatgtttttcatctaatgagatcaatatttgattgtccttaggaacaaactaactgttttacttcgttctgaaggttgataggcatccccaatttggaaactcaag

SEQ ID NO: 9446 - DNA, 4057 bp, Citrus clementina
  Intron number 1 from transcript clementine0.9_016735m (loc us clementine0.9_016735m.g) derived from phytozome v7.0 (c hr-ID scaffold_133; pos 419718 to 423774 reverse strand)
ctgtcacccagctcggtggccccgacagtaagtggtttctctttttcttttttctttttttggttttttctggtttatgatgttcttttttttttttttgaagtaaagattaaatttaccaacaaacacacacttcattctattttatatttgttttactagtttccctcctgtctatttctttatacagtgctttgttgatttaattatttatttaattaattcacgttgttaattaataaactgttatctcttgaatgattggatttatattaggtgggtggtcggttagcagttttgttcttcttccttatacaaattttacagatgcaatcattaaaaacttgaatttgttaaatttttttgggattttctatatatgatagtttcttgtactaattcttggtcctttatggaatattatggagtcttagaattcagcgattagggcaaaagggttcatgatagatgcagcatccatttgttgattcaattattgttaaagttgaattagaaaaaaatataaccatgggattgttactcttccctatttagtgggaaattaatttaacgccattacttgttgctctttgttctgtgaggatgatcacttaatttaattttttaaatccttttttacaaggtagaaaaatgtacgaccagggtaataatattgcaaagaactgctcttagaaatgcaattgatgttattgtcattatctttcttttgtggggtagtaacaaatgacctgccttgttgaacaacttggttcggttcgacatcaggactattgttcaatcctacggctttggtagttaggaaacttatgggatatagcatcccaaatatgtgcccccaagggattggacccctatatgttgactagaaaccgaacctctcaacaacctaacctggagtttaagtgccttttttgttcaaaaaatgtttttaagggaatgcacctaccattttatctccaaacacatttgtctatttgagccaaatgctaaaagacaaatataaaagcacttaatcatttgaaaggacctttgaaaatattaaaagcattatctaatccactaaaagctgaattagttccctaatccactatgagcattgcctaatcactttggtgttttgcgctttctattcttcgaatttaggtgttatttaattattcatggactcttgagttcattgtgtgattatgttgtactttgacctcggaaaaaatatggccaacgggacaaataattatttggaaccatatagttcaataatgtttgcgggcgtggtttagctgtaggacaaggcagagggatcatggcattttgtcttggtctgcgtaagaatattctgttattcctggtggatttggagaaaaaatctgtttcatcttctgcatgaaatatttttttgtggatctgcaagctttatgtttgaaatttatgtctagcttctaaatttggaataggaggacaaatgttgcaagctttcagtttcactgtttatttatttattattcctcaaagctttaatatgacgtaatataatttaattctttgaaattgctatcttaagtagtctgaaactccatgaccttgttggatgattgtccctgatgcggctgcatataatttaatggtgaatctgtgaaactttgttgagtgaaaatttgtcaaaacaccgagcgaatttgggtaacctaactttgcactaagctatcatcagcatcattgttagcaattgttcactgacgcgatccgtaatagaaaccatcattgctaccacgagcttaaacagtcaatggtaaggaattttcaagctttccaaacttaacttatcatctttagaaatgacacacaaggatagtggaataagggactgaaagatgggaagcaagaaatggtaagttgtagttgccaatggtggcggataagagatacatgtgaatttttgtccctttattttatctatctagatgataaaggacagtccctgtaaagttacagtactcaggggttattcttcgattgatgtttacctcccaagcttattggaaatctacttaagcagtaataaatgcaatttgcttcagcgaataacgtcaaaaaatctttgatcacatccttgttatttggaggatattgtcattttgaccaactgtgaagaaaataaagatgtataatgtggtgtctacttactaggcctgctgttatttagagggaattgcttcagaaactttaattttatacaagcataaagaccatgggagtttgctgaaatagaggaaagtttctctagttattcttagtgtggtgacacttccgtgtctagatcctgtcaaaaggcatggtaatagctgaatggttttaggcttatttacacaagtttcagagcttactgttccagaaaggagttgtttggatatgacacctgacttttttttggttgttgccaagggaagttaacctaaggggtatttaatgttgatggaatggtaataatgatcaattatgatgtgagtaattgattttcaaggctgcttttatgaggtccgcataaagcaccttcctaaatatggggtagtgaattatatgttcttaagattggatgactggaaaatttaattaatatttgctaacttttgctgaatgttgtgtcaaatgatgaattgacaagatcttctaagtaagcattaataacttgtctcaagattctctgccttcggtcaacctattgtagtgctggaagtcattgttcaatttacctagtaatcaattgtctcacaagttaggtgaagtgatagtcagttcccaattttatgagaagcctacaaaatatgatgcgctatccgcctcttctacttattgccctctgtcaacccattgtggtgccggaagtcattgttcaatttacctagtaatcaactgttaggtgaaatgatagtcggttcccaagtttacgagaagcctctacatatggtgcgctatctgcgcccttctaattatagattgtaggcaatcaaatagattggtcgaagcactatttgaatgcaaatggacaaagatgttaatggatttcaaatgaatatcttgtataaaatggcagctgtgaatagaaaggttctgacttttctattcatagaaaagcatgccctcagctttcaacataattgatgcactccttatagccttaatacttgcaagtattactggggcattttcaattggaagcataaagctgtaccagaaaattctctataaaagttaatgatgctgcttgagattggatgtaccattggactctttgtagttcacttctcatgctacaggtacctctatttcatgggtatgaaatggggacatttcatcagaagcataagaggggtctcaacaagaagcataatgtatggtgccacgtcggaaataagggtacaattagttgtttttataggtagtgctgattttgtcttctttgtttacgaccaaatgcagtttgtaatttgtcatgaacatgaacagtgccccagccttaggtggaattgctggagttatttctagaataatgcatgttaagtcaaatagaacttctccgttgtatgcttttctgttgttgacattttcatgttgtgaagccccatgctcatagatctcatttgaaatagtaatgcaaagagaaaaaaagaagtctttctatagattttgcgacggattagtgacatctaaagtacaaggtgtgcatgtttgacttgtcaaagcaaagcagccaaaatataccttctgaggcacctccaatgagcatgctcatgcttaggcctaacatggatgatgcacctgaaagcaagaggcaaatctgtgcatggccttaagaaaacattgtaatctcatagttaattcaagaggagttgtattccagttgtgtttacccaagtattgcacattcaatggaattggtttttcttatactagagatcaaataattatttgacattaatctttttctttgtcctcattcttttggatttgtgtctcagaagcaacacccaagactatc

SEQ ID NO: 9447 - DNA, 949 bp, Citrus clementina
  Intron number 1 from transcript clementine0.9_013887m (loc us clementine0.9_013887m.g) derived from phytozome v7.0 (c hr-ID scaffold_6; pos 2061115 to 2062063 reverse strand)
ttataagcgtgggaatctggctcagtgtattagaggtgagattctcagcttttgttactttcattatctgtttggctcctaagaaagtggattattatttttttttcccactcatttcctctgcaaccaaccagaaggctatgatttttatcatctgagtaatgccttggattggatagtttctgttgtttgtggcataaattagaataaaatgatcaaatcaggataatattgcttgatctttactaaaatttagattttttccttttttttggtagattgctcctgcaagatcttagcattttgggacattttatctctgggattttgctttgattttccaagcaagattgattgcatattttgctttatctgggttctttcctcccccccttatttttaatacaaaatctgtaacgtcaattagctagtggttgcttattggtgttcattctggcatcttttaactactgccaaatcatgaacttaactcagttgtttgcttcatttagatttctagttatgatgtatgtagcatttttgaagtctatttgtgtcttcttcgtagcatctttagcctgagttcataacttgattcagactgatttgtcttcattatttagatttcttcaatgcttatagtcaactatagatcgtctctttgttgcataatttgcagtgtcggtacctacatatgttcttttcccttccctttcacctttatttaaaagtgatggcacttgttcaaattattttcctccatcttttaaatttttgctgaaaatggtaaaggtttaaaattaaaatatctaaatgcctcttgagtttcaactttctcattcattgccaagtaagtgaaactacttttccactcaattttaagttgccatttgttacatattgaaaagaccttttttaattggataggtggaagtggtgaggctcacaa

SEQ ID NO: 9448 - DNA, 609 bp, Citrus clementina
  Intron number 9 from transcript clementine0.9_005574m (loc us clementine0.9_005574m.g) derived from phytozome v7.0 (c hr-ID scaffold_3; pos 2299510 to 2300118 reverse strand)
ttgcctctgtcctgtgagaggtatgtcctcgtaattgaatgtggtaatagttcttaactgttctgttttttttgtatatggcatgcgtagatagtgtatttacacacatgacacatgtaagtattacctgtagttgaaatggaaagaaaatggtcagtgccataatttatagtttctgcatggtcttgtgaaacttttttttttttttgaaatatgcaaaacaaaacagtagttatgtcgcttcttttaggacttctaaaatattggttgattccaatttaatttagatgatgctgcaatcgtaatagttatacttccatttatgatttctctttgcctattagcaaatataaatgtgatgatgtagcattttgattatgtattctgagcattagtatttaatgcagttatgattttctctgaaaatgttggctccaatctcaatgcttgtctgtctcatcatatttagaactgatttttgattatgcatactgagcaatgtaagtcagactacatgtctacctatgtctgacaaagggcttgtcttcaatgccagcttgtcttaacatgttgaaactgcttttttagggggtgcactgaaaccaacag

SEQ ID NO: 9449 - DNA, 1604 bp, Citrus clementina
  Intron number 1 from transcript clementine0.9_011031m (loc us clementine0.9_011031m.g) derived from phytozome v7.0 (c hr-ID scaffold_56; pos 1292434 to 1294037 reverse strand)
cccatcctccacttccatcgtacggctagggctacgtaagtattattacgttctcaacacttcgccgtttttcttttcatccatttctctctctctctctcttcgcttgttctgaataattttcgatattatctaaaaattacttatataaatgtataaacgtattgagtagatacgtattcgtcgttttcgtcttcgtctctgattcggttcaatgtacgtaattgttttcccagcgcaaaattttgtatttatattgctgacaaaagaaaaaaaaaagctttcctttttcagtattttatctgatttttcaggctttcttttacattacatgcaatcaatgattcttttttattttaaagcctggtatgagatttattttttatggtttttatttatttatttctgtacgttcgactccagatcgtctcaattcaaattttattatatttattaaatattagttgttccaaaagcggtgcgttttgtaactcttgtttccatagaagtttgttgtacggtgtttacggttccgcagttacatgatgatgacggtgatcaaagtttactgcttgtttgatcctcactgcatgcgatgttaattgctttctttgtgtacaaacatgcatctatgatgggttgttttgctgggattgggatttttcttttttctatttctttgtttggttgatattgcgttttaatttattttctctcagaagagaaaatgaattcattttcgaccacaaaatgtggaattaggtgtgtagttatcgtgcgttgtaaggttggttttgcacattgataattatgcgtgtgggtttcattttgtcattgtaaagctataggaagcatgtggggttctaataaaatcatgtaggtcattgaatttttcagcttttattttttgattctctaaatttgtaattaagtgtaaatgacttggcactccagtttttgccggtagttgtttgaatatttcccacgagttaggccgctaaagttagtattaacgtgtgtaatgataatttgtctttgaaactgttgtaaatatcagacctttacattgggcatgttgattgaagctgcttttagttaaataataggtagttaagagttctctgaatttgaagaattttgcaagattgtcaatgtaattattgcttattgggagctcatatgaagtggagtcgcatccattcggactggaatggagtaactgtctccttattgggaaatcattaggttgcgctgatattgttttgttgctaacgattgaagtgatctcacagtggatgcccatgcattttacacactttgatttattgtctccacatataatttgaagtgaaaaccttttatctcaaatactgccatgagataaaacatcaatgctatcaccacaatttttgcaattcctttttaattttttttaataaactgtaaccattttcattattttgttaagcatcatcttccaaaataggtctgtccttcatttggggtgagaggtggcaacttaagaactgcttttgttcattgtgcaagttacctgatttgatgttcttccctgatttgcagcgatcgatttgcttctcttaaac

SEQ ID NO: 9450 - DNA, 3242 bp, Citrus clementina
  Intron number 3 from transcript clementine0.9_028397m (loc us clementine0.9_028397m.g) derived from phytozome v7.0 (c hr-ID scaffold_73; pos 303784 to 307025)
tgaagaggtagcaaatctttttagcaggtattgttgttttactggttttactactgtagtagtttaagcgtatattattatgttttacatgttaataattgacagatcgagaatagtttagaatcttttccaaacttggaaatgtgtttcaaataatagagtatggctattacatgttgcttctgctgaggcctgatgaacatggttttagttattgttttcgtgaattgtatattggaattattattcttgggatctggcttgtacagattccttttttgccttgtctggcatctttgaagtttggttaataaaacttgtttaatgctattatattctcctccttgcatgctttttatttcgagatgtggaatgccaagtgcaaaggagttatttttgtatagaaactgactattttataccagagtcgttctgtgccccttaagattggaaaatgaacgggttgcctttcctttagatttaggagataggagaacaaaacaacctggggagttggtgacgaagccttcaattttttttcattatgcaagggtggaccaaagattctatagatgatatctggagtcctcagtgttctcatattaggtttttatggtttcattgttcttcagattcgtctgaaaatgtgcatctcacaaagacatgattgttttatttgttgacttgcatgtggtaaaagtcaattttcttgctgtaaaaaatggaacgcaagaagattctttgaggttctatatttgtaagtttttcaatttggtatggactataggttgtacagtcaatgagaatttaaattggttttttaggagtgggggctgaggtggtgtgggaagaaatctttatattgtattagtctatgggagcaacaagttcagaagtatggttagaatgtggaattttgttgagaaatctaaagaagcaatggaggtattactggctcgtaggttgaatatgctgactagatcagaatcattggttgattggaatggcgcccatgtgataaataaggagttttaagaagcatgccatttgcactaattaatactgtcagacatgtgattccatgaacgtgatgatgatcattagttacatttagttagtgatggtagttttcacgtgttttaacaaacatggtagtagcaatttatgaatattcattacaaagtggcttgtgtttggaaagcaaacaatatgactattttgagtggcttgcgtgtctacataagtttttgctctggctgctaagttattgaagtttgaccacacaattcttatccattttgtcatttttgtttggagggatttgatgattttcagtgggacagtagggtatagagagtagttatccaagatatttatgtcctgtagatgattgtaaattagtctttcaatacattcacatcgcctttgatttgttcttgttgcatgcaaaagctgtttgaaaggcttttaattgagtgtctttataatttttttgacctctatctatctgtttcaaatttgatacaaagttggcttctcactattgatgtttcttgtgttagtaaagtgattgcatttgcactttcctagttgcaccaacatttcgcgatttgggaatttaaatgatgaattcttaataattcacttggtgttaagcttttcaattgttttacggctagaaaatattgagattgagaagaaaaacatctcctgatatggctgttgtacattttttttttttaaactttcgttctttttttaattattttataatttgctaaagagttgtttgagaatctctacagggataatggtattttcagttttacagaacttgatagtaaatgatcatgtacaacttcttttatttattttttatatttgacattcactatttgacctaattgatatcttggtccttgtatattatctttaggctttccaattatcttctaacactgcttgaaatggaagagttctccttggattacattgattcattgaataggaaagatctaaacgagaactttttaaacaaaaactattaattaatggctttctttaccaggctgtgatccttcattttcgtgtcttaatatgtaaaatgtaactaacataggtacaaggagggctacaggaactggatggttgaccatgctattcacccagtcattgattgaaggtgcagtagatacttaatcttaattaatgttgaatttacttgtgaatgttcttttgcaagacttaattgtgtttttaccaggatattgaaggctaaaataggagtacatggggtggtcctagctattgctttttaaggtctgtattatcatgagttgtcttttctaattagttcttgatttgacactaaataagtcttgcactagttaattaataaaatgagatataataataatatagtctgtatttttttctctatcccaataataatgtagtctttatatgatagttctgtagacgtgggcaatgaagaaaggttagaaaagttgcctaatggtggtttaaaggggggaaaaatgtggctgctaggtcgatttgcacattgtcatccattggagaacataagttgagtaggcgctatttattgacaactcattggttttttttttgggggccccccgggggggggggggggggttaaaaatttgccacccccaaaattgtcttttttcctttaaaaaaaaacaaaaaaataaggcgggaaagttcccggccaaaacaaaaaaaacggaaaagaaatttcaatggaggttcgaagcagtagatattttcttggcaggagatcttgtaagtcacctatctggaaaaatgccccaagtctccttcttccttcaagattgtaaggtttggttgcagctcctggtttctgaccttgagttttcctaattgggttggaaggtatctggattaatcctcctaacatatctcctgatgcaacatagttgtaaaacagttgtattctcttccatttagaatggctgtatcatactcttattggtgcctagtattgttgagttcataagagtgatttttactattgtatagttgctagcagttgaggcaaactaattcttgttacaagcatgtttatgggaggaccctggatgtgaagctatctttacgcatacataaattacaactgccatttatcaatttttaatttttctattgtaaaattgttattaacgttgtttatttggtttccaaatgcaggattctga

SEQ ID NO: 9451 - DNA, 754 bp, Citrus clementina
  Intron number 1 from transcript clementine0.9_005953m (loc us clementine0.9_005953m.g) derived from phytozome v7.0 (c hr-ID scaffold_19; pos 3590282 to 3591035)
gtcttgctgctattgctactaactgcaagtaggttcctctcgctcgtcccctccctacgttaatttttttccaaaattctttgagattttttcttagtagctttctttacttttcctaaaatgcataatttcggattctgattccaagtactgaataacataggattattcacttatttggtaaaaaaataaaaattaaaaaaataactgtaaaccatgcggtgttaattaaaaaataatactataacatcatatatatagttttacagatagtatatctttattttatctttattacgtcagaaatttcaattcaaatatcactactctatccaaaatcctccatcccaaaagtttatccacatctcatcttgttggatcaaaaaacactctgaagaattagtttactacttcatatctcatttggtatattattgtaattttcttttttattttttaatttattcctgtgaagttcatgtacgccagtacaacacatcccaacattgcacccacatggttatcttgatggttgaaactcccaacagttctcttttcaagaaattatcaaaatcactaaaattaacgtaaaacccaatacggacccaatagtgatccccgcaactgcaccgtagaaggactactgtttttggctttctcattatttctcatgcgggattttgcccatcgtgtactgtaaacttctgaactcaatttgtatacaggaatttgactgagcttgacattcaggaga

SEQ ID NO: 9452 - DNA, 1519 bp, Citrus clementina
  Intron number 1 from transcript clementine0.9_012813m (loc us clementine0.9_009423m.g) derived from phytozome v7.0 (c hr-ID scaffold_32; pos 1734800 to 1736318 reverse strand)
agctgtcgctgaagttaaagatcaaggaagctgtggtaagtttttttattgttttcatgggatcccctatcttacatgtaagatacatgcctctcacatgaatagtgtgtgggtcccacatatatactattcatgtgagaggcatgtatcttacatgcatgtaagatagagtttgcctgttttcatttactttttcttttttagattttattcgttacctgcagtactttaattattatcttaaaattatgaatgaatcgattgcggagaggagaggaaaggaaagggtatgtttggtattttaaggatgattagagttagaagaatctgcactgcttccggttgggggcagttgtgctaagttgaccggttaggactattactgttattttttaatcttttccatcaattagaatctggtttttgtgaatttctttttttctccgacactgttattatgattatttttttaaagtgctgtttcgttctcggacttttggcgagagttcggaggcttgggccactgtgataatcaatggtccaaattgagttttcccttttttattgttttgtcgaaaaacaataaagagaaaaactgacaagaaattaggaagtgtgaaaacaagaagatatcttctgacggaaggcccgagatattttctgttttccctcaagagaaaatgttttccaaatgaaaataaaaagaactatgtctggatggaatcttgtttggctgtcctgacgtggccagagcttgttggttgaacatagctgccattgggtacagagtggcgggcctttttaaaaactgtagtaatattttttgtgtgttcagtagacgtgaaaatcgtattcctatcacttttggtgataggtggtaacaccacaaaattttaatacgtgtcagtgggctgggccgcttgtcagtgtgtcagttgacttcatctgcagaattattaaagctctgaacaaaataagtgcgtttattttgtttatttgtacaggatattggtaattcatttcaccacctatgagcttcgagcttgatatcttgttccgttctaataagagattttagggattagtccgtagataataattattacgccataacttgtattagtcaattgtcctgtagtagcaagttaattatttttttatttatcattaaagttgtagtatggtaaaacctgtcaatgagagatattaaacattttatgtcctacaagtcttttgctgtcttattcaacctcaatccatcattctgaacaaacttaataactcagaattatatgaagtgatgattttttttaccctacccaacttttgtaggtaataaatcaactgatatagatacaaaacatattcaagtattgagttgtctaagtacataacttggttagaaattcagaaagcaaattatctgttgctctctgtgtcgtgtgattctaaccattatttgattgtatctcgcttgaatgaagggagttgctgggcattttcaaccattgctgctgta

SEQ ID NO: 9453 - DNA, 1968 bp, Citrus clementina
  Intron number 1 from transcript clementine0.9_004337m (loc us clementine0.9_004337m.g) derived from phytozome v7.0 (c hr-ID scaffold_87; pos 545191 to 547158 reverse strand)
ctttttgagcgagtcagcggctcctgggattcttggtgagtataattgtataccaacttgtcctttaaatatgtaatttgggtttctttattatattagtacatgaaagcatctttggcatggtgatatgtatgtgaaagtaaattatgatgatgacttagaatacttacttagttgaactggctgatgctgtaatgtagtttatttctggtggtggcattagaattgttaatcaatttttgaactttttgtttttcattattaattgtataatagttacttctgccaaaatttgattcagttttgaccaatatctgaagtttaatcaaatgggttactatccaaaagaggatatgggctagtcttgtttgtattatagttcttgtggaggaaacagcttatacaaaactaataaatttaataataaggagtagcttgtaataaatttaatcatgtagccccgagcatttctttctggcaattttgcttgattcattgagaagctggcatgagaagtgaccagatagttgtggtcaattcgcttcctcattctgtcgagttgttagattgaccttctagaaatttcttaaatttgatgaacagatagctgcttctttgtttaccatgccaaaggttaggcttgggtgactgattcatcaaagagtacatatgcatatacatatacatacatacatatatatatatatataaaacaaatatacttttgctttgtttgtatgtttatggctgtgttctcagtataattgaaaaatgttgctttcactttgaaaatctgcaattagatctatttggttgaatccttcatctttcttgtctcttccgtgtttttattgctaaaaatttctcttcttattcttagccaatgtgattgcttgaatatggaaggaaccagaagaccaaaccagaaatttaattgcttagaatttacagactattattattattattttctaaatatacacctctagcatttgttatgttgtctttcacatggagatataatttttagattctgaaacttttgttcctttcaatcttgaattgaagtgcaattttataaatatttggattgctttcgtttaatttaaaattatcaacctttgacattttctggaagatacttgagctggttgttattgaaacatttattatattctttatatattgaaattattctttcttttctttcttagtttgtaaaatttatctttaatttttgtgggttgggcgaagatctgattgaacatttgtgttttctttgatttggccttttcccactagtttacccttttagcttttgagttgtagtgtttgtagaaaatttattttatttaaagtgttttttttccctctgtgtctctctgtatctctgtctcttctctctgtctctctctctgatgaagttggagcccatagacattttgtatacttccctgcatcccttgtttcagcttggatttttgcccgtcattgtcaatttgatggtttcattttctgttgtcacaggtgtgggtgctgcaagggcaagaaggaaccatttcaatatctatgtgcattgaggattagcctaagtcaatctgcaaaagttcttttcaacatgtgtctcttgatctgtgtacatacgcacattgttgcagtttgtatactgcttttgtatatgggagtcttgccttgatttcgtttggatatactttttgttggtgaatatgcattggttgtgtggatgttggtattgcacattcatttgtaattgaaactcataaagtgatgatactctcgaatgagattcatctttgaatatgactttcatgaataaaaagagttgcttttgcctggcactgttcctagctttgatgtctttctgtggcttgaacgtccttcgattttagatttttgttagtgcttctaaatttgcaattactttcagggaaagagtattctgagaac

SEQ ID NO: 9454 - DNA, 1110 bp, Citrus clementina
  Intron number 1 from transcript clementine0.9_005814m (loc us clementine0.9_005814m.g) derived from phytozome v7.0 (c hr-ID scaffold_3; pos 5145191 to 5146300 reverse strand)
actcacggacttgctgccattgctgccgattgcaagtaaagtttcaatttttattttttaaaaaattgaatttttgagtttgttagttaagtagcaaaatgtgctaataattgatacggtgttgcatgttgttctcttttagctaattaagctaaaattctttttttttctcttctttttttttcgagtgggtagcgatgatgaatgtgcgaaaagatctcatttttatttttgctttctttttctaactaaagttatcattttgttcatctttcataattatctttgcggaaataacctcattatgtttgcttgacttggtagatttttaggtttagtttgtagacgtaaaatgtgaaatctttgtgtcttatttggggttgccttattttattttatttttaatttgcttttttttttcagtttcatagatctgttattgtgtttgtttttggaactgttaatgtgtaaaatctggtcaagattgcttgttttcttccggtagtccatgttctgggcaaatgccttccggaatcatgttttgtttcagcttcttgggcaatgtaggttttctttggattcctcaattatagatttctttttcatatgctgatgaagtggggagaatagttctcttgagtttgcttccttctaattatgtttttgaagattctgatgatttaattacttcaaaattggttcttgttttctgagagaactttgggtgttgtttttatatatatatatatatatatatatgttgaattaaaccttgcataatggaattgacaattttgggtttagtgtgagattcctggttgagtgagtagagcaatcaaataaaaagggaggaaaaaaatagcttcattttcttggtgctgtggttgtaaagaaaattagctttaataaccagtataccatgacaatgatggaactgagctgctaaaatttttcagtattctactttctcttatattatttggttatttctgttagtgggtagtttatggatttatgattatgtcattaatattttatacttacatcaaccttgcaatgatgtttgccattgcaggaacttgaaagagttagacttgtgggagagtgacg

SEQ ID NO: 9455 - DNA, 1738 bp, Citrus clementina
  Intron number 2 from transcript clementine0.9_010514m (loc us clementine0.9_010514m.g) derived from phytozome v7.0 (c hr-ID scaffold_9; pos 3860271 to 3862008 reverse strand)
ctgtgagtaccttttgcactattagtatttacttaaattttgccagtatgggacttaattacatgctcgaaagtatgagaatgtaatactgttttctagtatatggcttttgtttatatcctaattaattggaatgttccatggaatctcttaaagattgagaaatggattggagctttataagtatattatcatatgttggttgactctgtgcaaccactaaaacctttgtatagatggttaaagaatatactgaagctatgatactacagaatataagggtaatcacaatagcattgcatttctggcaacatatcgtcaaacacatattcttaataacatttggtgaaatgtttgtaagtcattacaatagacagcatattaccatctaaattaagcaaaacatcagcattgggaggcgatgtaggactggttttagcgtcaatagatttaggtcatttttctgaagaacaactgttgggtagatgagattctttctttagacttagttaggataatgatggtgtaacaatatgttctgatgtatattgaaatagtcaaacctgtggataatgttccagggtattgaattgtacttttgagcagtgaacaataatccagcttagagctgaatcaaactcaatggactgacatcctgttcagcaaaagagtatattgtcaaaataccctcaagactaaaacttgataaaactacaaaaataaagaactgatgccttgatcggctgtggtgaaccatcatttctagaccaaaaagatgcctttatgattatgttgggtatgatgttatgaattggcatataaagaaaactatatagtttttttgtaactatgcaattgacatggcgtgggacatgtgaacgtatagatttaggaatcattttattaaattactgcttgcccgaaaaacgtaagcttatgggtaaggccaacaacattatttaagttctaaatggtttttacatttagggctctggatcaaatacagcaataaggaatacagaaatcttaagcatgccttatttttaatcatttttgtaaagagatccaatcatttttgtaaagagatccatacacacgagaacttggtgaaactggctttgttgccatattaatttgctactcgacctaaaaatttaaagcttttatatttaatgttccgttaatattaattaagttctaatagtagctttggcatagctagtacatgaatgtgatgaaacgaaaggggacttattattgttgaagcaggtgagatttcaaatgagttgatttgcttctgtagtatcttatattttggaattaattactctctttggcctcactcttattaaccttaaatatttctatcaatataagattattttgtcgaaactcatcaaaacacttcagaaatgtgctgcttaaccttccaaagcgtgagaactttaacattgtcgatactctttctagtattcattctgttttacaaatataacttagtctgaaagaagaagatatgttccttttattgacactgtgtccaggtttgttgggagactagtgtgtcttgtgtgggttttgacaatgatatggctccttaaaatgcatcttgccatcaagtatatagatactgctattttcttattgtgggaacaattagtgaacttagcttttaattttctgtaaatcaatgcaattttgcttgtacatgctaaaattttctgagttgttctacagc

SEQ ID NO: 9456 - DNA, 1686 bp, Citrus clementina
  Intron number 4 from transcript clementine0.9_004442m (loc us clementine0.9_004442m.g) derived from phytozome v7.0 (c hr-ID scaffold_56; pos 808940 to 810625)
ttgtacgtcactcctcatctctcactctcactctctttgattctgcaaaataagatgcctttacgttgataaataaagaggtttaagattcgaagaggtgttcacatgagtgatcggactaccatagtctaaataattaaaaaaataaataaataaattatgaatcttcgccaacttgaattgagagcttagcaaagcattagcactctaacaataacactaatttgctacgatctcagctctaagtccacatattataaaagataaaaacattctcaccaaaactaaaaattaaaatcgtaaataaatatatatttaacatatgtttttgaatcgatgaggacaatactgtctatttctttatattatatatatgtttattgttgacaagtgcaatcggctgtgttcttccaagtttttaacacctagctttaccgttgataaacaccaatgagaagatctgttgccactggcgaagccaatataggaccaattggggtaagagccccagttagctttgaaaaaaattaaagaataattttaaatcagttcatagtggtcttatagataattttaaagaatatcaaatttaatccttgttaaatttttttttaaaaattattagttattttaattctataaacttgaattagccacacccaaatgaagacaaaagaaatttaacaaaataatagaataaataaataaataacataaaacaaaatataaaatagttttcctattttttccctcatgttcttctcctttttcttagttgtatgcatgcaaatattgcatattattatattgacaatgaaaccatcattaaaatacaaaaccgcatagagataacagcaataattgaaaatttatcgataaataataatataatataattgtagtgtcatatattatatttttaaatattttgaaattgtgttgtatttttttaaatatatatataaaagttataggtagacgtgagaaactctacccactaaattatcatccagactatgcaaaatacttttactgtcagttaaagctgcgctcatgccctgaattataagttgaatgtgccctgaattgaaacaattttttaactatgtccctgtttgttgccaaattgttggctaaggtctgcatgtttaacacgtgtcttttttttttttgggttaaaaatatttggggatgacacgagcataagcgagtggaagcatttttataagattaattcgataacttttttcaagcgtcaaaaatgaagcttgaaaaagttttagaccaaactatggagtcgccgtatgccagttgacacaactcaagaagacctacggtcagtgcaccaacttaccattttacccttgtctgctcttacaattatttctgaggagtaccaaattttattaaaccaggcttcttctgctgcccgtatattgtaattggaacctaatcagcacttcaggtttttaaaataaatagtcacagtcacagatacaatcatgtccaaaatttatcaaagccaaattagcattaaatatggccatgtagatgagaagtaaatgactggctttttatgtttctgctggtcaagctcaagtggcactgacagtcaacagcaaattgaataaatctatgttgaatggtgcagggcacgaaaagaccgaagctgttctgggtctcagc

SEQ ID NO: 9457 - DNA, 1248 bp, Citrus clementina
  Intron number 1 from transcript clementine0.9_001895m (loc us clementine0.9_001894m.g) derived from phytozome v7.0 (c hr-ID scaffold_8; pos 1034773 to 1036020 reverse strand)
attccttcgctctgaatttcctatacgtgcttcccgtatgtgtttttcttttcttcttattgacgttgaatttttggtgagaattttccgagacaaatttgcttgctgagaattttactgtttgaaactttcattcacgtaatgcttgttttgctattattagtttccgaggtattttgatcgactgctttgatgttatcagcttgcttaattcaagataacaagacactgtttggttatgtgaaaagaaaaaagtgttttttttttttttttgctcttttggtttgcggtttatatgttcatgtgtttgtgatgaacaaaaagggaaactgcttactgtatggagctattttctttatctattttttctccatcttttgtttttctgttaaaatgcaaaccaagcgaagtctcagagttttgaattttgaaaataagtgcgctctggtcctctgatagctggcgttgtttgtcctttggcttcgattaagactggtcagattatcttatctcaagattttcaatgttattgctgtgctgctaacatggaccactcaaaaattttcaatttctgggttccttcttgtcaagttacgcttcaatattcttcttcttgcttccagtttcaattttatgccgctcagagttgaaataaattttagttgatgtggagtcctcagttgtttttgagagtgttaaagctttgtcaattacggtttgtagctttgtcaggttacgaaattgaagaagacaaaaggtaagctgatgaaagatttacggccatttgatttgcatgattaatttcctagtctgtatatggagtgttgagggaccataactatttttagattctcaacatagtcttgactaagagatacagattgctgggatttgtaaattgaattgaaccggagaagagaagaatcgatcgttagctgctctgaatatcttacagatgtgcaatttgtaccaccagatattctggtagttaggagaattggctgatcttattctccaaaaatcaatctagtgggacacctgtccattcatcaagagaattactgcttgtttagggcattaacttatatctggtctctgtatgttaacataacatctggttttgttggcatttttctatgtaattagttgacaatacattcaatttttttatgttgttgtttttcatttttttttccttttcttgtacgtgcagtgtggattacattgctggacaagaaacacccaagc

SEQ ID NO: 9458 - DNA, 2344 bp, Citrus clementina
  Intron number 1 from transcript clementine0.9_008489m (loc us clementine0.9_008489m.g) derived from phytozome v7.0 (c hr-ID scaffold_16; pos 3726391 to 3728734 reverse strand)
gcgtgtccttgaccccagaacgagggttccaccaggtacttacctttgtttccaatttgatctctttctgttctgccacgttgcatgttatttaaacttagatctggtggcgttctgtatacgagccacgtgtttatttgttcgtttatttttgaatctgtggatcaccgtcgttgacttaggtcaatttttttcttttttggccctttctcgttttggttcgtatatatcgatttggacacgaaagccatgtggcatgagttcgagaagtgaatttgaaatttagattaaaatgacggagcacttccagataattagggtttctgacgccggcttcggattagaaagcgaacctgctcaacaaacaccgcttgaaatttacgaagcatctgcgatctgtcctaagaaacccacaacgtgtacacgacaaaattttatcatttggcatcgtgaacttccaagcaaggaccaccaacaaagcggcggctagctagctaaccgtaggacttaaatacattgttatggtattggtatacacgtatcatcaaggcatctagttttgtccccgtcaatagttcaaaactatttcttaatcaggattcgattagtttagttgccttccctaactacttccctagaagttattcttggacgggaaaatgacattcaagaccccgaagttggttctaatgtacaagtaaactcctacttcttaagaaatgaatacacaacatcgacctaaaagagggtgtttgtgtttatttttgaaccattgaaagtctatacgtagattagggcaaatccttaaggtttaagtgtgagtttgcctttggtttcattcgatatattatacgtactcttgccgccccaccgcatcgaggtaaagagtttcatacattcattctggtgacaagtgacaagtaatcttaccttagtaaccttaagcactaggctaatgttaagttacatgcatgtaccttacacccctctcacatgaatagtgaatgatgtgggtccacttactattcatgtgagagaattataaggtacatgcatgtaacttagagggatcctaagcactaagcactttcccagaagtcctttttgaataagaattatttgtggccacgcgccaatgcttctcgtggcttgagataaagtttcacaagaaaagaaaacaaaagtctaatagctgcctgctcaatgcaatagacatattcactttttccgtccgcttttgcccgtctttttcgttactttgtactgcaagcctgcaacgttgcggagtctttgcatggaaaaacgacacgtacctcagaaacgtgcagcacaggccaaaacctttacgtggtcctttgttgggttggttgggaattgatattgaatattttatttctgaaattagatattgaagaacatgttaggtgaaggaaattagaagaaattaattgcatgttttgcttagcataaaagcaagtactttagtgacaatgtttttatttgatatataagttttaacctttttttttttttggttataatgcagaaatgcacttctttatttgagaaagacctctggccaaaaatattatttatgattcttgtgaatgtagtttagccacgaaactagataagtaaatattccattgatttccttcaatccactttttaaaaatagacaattaaacttaaatcttcattgttgaaaaattaatatttatactccttttccgttattaagtttcatctatttggatgaagataagggcattataatcaacttcagtggacattataatatattcatcttattaggtattatatagttcattgatgctcttatattcttccaaatagatgatatttactaacgaaatgagatctaaatgttaatttctgacagtggggtttagctatttgttgaagtaaatcttagatgtatgtgttttattccattgagtgataaataatatatttagatgtttgagattggtttgtagaaaattatatgcgtggatcgatggtcaatcgtgaaaattgaaaagggaatttcttgcaatcgtaaaattatatgcatgatggcatagtcatttgagaatgcaaagttagccttaatggttaatataatatgaagccttttgttcctaggattttgtaaattataatgtgtcatatgttgacaacttttgtagtgcccgaaatttctttatgaattattgacatctttgtgttgtttataagattttatgttcattctttatggtggttgaacttgtattgataagactaaataagtttcatggtcttaatttctttttgcagttggacattagaggggatcctt

SEQ ID NO: 9459 - DNA, 2971 bp, Citrus clementina
  Intron number 2 from transcript clementine0.9_010062m (loc us clementine0.9_010062m.g) derived from phytozome v7.0 (c hr-ID scaffold_25; pos 2760903 to 2763873)
gattcagtatgtttataatcttgagacttggttttgtatgttcattaagttgcattcattgcagaacttccaatttccataatgtttcaatagttcaacatgtgcatgaaatgtggagctgtgtacccctttgtatttcagcattgggttcataaactcatattgcacgcatgtatttaatcctttgccgccattttgtcacacctcagtcttgcctctaaccatgttcagggttgtatctatgaagtttgataaatagggtcataatcttcactgaaagtttgtataggttaattgatttgacaagggcatcagattagtttgacagtcctaattgtcctacagaataaaatgtacaaaactgaattttttattttttatttcaggtgattaacttaattttcacaagtctcttgagtcagtacactttgatgcatcaaatagatcaggctttgagatcttccgcttttgtggatggtccttcaacattttttatgggcttttaccttagatataagggtttcattttgaacttttcttttttagaagaggaagcccattacttgtgggacaaacccatttgttgaatctctatgactatgggcctggtgtcaaaagattttaaaactgcttcttgaggtagtctttgttgttggggggatttttttttttttaataaaaatctctataaaaatttttatacaatagaactcttgatcataagaacaatagttccaaactgcacccttttagctttagtgattaaggcatatacattagcaatttcacttcatactcacatgggcctcttcgtcgtcttttttttttcccccctacttcccctgaaggggaacttagtacttgtatattaatggacaaaatagaagaagttacagacgtgaattcaaaactctgcatgtatgagcatgacaagaaaaatgaccaacgacgacaataactggctagatagatattattgtgatcaagagttctattttaatttttttttttataaatatgaagatgaacagagagagatagtttagatctcaggtggatttgggctatcatgcaggaaggttagcattgttttaggtttaattacaaagaatcacgaagatatgaatgacattccttccttaggttgttttggaaactatgatgctgatcatggcctttaactgctagtcgtttcctactattaatctgaaaatcaggggtagatatgagggtccaagagtgacagtggatgatattgacattacattctttcctgctacttcaactgcgtcacacaccttgtctgttttcaggaaaataaatcagtgattaacataatgaaactgttaaaggctgaacaatttggagtaacgaggaaaaggatcagtgagtcagaactgcaagcaatgataatggttcttacaatataaaacatatgagccaattgattttttttcattgcaatatgtttagtattctaatggaatcccataatacatgatgcgttgaattcgccacaagtaaaaacttctttgaagcattttaaattgcaacttgttcatgttactcttcttttctcttgtaattttctgtagggaaatggaattaaatatcaattaataagttcaacttcccacttcagatactctgtaatctgctataacttgtttgaagaattgagcttacaatcaaatgagagactaacacccgcgtgagagtttgatagcatacattgtgaaaaagactttgatagcttgggcatttaggttagtacataatactgttgagtgaataaatttatcaattgatatataagtgtttgtactggattttgatcaaatgcgcactgtcgcacatgttatagtacgtgacagacatgactcgtcttgactttgcattggtggggctgttatgtgggcccatctgcccccaataaaatggtgacatgtgtgctatcacgcatgttatattgcgtgatggcatgcataatgtcggccttcatttgtatttatatgcttttagcaattgttgctgaattactgggtcagcctattatgaagattgagaactggctgttttagcttgtcacgggagaaacttcagtaattaaatattgaagtattttgttaatcttagtagttaataccataaaccaatgcagcttgtgcaatgttttcaaataatgtctggctacttgaattggagtatggcaagcatttgacctgtatgttatcagaacaccctccaattacatgctacctcacatacacaaatcatttgtgatgcatttatgatggttttgtatttaatgagaaatatatatgtggtgtcatgcaatcagatagtagcgtgagacgtggtggtgcaggcattagctagaactttttcccaggatggggaaatataatggtgcaatatcgtagtctcactctaatgaagcaaattatattgttattttatgttctcatttaattatataacaaatggttgagtgctccttttatattcagtaagattttcttatcatcggttaacactaattctaaatgttgttgggatgattagaaagggacacaagtctatcaatttgttgacatgtatcatgaagattacaaactttatatactgatgtgacagatctttttcctggaatagattttttgtttttcttttgcatttggtgtcagccattgatgaatcagtgattcacttttagcgtcagcatgattccctctaaatttcttttaaccatggctggattcttggtgatttactgattttgatatacccaagaacattgtactacgttgaacttttgaagaaccattatcattgcttgcatttctgactcactgatccttttcctcgttactcaaaaattttcagcctttaacagtttcattatgttaatcactgatttattttcctgaaaacagacaaggtgtgtgacgcggttgaagtagcaggaaag

SEQ ID NO: 9460 - DNA, 4822 bp, Citrus clementina
  Intron number 5 from transcript clementine0.9_021108m (loc us clementine0.9_016905m.g) derived from phytozome v7.0 (c hr-ID scaffold_123; pos 179467 to 184288 reverse strand)
agagtttgctttggacattgaggactatcttatcggtgagcattctgatgaatgtcatatatattaagagattgcttctatgaatcaatataacttattgtaatgatgctatgttctgctaagattagtttcacattaaatatatgcatttttcactactctgtgtatatatgtttagcacgactgacattggttaatggcctttttaggtacagctaataacccaaaaaccaaaaacagacatgttttatgtttttgatagtcttacgagtggttgaatgatctaataatgatttaaaataaggccatatggttggttggggctgatagctttcatgactcgaggttagtctagggggttgattggcttggtttgtgaaacattcagtactaagtaatcagcatttctatgatctgtaggagatgataagtgaaattgaggaaaaactccttgaagtatcgttgaaatttccctagatagggatggacacctcaatttttaagaagtcccatatattgtagttctagtgctagataattaaagagtgttattgtaagagcattattgtaagagtagtactagggatacaaacactactcatataaatgtttgatgtacctaccttaggatgtaattatcctagctatgccagctataataaacataaaaagtataggaaacgttataaacggtataagcaaccatatggacataatagtaggaaattctatagaaaaaatttcttaaagtatagaagtgttttttacttggaaaagatggatatattaaaccacattgctagaaaataaaaaggttaattaatttgaaatagatagttgcaatataaacgagcaattagtagatatagaagaaatattcaatatagatgaactattagataatgatagtatatgtaatcttagtgaatatagtagtgaatcagaaacaagcaaaagttcaaaatcagaaattcaagtaaatagtttggaaacttatacatcattttttggtaaaaactatgccatctgcaaaataaaaaaaaattcaaattaggatatagagaaacaaccacagataaattcttttgtaataattgtaatgattataataaacaagaagataaaataggatagataaatagagcaggtagtgaactaataaacattaatttagagtgattatttaaaaaagaaacaatttacaattaaagcaatgaccgacacagaagctaataaatgtataatacatgacagtttagttccaaaagaaagcaaaaataagttaagaagtccaataaattttagataatctgatggagaaataatgaaaatagcagaataagcaatctaccaattacaataaatggcgaaatgcagatattacctcagacattcatttctaatcaaaagtaggatgtaaatttattctaggattagactttatagtagaaaataatggtagtattttctttttttgaaaattctttttttgaactattagtatactaatagttccaaacggagtaaatttcttaaaaaaatcatcaacatttatacaaccaaaatttgaaacacatgttttaccatatgaaaagaagtcaacaatggcaaaagagaagcagacatacaattctttggttctttgttagaagaagaaagtacaattgaaagtaacaagctagaaatattagatgactatgaaataagactcaagcttaagttaggaaactcctaactgtgaaataacgaagaactacaaattctaaaactgataagagactaaatagctccacacactaaggtgtcatgaagtattggaggaatttaatagcactagtctaatctaccaacctcagctattacaagtgaaaaccacgtcctgattggaccaacaacaaaactaaaacacaacaataccacaacaaaacaacaaaacatacagccacccttaaagcaattcacgggatacctctttgtgagccctttctctaggccatcaaaatcttgacgcaccactattagagccatagcgctgtcccaatacacgcataccctctcgatttggacagtttagctacaatttaaaggttttatgcatttcatgaagcaattgatctgtatatttttgtgatcactgtgaagtcctggcactcacagttagaaagcttaatgatatatgatatcatttaagaagcatgtagacagaaaataatacaattagaaagtattaatagagaattaaatagctagatcattgcattacaaaataaatgccatacattagacatcaagcattgtagtagccggataatacaaatatcagtattaagaaaggaacgggatgagcctgaaaaatggaatttctctctttttccataagcagaatatccacttccagcatatttagttctaaaaaattctaaaaattagactggaagtaggaaaaatagctttagataaacaattatacattatgagatttttgaatgacttagtcatattaaaaataaatatcagaggattaagtgttgtatgggatacccaatatgatacaaaatatataacttgtccaaaagaagacctctacgtaaatctataccctatatgtaaatctatccttttagaaagatttgcttgtaaatatcatctcatctttagcatagctttaacatgtatagatttgtctaaatatgaacccatagaaagagataataagggaagaaaattagtataaacacttactttactcttagattatggcttatttggtagaaagatggtagcaattgttttaaactcctctgcaatatctaataatcctttgtagaattatagatagtaaaccgcatgagtgggatgaatcaggatttacaccagctcaacattagataatagtaagatttcgtagatttagacctctactttttgcaatagaatttccttggccatctaaatattttagcttagaagaaaaacttaaacattggaggagcggagtaattgctagacaattttattggacacattacgagtttgaggatttcaaattagtaatcaaagatgcaattcaaaaaaatctactctaaacttagaaatacttttcataaccaagactacgtacacaaagctaattcagcactatgctaaagagttcaaagaagaaacgaaagctcggtgaaaacaaagaagatttggcccaatgagaagcaaaatggtgggactgattagaagatgaagaaagagactattgaaaatgccatggaaaattagctagttgttttagatagaatctccaaaagtcaaatagtcagctttttctttatttcaactttatagatgtccttcttactcgataagaaaaaaactgtgaaggcatctatttagtatttgtttttttcttaccgacgcttactcaccaataatttattgtagtcagtcaagtcttttgctatttactttttggtcggttaattgtcacaagcccatacgtacatttaatctcaatttcttatctctttgtacctagagtcaataattgcagatcgtaatcgaatcgtaattgattacaaacgtcttgtattcataaaaaaaaaaaagcaataaaaatccttcttcatatccctttccgtacttagtaaatttagacatcagttgcaaagtgaaataagtcattagtctcgcctagttaatgaaaatataatttatatttgaagtatcaacaaaaggcaggtccttgttattattcaagggaaaagagattggaaaaaagtttttgagacaagtttttgttttgacaaaaatattaaaaactcagtagaagtttctgttgaatttctgaaaacttcttttgaagaacatggtctcggttgacctaattttctcgataatatgctgttttgaaaaaggctttttgagtgtgagtcaggagtttgaagcgtgtttttataattatatttttagaatcaaaaccagtgttaataaaactttgaaaggcccatttttgcgcaattctctcttcatctacttgcctcctttttactacttaatgaagtgtcttgtgcagccaaaatcacacttatactctttggttttattgtatcattttttttttctttccctgcattcctcttgaggttagcaccaaacacactcttcttctctatggtctaagccagtaagttgtaacctcatttccaatccatcaaaagaggaagagtagagctatttaaccccttattttatctcagcagacccaattttttagaggtacacatcatcaaaagttttgaaaatatccaactatcttattgggatcactagaaagaaattcatatgcataccattgatactttggagggtcaatttctcactgtgcaatttgaattgtagaatttagtatattcaccattttttcataaagagagtttttagagttttggtttgaaggtgagatgagaagacaatgagaaagacgaatggttaataatatgataattttggaaaactgatgaagtccaatattggatggtgccggtttttctgctaattcaacctctgtgggccaacttttattatttattattatgagcttcattttaactgttggattagatcaaacagctggtattttctaggctggaggaaaaacactgcattgaagtgtccgtttttcttcttataagaaaatgtgtctgcttttcttgtcttttaacttggccctcgattaaagtgaggatcatctcattagattcttttttctccatatatatagacctactgatggagaactttgtatattctgcaggtctttgtttcctgtcca

SEQ ID NO: 9461 - DNA, 1450 bp, Citrus clementina
  Intron number 2 from transcript clementine0.9_004059m (loc us clementine0.9_004062m.g) derived from phytozome v7.0 (c hr-ID scaffold_12; pos 3819240 to 3820689 reverse strand)
tgttgaactaggtgctggtctagtgaaagactcgggtattttgcttcatctcagttttcatggatttctgtgtctgttatattatctagttaatgttattgttctttttaagggaaaaaaactcatatttttcgtttagaaaccatctgagcatcacttatgtataaaaagattgagcttttcctgcatcttttcgattcaagatttcctcgagagtttctggagtttggattatgattctaggttaatatacaatgtgtgaacttttgattagttgtcttttggaatttttatgcgctggtgacaggacagctcattctttgatatcagatcactttaagattggaactgaatttaataagaaaaaatggtttttttagcgctgctcgttttatatatttgtttcttgtccagtttacatcggttatatattttgtgccttgtttatgtccaccttaatcttttaaatttccatcaggggctcctgcctctgcttatcctgtgttggtatcatgaactgtgtatatcctgatacacatgattaaaatgggggatgtttgatttgtgcttcaaaaagtgttttctaaaaacgaggatatggatgtgattgggtgcattttcaaagacaacagtgaaaaaggctgtcactaaaatgatttctgagacagtttttgagaaattctaaattaaatgcttgttttggaagattttatgcatttcttgttttaagaaatcaaggatttggttatatcttccaaatttgctgttccacaattaattccttttgtccagaagtggaatattttatcttaaattaggaaacattgtatggcctaaatattctctgatttttcaacagtccatatgcatattaactatggtgttctattaactattttactaagtatgggcagtgaaaaagttaaaactattgccatttagtgtggaaagaaagtttactttagacattattctccctacaattttgttgtcatcgtgaataattgattattgaattctttaatttttatttactctggtagccacctcttgaaaaatgttctattttgtttcttgttgccatgatacctagttatacaaattgccttccagttactttcatttagacaacaatatcctgtacttatcatgaaattttgttgtgaaacaggatgatcaactgctatgattttcttgtgaaggagtattgtttgctcagttccattttctgttgtttcaactgatcaatccaagtccgtgttaaataaacttctattaaaatggatcgttgtgacacttcaggatttgttagtgggggtgggatacacactttgagtgacatctaaccgtagttttgtagctaattgctctcattgtggaagtcaggttgactgttctgttgtaattaagtttaggtttggttatcataaagccattcatctatcactta

SEQ ID NO: 9462 - DNA, 2424 bp, Citrus clementina
  Intron number 1 from transcript clementine0.9_002526m (loc us clementine0.9_002526m.g) derived from phytozome v7.0 (c hr-ID scaffold_126; pos 100407 to 102830)
aattttacgttatttggacaatgtttaaactcatggctatttgaattgcaagagaaaacaaaatagcttaggtgctagggttacttcttggtagttctgaagtttaggactcacatttactccacttgcttagttagatgatgccttcagaatggggatgggcttaaacaccccttacaatacaattttgaggatgctgctccccccaaatttaaaatcatcagcattgttccagtttgattagcttaagccccgtccgaatcaccattaagtatttgcaaatttgagtctcagtagcctctaagaatctgcagaattagaggacatatttttcataggggtgtttagaacccaatctgattcgctcaatctgtctaatctgcaaaaattcgatctgtgattagtggataactggatataattgaattgaaaatttaaaaatccgtagttggtggattggatataaatttacttctttaaattcgcaaaaatccataaataaaaaaaaattcattttataaaaaaaataaaacttataaatgtagtattgctacttactaataaataaataagttaaaatatagttaaattaatactatattatatcttattcgataataatataaaatataaaataattaaatatttgaataattaaataagcaaatatagctcaacattaaaaattctaaaacaaaacaaaaaaccctaaactaaatagaacactttagcacataacatcagacctctaccccactgcacacataagccatcgctgttttgcttcaccacttgaggtgattaagcttaatttcttactttcttttcgagtttttcaatctcttcaagtttcttaatttcttctgttacatccaagctctcaggtttcaatttatgtatatatttaaattcataattttagttaattttcatgtattgttctaaacaaatgagatttttttctttttagagtgttatattttgaaactttcgatgtattatcctaactttatctaaactaatttatctaaatcttattcaattttgactttaatcggtagtaaaattatttttatattagattttttaaatttaattacttcgtagattagacaaaattaaaaatttttaatttgcaaatcaatcagcaaaatggtggattgaatatggattgaatcaagtttgaatccgatccatcgacatataaattgaattttatcaatccgtggattggaaatttataatctgtaaaatcatggatcagatatagattgatgtccaatccacaaaatccgatccgcgaacacccctaattttttccaatgaagtgtggtgactaatttatccaactaatctagttctaaaacctttattattattattttttaaagatattagtgaaatgaaagttacgattgattttagattaaaaactattatgatggttcacattagtaggaaatgtcatttcaggctgacacaggattactctaaataatttatgttaaaaatcaacacctctaagagataccaagctccacttccaatgtgaaaaagaacacaacatgaaggcctaatagtagcagagttacccatttacgttttaactattgttcaccttttgcagaactaatgccaagaacttgtgagatctgtggcacaaacctgattccttatccccttagcactggtccaaaatgtggtgatgctgcttactttaacttccactgcaacatctccacaggccaggttagctttcaggcacctggtggcacattcaaagtcacaagaatcaatccagaaactcaaaaatttgtcatccaaaccaaagttggagagaattgtgaaggaggcaattcaagagccgagtttttgcatcttgaccagtcttcaccttttcatgtcactggctggtgcaatgcagatccacttgcaggtactaatgaagtggagatattatgggaaccatcaccagagctgacttgctcgtcatctgcagactgcaagggatggccaaattcttcatgcaatgaaacaagagatgggaagaaaaggtgcctttgtgatagaaactttcaatgggatagcgcaagtttaagttgtagtaaaggtgagaccactatttatctaaagcacacggtgttctgcttttcatgctcagagaggaaaaagagtatagaataattattgccatgaaattgactgtagattgtaattatatatggggattacatatagaattatatttctcatggactctaaaagtaaataaacatgtgagaggatgaagtatgaagtttgactgaatgcaatatggaatttactgccatggaaaaactcaaacatttggaaatatttatgcactttatttgtatgaatgggaatatttttttactcttgtaggtggtgacaggaagcacagat

SEQ ID NO: 9463 - DNA, 4191 bp, Citrus clementina
  Intron number 3 from transcript clementine0.9_028521m (loc us clementine0.9_028521m.g) derived from phytozome v7.0 (c hr-ID scaffold_1; pos 1904640 to 1908830 reverse strand)
gggaaggttttccacagttgaagcatcttaatgtaacatattgctcttgttgggaaaaatcaggtttttaaatttttataaaaccttttgaagatcgctctcatataatatataagaatttgtattctagaaatcgtaccttgaaaatccgatttggctttttccgttgaagtgatttaggctcctagatcacgatccgccaccaccactcctgttagatcacgatcctgcaccaacacgcttgttagatcatgaactgtcaccaatgatcttccagcttatgactcaggttcgatctgcacttgacgtgtgggcgcctttatcactaccaaagcaactagcacgagaaaatttttctctcaacaatagagagaaaaatctttttctctgatctgtataaagtggctccacctttttcttttaagaaaataagccttatatatctccctttagtgaaaaccctacacggtacttttcatttaataggggacccaccatgtaaaataacataaggccccttacataagctaattaaatggagcctctcactaaatgatatatttaggcttttggcccaaatagctagttatcttgcttattagtccagtagtggtgcagtcaattaaatgagctaacccggggatcatttgggaacatacaatagtggctataacaattaggcctgtaattaaactagcctaattatttaattccaaatctactccactaaaagattggaactgacttccataattgtatgctcgaataataattcgtcccaagccacattgatttctttactgcacaatcctttgtaccacatcgttaattaaattgatatctcaactgtccaatcaatttaataccatctttttccttgatccttactggttttctctaatgatcattttcaacatactaaatatgttgacgcactttggccagagaattcaatgatcaagtgccgaaaacctatcaagagatgtgttgtacaaattctatattgttaatccataactccaatactcataattgctcccaccaagataccgggtaatcttgaccacaagtatgtgtcgtgcccattggtaactcaaatggaataacaattacaatcatgaaatcataattaactcaagattaagattacagtaaaatcaatgcctatgagatttaataagtctgacagttattacaaagttaattaaatctcatatgtgatcctgttcaatgtagtcgtactacatcaataaattcatacatgattaagacaaatcattcaatgaatttattacagtttatacctaaataaagtgcccaactttatttatcaactgcgaactaaacttatttaatcataagataacttgtatttatgtcttctgtgaatccacatggtgatcacataaatacatataatatgattaaatggactttaatacaaatattaatgtaattaagatatttgaataaaatacctcatttattttattaatcagaaaaattgtttattacaattaaagaaacacatatgcttttaaagagcatattttcccaacaactctaagattttacatattgtcggttcagttggacgggttcgttgcgaagtctttccctggctggagtcattgtctcttatgtttttaactaatttggagacgatatgctacagccaactcagagaagatcaatccttcagcaacttaaggattataaaagtagctttttgtggcaaattgaagcatctcttctcattctctgtggctaaaaacctattgcggcttcataaagtagaagtggaagattgccgtgaaatgaaaatgattattggtaagtgttgaaattaattattggtaggattattgacattggctcattcttcttttttttttggtgaaaaaaacaatagaggttaattatatattgtttttgttcatttatagggcccgacaaggagaaaccaacaactactcagggattcaaagaaatcattgcagaggatgatcatgttcacaaggtgaaaattttttgtttaataattaattaattgattgattaattatttaattaatattatcacgattgatcttcagtcatcaaaagaatattatattagatagttgtagttgaaggaacaaaaatgtgttaagaataacatatgatgagtcagctgctgagtcatcaagccacgctggaagtcagttttgcagttagttatagagcttatcagcttccctccaaaagtttgttatgtgtattagaatctgtgctcacgagttttgtgagattgtaaccttgaaaagattctcacactactgtaaattgtattgtgactcaattataaaagtgttgttgaagctttgagttcttctgagcaatatttgctgtcatgttatgcatcacatcaccagcaatttttcctttcttttgctcaactctattttcatgattcaacaacaaagaatatagttcatctaatgtgatcttttcacctcgagctaacacagctgtggctaaagactcatagtctgatgaatcaagaccagttaatatatgcatcagaagatcatttaacttaataggttttccagctagagctaaagtatcagctatgcgttttacttttacaaaataatcagacatatgcattgcacctttcttaatagtttgaatttgcattctaagtgtttgaattctagcttgtgattgagagataaacatactagcaagagtctcccaaagctgttttgaagttgtagaatcaatcacagtagcaagcagattttgctgtatcgatgacatcatccaactcagtaagagttggtcagtcttcatccaagctacgaattctggattaatagatctggatccagattcagttaaaacttcagctccattgttgtttccagaagaaaggaactgctcaggacattctcgatcgccattgataaacccttccaaactgtttcctttgattgaagttaaaatttgtgtgcgccaccgaatgaagttgttttgatctagctttactggcgtaacatggcgtaacaaaactgaaagagttgttgttttgaactatatttgccatttatggctctgataccatgaaagaaacttagttctatattgtttggtaggctagaaaatgaaagaaaaaaaaaaaagagctttgcaaagaaatctgttggatcttttattattccaagcttacagtttaatgactactgattaatatttatattgagctacaatctctttacacacacacgagattgttgcaacacataaccatttgctgtataactaacttgacacataagctcaaccagctaactaactttgacaggttagcttaatgatttgatctgctacaaccagctacatagcaacatcatgctctgctccagcttcatctaattcactaacaaagaacattttggtctactatttcctttactacgggaactaaaaatcatggatcttccaaaactcaaaagattttgcaactccaacgagagtataattgaactacctaagttgtggcatctgaccattgagaattgccctaatatgaaaacattcatctccaattctatgtctgcgcagcacatgacagcggataataaggaacctcaagaaataaaatcagagaacttccagctagctgatcatatagaaccacccttcgatgaaaaggtggttattattattattattattattattattattattattattattattattatttcttcttcactttcattcgcataggtgtaatttcattagactcaaaatcaaatttaatgactcatcttcctagaagttgtcttaatttatatatgatttaacagtattattgttattattaactaactttacaataagaattataaaaatgtctcaaattaattagatgatcggtaacatggtgtgaattatatccattttacgccttacatctctgttttcctagctaattcatattggatttagcattagatttgatttatgtgtttcaagggtaattaatttgtttgtttttttttggttccttccaaaaatgaaaccaatttgaatataaaatgttgggaggactgcagagattagttatgtattttctttacaacttaagtttgttgattttcaggttgcattccccaaattgagacggttaaagctgtc

SEQ ID NO: 9464 - DNA, 1898 bp, Citrus clementina
  Intron number 3 from transcript clementine0.9_025839m (loc us clementine0.9_025864m.g) derived from phytozome v7.0 (c hr-ID scaffold_2; pos 2162160 to 2164057 reverse strand)
tgaccaaattaggcttcttgctcaaacaattgaaagtgagttactgtctgttagctttttattttgtttcttgcgcctgttttttatttggtagcccgaatcctgaagctcatgaagagtttgggcatctacgcttttaggttttagctggttgtgttgcgttatagtttatgattatgttttgttgttatttaaggcaagctatgtgtgagattatggagttcactgatattttgaaatttattaagttggacaattcactttccttttaaggctattcaagctcttcttaagtcaactgactagtggaaatttgaattgctacactttctttttcagtgcacgcaccctcgtataaattgtcattaccataatcttagaacccatttgatagatcagttaaaatacagataggatgactcttcttatgtagtgtttggtatgcttcgaaggaccagtaagattgaaaggatgcgattcatccatagtggactgaataagacgatcagttgagggcagttgggataaacatcatcaacaacttggtgaatgaccaaaaatgttatatatttcaatttcccacaattcttctgtgtttgctggacagtttttaacagaacctacagggaaaacctgtacattatttttcccaccattcttttgtagctcagggatttctagccaacacatttactcaggaaaatcaaattttctgaccatttgaaaactcaaaacagacaggaaacagaaatgaactgttggttgatggtgatagtgtttgtgctattctgagggcttttgtcttctttattgtattaggatctgtgatgcttctgatgggaaacttattaggttttgctagccaatgtgatatgtaattaatgtttttgagtttataggatacgatgggattttagaatatctaacatggtcaaggcagcaagtaattgcatgtggtaaactagccttgtgagtattattgttccaagagattctaatttccgttatctttttaaggtgtgcgaactgactggcatggctaagaagaaaatgattatattctaaatattggtaagtttatattcatttaggctgacactctattaatatttaaaaaactaatcctaatcatgtagtagaggaaaaggtgtctttttcttttgtctcttgaaattttgtatacattgccttcaatgttgtttcatttagaggataatctctagttgctacttaaattatatgcctgcactttccttatatattttctgtcttttgtaacatatatctctttttcattgattcattagagaaatgaatggctaaaattacctgttgaataaagtggacagtatgaaccattgcattcataagcaccttcagctgtcattttattatcttatttcataagatatttatacatgcttgcttagttcatcctgcctgatcataggtgaaatttttctgtcatttttattcccgtgcttttggcttctagcaagcaatatttgtagcatataaaatgttcagtggccagagatgaaaaccgtcaccatactgaacatggtttaaaagatggtaacaagctgaattagtgcaggcatgaagtgattgaacaactcattgaaacaaagttaagtttcaataatctgtaatggggacatggcccttgaatgagtcaagttccagtatgactctctattgagagtgttctgcagttgtgctgcatctcacttgcaataacattaatgccttggcaaatgatgaacattgtattccctatagcggcatgtatttttttgctaccttgtgcttttatattactatgtatgtatactgattgctgtgtttcttgtttttttgtagggctgccacttcttcaccacctcaaacacgcctgt

SEQ ID NO: 9465 - DNA, 5096 bp, Citrus clementina
  Intron number 9 from transcript clementine0.9_003477m (loc us clementine0.9_003477m.g) derived from phytozome v7.0 (c hr-ID scaffold_107; pos 639588 to 644683 reverse strand)
ttgacaaggtaaccggctgaaagtgtttcattaccatgtttaatgattattgatgccttttgatttgggtatcaatttttatgatgggaaattctatgtttgaaaaggcaagttgattaattgattgaggttataatcatttttgttgtttgcaccttataggtggtcgcatttcttctcttaaacaaaaaaattgcaaaaatttatggtagttaaataatttttatgcctcctttatgaaaatataatatgttttcaataaccaaagaatttcttccaagtatcgggtgttgtaggaacaaaataatagatatagagaacagaaatggagaagaaaagattagaaagagattcaagaaagggatccagctatggtaccacagttgaaccatatagccccttttgacttttgtgactttacaactaaaaatttcattaagcaccttacactttctcttatttgcaaaatatatacaagtactatggtactttctacttacttacatggccaaaattcaatttagcatcttgcactctttttaatttgcagtttttttataagtattgaagtattttttgtttacatccaaattacatttataagcatgaagtgctctattaaaaaagcatcttattctttcattctcttatcttagcaatagttatctatatttttatgggtaaatttggttgttattatccaaataaattaattattattatccaaatcaaatatattatttattactaatctaattttattattagagaagtcatatgtcaacccaactattagtttttgtgatgaattggatggttgacaacaagttgactttttgtttagaaaaaaaaaaggacaataaattgatggtgaaattattgaacccacaaaactgctcaacgcaactatttctcaccacacccttcattaatttttagaaaaccatatttttacttgaatattcagcataattccagttttcttcttctccttccccattgaaacaagtgataccaacgaacaccattgcccttaaactaaagttttaatcctgcaactttaataacaaattgaactcattcacccatgaaatcaacagcacaaataaacacaaatgactttgacaagttagaattcttttcatttgcaacatatggagattagacctatatactacactgcagaagatccataaattgagtagaattttaattctcatttagataattgaaaactttgacaataaaattatgttaggatgacaaataaaaaaaagtagaatttaggaaatagataaataagcgttattgaatggttaattggttatagaaatggatgtagaaaataaaatcatttcatttaataatagagtttgtctttaattcgtaagttattctatgggtattatattagtgataattttatcttttttaaagatgggtttgtagagtattttgatgggttcaaatatcctacttaaagttttatgtatcattttataaactcatcttaatacccaatatacccttacaaactaattcatgcatgatttttttcaggcagctgctaagtttcatatgttacattatatggaacttatagttgacccaaaagtagtgtcctatgaccctctagttgttggacatgcaacaattcagtcatgcaaaaaaaacctgatcttgggtttatgtaagttaaagatgatgtaacttagcaaaactcttttttaactttttttttctcgattgtttttgcctcttcgtcctctatctctccgaccctttcccatctctctctccagtcttttatttcttcatacccaaagtccaaatcctttatcttcttatggaattctttttcttcccttgtattacgaaggtattatcctaaactgatataaaacatatgaacattatgcataaattaaatgataataaaattattgttctaatcatcagaacaactaaatttaatgaaactaacatttgtccatcatggcctagctgtattgtctgaaccaaggaaagatatttggttgtttgaatctgaaaaagcttaactaagagcatttaattctaatgagctttaccagtgacaaagtttttaccagatgaatatgcccgttgacggtaggagaagaagaacgaaaaaacaaaaaaagaagagcataaggtgataaatgaaatttaactatgtatttagacaaaaatttctttaatacttatgaggaggctctcaatgaaattttcagttgttaagtcacaaaagacaaaagtgaggttatggtacaactgtaggtaccatagccagatcctcaagaacgaagatacagaagttagagattatcttcttggccaaaataggatagaaatgagttgatgactttttctaattcttttaaagtcttcttgactgactactcatctcatcttcatttttattctctcattcatacctgttaaaaccacagtttatggctataaatcttctggtaaggagaaaatagtaaatgcctcgctgctcaatagtgagaatggtgccaataaatgcactttggcactttggtctcagattttcaattttgctgcagtttggattaagtatgtcttatataagggaggtacccatggtagcaaacttttaacaaaaattgtttctcagttttagatcattggatcaatatacattcagcaattgagattgtcttacctgtgtaattaaagcaccataattaatacacatcaagatgcaatctcaactgttcaaagtgtatcaatccaatggtctaaaaatttgtgtgaaacattgtgtgaaaatgagtgcccatgattcattcagccacacagataacaacccttttcttttaacaggtttggactgagtttaagtttctagtttttaaactaattaataagcagtgaacaccgccatcaattttaaattattccctcctccccccactcttctccacccccccaaattgtattatgctacatgtttggttaaaattaaagtataacatgtctttatcattttcccatgtgtgtagcgacttaaataagggcatctttactgacactactattcaaaggcatgcctactgaatagagatgcccttttagtcaccagctaaatagaagaaactatgaaggcatcttatactttaatatttagccagacacgtatgaatgttatcttatctcttatcttttaagagtcttagttagacacatagaaaagatgtacggtttaactctttaccgataataccaagatggtctgcataaatataatctcattgagcatttcaatgaagataaaaatggcttaaagtaagaatgtaaattgaggattcgatgatatgttagcgtaactcttaagaatttacaccaaaattcttttggataaacattttttattttaaaattttcttctggatctttgatggttttaagactttggcttttgggtttgtttaagcatgtgaaagtttagcagtgatgagatttgcacaaaaagttgctcaaacgaaatgcacaaaatcactaaagaatatgaatatttttgtctttagtggttttgtgcaaatatcagtgctcaaagtttggagttttgatgtgagacagaaaagaataggacaagaaagaaagagaagataggaaaaaataattaattattaatgatgggatctacagttaattaaataatttttgaaaaacacagaatttcatgtatgttctaatcttaattattgaatgatttttgatatggtggttagaaatttgtgtcaaaagttgtgtaaaggaatagggactgctgagcttgttattcttataatcttattttatgtatatgtgtgcgcacattcccattggattgattttccatacaaattgtagcaaaattatgggcttcctgacttaattaagtactgtatatttatatactattcttatctattagggatatccttgggataccataataatggtcagtggaatttttgtagctcacaattcattgtcttttgtgtgataataaagcttgctgatgtcgacgaaaaagttgtccttttattacacaaaagtgaatgaatacccattggattatcattatgtcatgttctttctaaaaagatatgggaatcttaattagagaagaagtgtttgtatcaaagtaatggagttttaaattagcttgttgtgcatttacagtttagggacagaaaaatgccccactgtgtaatgaagctgtgactagaaggagaatactgttgaaaggtaaccatgaccacattctaagaataatgccccaggaacttaacatatagaatgaatcctaacagaatgaaatttgcattgcattcactttgaatagtatgcatgatctgtggaaagaactatcctaatgggtgatgaatgcatagatagtgatattatgttggttccctacttgagactattctgtaatatatatgatgtataggtagagacgggtgtagccagcataggacgctttaaaaagtttttttgatggttatcttaaaaaaatatattttatttattatttataaaaatgccccaggtgaattgcaaaattctgaaagtgccacgtaattttaaaaaaatttcatgctgcccctaacttaaatgtctaattctaaataatttgattagctattataatttcatgaaaattaataaagacaacaagagaaccgcctttatcaaatgaaatccattaaaatatcaattaaaacaaataaaatctaaaacaaatataaaatttcaaaattatattatattttaaatgtgccccagcccaattaaattcctggctacatccctgggtagagatcctgataaagcaaacttcctcgttgcagttattattaattttacaaaaggcggtgcagatgctctggttctagattgtaatagtatatttttagttacatagttttatatcctaaagctaatacaagatttatgcatacgtcaacatcttttaaattaacccatatgttcatctcatgtcatattcttgtttttttctcttagccgctcagaacatcgattgcttcttagatccgata

SEQ ID NO: 9466 - DNA, 2639 bp, Citrus clementina
  Intron number 1 from transcript clementine0.9_031587m (loc us clementine0.9_031587m.g) derived from phytozome v7.0 (c hr-ID scaffold_4; pos 3392526 to 3395164)
atgtgagttcttccatgcctttaatattttttcatgcagcattgacaagtttccgtttacaaattttgaacctcttgtttttttgacaaaattatgtcaggccgctaatcaatgagatcataaaaggaatatcgtcaccttcttattgatctataatataaaataactccttgacactaaaaattaaaaaaaaaaaggaataaatgatccatttatttgatatttggtctcaagaatataaaatatatatttatgataaaaataattaaaataataaaagtttaagcaaaaatatcttattattaatttttttacaccaaaatctatatatcttttaatatttaaattttttatttatttgatttatttaatttatgatatatatgaataaaagagttgaaaataagcttaatattttaaaattatggtgaaggaaattattaggtattatgaaaataatagggaactaaatggtaaaaaaactaccaatctcccaacataaaatcatagaatattgtttaaaataaaataaattcaaaaatttatatctacatatttttttttttgaatgataataagaagaattgtagccttttttgatgcgtctaatattccatatttgaccatgattaaattaatccgcactaaaaattgcgaaaataagaaatatttgacaacaaaagagaaaaggatgatctctgaaaacaggaacttattctttaagtagccatttatgtatacatgatgtgtagtttatactttatagaaataaaaagcaaacaagaatatgaaatattcttcgaaattctggatgcatagtaattaattatatgtaagaataagaatttcgccatatcaatcctatgcaatttttcatattcttgtttgcttcgaaattctggatgcatagtaattaattatatgtaagaataagaatttcgccatatcaattctatgcaattttttttgtttgggggggggggggggggggtggtttatttaaaaaaattttaggaaattaaattttaatttctttttggaaaaaatttccttcccaataaaaatatggagaaaaatttcataaaaaaattttctaaaaaatgggataaaattgtaaaaatttcattttttccccccgggattttttatttttttttttccaaaaattttaacccatttttctgccaaatttttggcctttcgtttgtataaatttttttttggaaaaattaaaatgtccaataatttaggcttttgagtgacctctgacatatatatattttaagtcttgggtatcaaatatattataccatgtgatgcacaacgagatccattatatggataaaaatttcaaattttgtgttaattttttttttactaaggcaacgtttcgactctattgtcattagaagttaattaattaatttcttctatttcttcttcttcttcttattattgttattattgttatttggtgtgtgtgtgtgtgtgtgtgtgtgtttgaaatattggaatgtaacattaaaaatccctctcatacgccaatttaataggaaaacaataggcatatttaattctttttctaaaaatataaacaatcatattcaatagttaaggacagatttaaaataataaagtgatgtgaggcccgagagaaatagaaggaaagggttttatatattctttttaagaattctaatatgctatgattaaattttgaaacaaactaagtgataaatcattctttctttctgtcattttcatattagacaacacaaatcagaattaagttccagaaacaaatcccaattattgtagtaggtggtagaatatgtagctgcagacttattctatattccattaatatgtagctaactttagtgtttatttttcccctaatttcttttaataaaatcagatctagtgaaaaaaaaaatagtttaattctaaataaactaaaagaaatcaatttaatcatcaacattaaaatttaaaatttaattttaactacccatttagttagaagagattaagagagaaaatgcagtatgagaaaatccctatcctataccaaaatgaaaaagtccattaacgaccatatgcgtacggaatgagaaattgggcactagctatgattaatattcaaatttggaaagatatataaattgactgacttgtcatttcattgaagtgggtggtctgttaatctgttcgtttgaccccacaagtgtgctattattctttatatcattgctagttgcgttccatgtcaaagaagcgtttgaggaataaaagtccacctaaattgaagctacgtacttatatgcccatatctcaccacaatacaagatcgtgggtgatcacgatcctccatttaccatctgtaaaaattatataagatattaatgggataaaatgaattagatacttgactgaacataacatacaaaaaaaattataataaatcccatattcgttttgttatttctgtttaaaaaatgaaagatcactaataaatcacgaaaactatttcaataaactaaccataagacactttagtatatattcataaaatttgtcatgttgtgtatggttgttttgaaggtatcttccaccatatacatcatttttaccgacaa

SEQ ID NO: 9467 - DNA, 2548 bp, Citrus clementina
  Intron number 7 from transcript clementine0.9_002619m (loc us clementine0.9_002617m.g) derived from phytozome v7.0 (c hr-ID scaffold_51; pos 1037041 to 1039588 reverse strand)
caacagcgagctcgtttgaaggtatttaatgtgctaatgtcttgttctttacactgttggatgcttttgtgtactgaggttcaaaagttttagttttcctcagtatttttctacctattggtttgacatttctgaggcgtctataacatggaattaatatctctatttctttgagacatgatcctgttacataatgacaaaagttagtaaggcgtatttggtattgttttggaaacagtgttttttattttgttttaaaatatagatatgattagttttaatgtaaatggaaacatgtttggtggtttgtcttgaaactaatttctaaaaatgaaaataggaaagcatatttggtaatttgtttggagaagggaaaacattgaatatacatttggtataattttcagtagttatattgcatgtgcaacttataaaaattaacttttattatttaagatgctttatataaaattaaataaacaagtaaaatactataaaaatagcaaaatgtaataataaatataaatataggtatgacttttatttgatagttgtttagccagatgataacatggataaggaaaagaccaaaaggggatagaggaaaagattaaattctatgtactgaaatatgcaacagccttattcgtgagttgaaaaaacgaaccaaggagagtttccttttccataacaaccacaccatcgtcagtggcgttgggccatccagcttacccgaaaatgactcccaaagactagggttcccttttcaaaggaggagttcccagataccacaccactatgagtagtccttcctgcctttatattttacaaaattttatttaagtaagataaatattataatttattaaatatctataattattttcaatttttttaattttataagattaatgcataagcataatagtatttatatgcattggttgttaacttgtttatattaacataaatcatatactgtttgtattatacattttgctgccccacagacttttgaatagaaaatgttgacatttgctgacaaaagttataaatatgtggtccttatgcattaaatgcatgcaagggcggtaaacaaaagtggagaactcaatatttgctttctgtagttttgttatgaaaagttggggaatgggaatccattgattctaatgtttgttttctccacttttcttatgaaaagctggagaatgaaaatccacagactcccactattgctagaatattgccctgtcaaacacatttttcttccttttttttatttttgtaaaatgtgaagtgctcaaccaaaaatggtactaaatgtaccattacattttacaaaaattaaaaaaggaaaatgcgtttggttgagccatttcttaacaataataaaaatccatagagaatcaattattcccatttcatcaactttccttgaccaaaagttaagaaagtggagaatgcaaatacgtttatgcattctccactttgttttctgtccctaaatacatttaatgtacgaggcgcatgtttcgttacttgtgtctgcaaatgtcatcgtttgcaaataaaaaaatcagtgatcccacaaaatacagacagtaactgataatgtacatattactataaacatattagcagttggtatgcatataaattgtacactataaatacgtttatgttttttcatttatttttttcaaatattgaagacaattatagatatttaatagattaaagggttttattttatttaaataaaaatttatcattgtataaaatgcaaaatattaagcatctattaaataaaagttgtaattatattaatatttactatttatggtattctgcttatttaattttgttaaaaaaatctaaaataataaaagacaattataaaacattgtacatgtaatataactgttgaaaaacaattttcaaagatattataccggacacatttttgttgttttcaattttcaagacaagctaccaaaaatgttttcattttcacaaaaaactaatcatttatatattcaaaaacaacatcaaaatcaataccaaatgcagtgtgcttcacattaaaggaagtgacataggcagctgcctatcaagaaaatgagaaagaggaaaccagacaaatttttattagattgatccttttctacaatatttgattcatatgaaagcttcatagcaacacaaagtgttacattttggtcgcgcacatacaatgaatgaagattagatgattcttgttatgtgctggtgcttttttttgaagaaatcgctacgaatttttgtgtatgcttcccagtatccttaacactaaaatattcaacatttttagctttttgttatgatcatgaatcttttatagttttcatttttcaaatcatattttagggaatgaagctgaacataaatgtcattatcgctttactgcttgatcatattgtgatttcttattggtgttctgtagtttcctttttcttctttaatgtctttctctatttactgcaggcaattgatcgtttccgtgcga

SEQ ID NO: 9468 - DNA, 2780 bp, Citrus clementina
  Intron number 3 from transcript clementine0.9_034850m (loc us clementine0.9_034850m.g) derived from phytozome v7.0 (c hr-ID scaffold_40; pos 1938102 to 1940881)
taacagtagctgctcaagatccatcatttccagtagtattcttctcttcaccttagtcttatatatgtgtatgggtatgggtatttaaaacgtgcgtacatatataatctctatttatatgcttttcatgtacttttcatggtcgtagttaagtaaaggatgtctaatatcctaacagctcagattattgaattagagatgcctgaccttaactgttcagagacttctatcttcttttctttagttcttaatgctttatgcttgcctttgattttggttatacaggaagtagagatctgttgaaaacaattcattaagctccaaaatcttagtaacctactttctggcaaatagttgtttggtcctaaagccataggaatttgggcattattcatgaatcaaatgttttgatgcaacttacttcgttctcattggtagtattgttagggtataccaaatttaaaaccttactaatgatataaacaactaatatagagcaagtaatgatcgatttcacggagacaatgctagttttatttattatcaactctaaaacaaggacttaaaataatgataataataataataaaaactaaaaatataaattaatctaactaaagaaaatgccaactataaataaaaggggttttatgaatttttaactaaatgacaagaaataaagaaactaaagctacgaagataataatttaatagaaacgctaattaaaggaaaaagaaataataataatgacaactttggtcaaaggatcattcgccaccaccaaacatgcacataatcaatatatcaattctatcatcaatttccattaaaactatcaaccttagacaacaataagctccgttaatctctatctttccttaatatgttgttaggtaaaacaagttcttcacctaatctctaaccattaaataatttaaaacaagatctctaaatttaagataatggaagcattaagtagagaaagatcttaggttgatcaaggtaataaaaacacaagtttagattttttagcctaggttacgttctccaattgtaatcactgattccaatctgctattaatgattaaaatctcatgacaataacggatcaagtgtttcaatctagcagtaaaactattcaaatcctatctaattagccactcaaagaagatgagtaaaattataaacattaattataaaagaatataaacaatttcaattaaataaattgaatgatggaaattaaatattaattataaatcatgtttagggttttaaattcaccctcaaccaaatagaaaatctagcctaatataattgaattgagaataaaagagttgacaaaactagtcatggagattaatcgaagcggccagctgtggtttgtctatatttggccgaatagctcttgctcacttgtcttccgccaactcctcttcctattttctctataaaaattaagataaaaatttaacataataaaatataatttaacaaaataactaaattaagaactaactaaaataattagaatatttaagaccaaaacaagaaaaagatggagaaattaataataaaatatagagaaaatatgcacttatcactcattcttctagcaagtaataagtattttttgttgtgtgggaaaggccaatggaaccctttaaatgagaggtttacacgtgggacaaactaaaataaactagcataaaatctagcatattgatattagatttatttgaagagaattaagggagtccacaacacttagagcttgagactatgccctgaatgactcaaactcttcaccatttctagttttcactataagcaaattgataaacaattttgctcttttggtttcctcaaactacagaaacaaatcaacaaacaattttcctcttttagtttcctaaagctacctcgcttttagatatctttatagatcaagagaatctcataaatgaatgccagttcttttaaattctctctccctctctctgtttcctttgtgttatttttccttgcaaaagtgaatctacttctactttcttggttgtttatttaagaaaccttgtaatatttcaagtgtgcaaacccacgatgattttgtctttggaacagaaccatgaaatatttctagaacatacagaaggaaaattccaatatacttctagatcataaagaaggaaaaaggaatcccagtttttcagagacatcttaaatatataaacacaaattttctcttattgtttcctcaaagtaaactaaacttttaaatgcccttactgataaggagaatggcataaatgaataccagttattttaaattacctctctctctttcctcttttttgttttgttttattttctttattctttttctctctctgtcttttctttccataagtgattttagttctacttttttggttgcgtaattaagaaaccttgtaagattggaacccaattctgatatgcttctagaacacacagaagaaaaagggaatccaatcttttggagacatccttgatatttaaatgtgtttcttcctacattttcttccgttctatatcccttttgacatgatttggtagatttgtttattctttggcagaatattaactcacaatacgagctagatatgatcacctaagccacatggttatttgtttcactggtttgtatttataccctggtcatggcactgaggtttttgatgatgaagatttgcttctgacaggcttatatagactcgagtgttatagtcggtcaggc

SEQ ID NO: 9469 - DNA, 516 bp, Citrus clementina
  Intron number 1 from transcript clementine0.9_010968m (loc us clementine0.9_010993m.g) derived from phytozome v7.0 (c hr-ID scaffold_7; pos 5902869 to 5903384)
ctgccggggaatcgtctctgttaaatttttgcacggtaagacattttttttcaatctcttttgcgtatcctctcatttggttacatgaaaagtaagttagtggcttgtttgatccgctagacctagaattacatagaaatgatatatctctagaatataattgattttgagctttaagcatatgtttgtatgcgggtcttttgacttctcttgctccttgctcgtgaaacatgttgggtgtatttatatcccaatcaaattgatctgcgttttcagcacttttttttatggtttttgatttgaataacaaagctcgtgttctttacaagttatttttatgtactactgcttctagtaggtgttattgtattgaagttgaaccaagctccagcttctaggttccttattttttgttcactttataaacaaagaaattttatatattttttcagattctgtatttgtgattgtcatcttgcagtgaagtaacgcgaagccttgcttgtcggttctttg

SEQ ID NO: 9470 - DNA, 702 bp, Citrus clementina
  Intron number 3 from transcript clementine0.9_022613m (loc us clementine0.9_022613m.g) derived from phytozome v7.0 (c hr-ID scaffold_90; pos 877182 to 877883 reverse strand)
ggaactggtataacaatctctattgctaaccgaattttattttagtttttagttttttattaatttacgaattttctgaattgctggatgggaagcaataaactcaaatagtcttctgtaaatacttgtaaaaatttaggttacaattcgaagtttcttggatacaacctcacaggaaatagcaaaagcaattgttagattttaaactagattttaagatttttttccaaaaagtgtttccggaaacacccaaaaaaatgtttttagattttggtatgctttgttttcagaaacaaagagttttatccaaattgctaattaatttggccacgatggtttgatcaaaatttgggtgtcctcctaactcataagctgtggacttttacaaaggctaaggtgatagttctcagaatagtatacatgttaagagtaaaatttctaaattgttgttgtgtttactcttcatagtgctatcaagtggtcggcaattcagttactaaattgaattttgtggaaaacattgatttagttttagtagtagtttaatgagaattgatgctaggaggtccacatgatcttgatgatacctcggatttgaggaactatatgcattgcgatttcaatgatttgcattctgttattgctgaatgatattgtcatttctgagcaagtgttttctgtgctcttttaagtagcgttatc

SEQ ID NO: 9471 - DNA, 1569 bp, Citrus clementina
  Intron number 3 from transcript clementine0.9_028212m (loc us clementine0.9_028212m.g) derived from phytozome v7.0 (c hr-ID scaffold_95; pos 251675 to 253243)
tcctacaaaggggtaacacatttttctctgagatttgggatatctgaaaaggagtataattggatattaatgcacattccttttatgtgtagtttgtttccaatttgtattgaattatgtttcagaagaagggtgtttgttaagtgtcttttaaccctattctatattattttatttgcaggtcattggatatactttaacctttatttggactgtgaaactatgcgtgttaactgtacatttttacttactgctcaatttcaattagacttgtatgaatattgagaatttaaggatgggatgaagggcttctttatgtgaaaattcctttgaagtagatgtgtgggcgtttataaatggccttttgatgtataagttggcggttcctcttctcttcttcccgaagtactcttgaggatttatgtagttccatccaaattttttactttgttggtaacggggctatgataaagttttgggaagtcagaggcatttgtgtatatcctatctttaatttgtttccatggatttaagttactggtgaaccatgacatgtctgttaatactatggaagtttgatgaacgtatttttggctcatggctttaagactattagcatgaataattcagctttgaagtccagactcttaatcatagacaaacttgtactgatctcacctcctcatcatagtgtaaattgaatcttaaattgcataggaatcttatttggagaggaatcttatctaaggagtatatgatgtttatgaaatctttaaagggtttttttctatgtgataattgaacttctttttgatcagtttgataagagcaaaagtttattgtaagaataagatcatagaaagatgaactttgatgaaaccgtaaatgttataattgtgctccttacctaaaagtttaactgtttaggcttgtaggtcaagtggtttaagtgattgcttaaagaagattactgggataaattgtgtctttcagtgatgcataatgtgcaagagagatgtttagagtttagagcattggtcaaggaccttatcttgcagtgcctcattagcacacatctttgactcaacaactttaaggcttttaatctctgtttgatgtggctgtacttcttattgtatctttatcaaaagagttcttgactttagtagaaggagagaaccactatcttgtggggctcatgtgcaagaaaaatattgataccttttttttttaaaatttaattttatttggagggaaatcgaggatacctggaaactttttgaggagattctttggttttctagtaatcatctttttcccacccgccgctgccccctttcccccaattttcctttccctttgcaatgtgttcttgattgggggttctattttttgttattatctaccaagggtaaagtcaatccttttgagtcttttctatattgaataattagactacatgataccgttctttttctccttgtcattacactgaatcacttccttttatgtcattcacctccctcaatttcaggattacaaaaattatacattcccacttgctgtagc

SEQ ID NO: 9472 - DNA, 663 bp, Citrus clementina
  Intron number 1 from transcript clementine0.9_010993m (loc us clementine0.9_010993m.g) derived from phytozome v7.0 (c hr-ID scaffold_7; pos 5902869 to 5903531)
ctgccggggaatcgtctctgttaaatttttgcacggtaagacattttttttcaatctcttttgcgtatcctctcatttggttacatgaaaagtaagttagtggcttgtttgatccgctagacctagaattacatagaaatgatatatctctagaatataattgattttgagctttaagcatatgtttgtatgcgggtcttttgacttctcttgctccttgctcgtgaaacatgttgggtgtatttatatcccaatcaaattgatctgcgttttcagcacttttttttatggtttttgatttgaataacaaagctcgtgttctttacaagttatttttatgtactactgcttctagtaggtgttattgtattgaagttgaaccaagctccagcttctaggttccttattttttgttcactttataaacaaagaaattttatatattttttcagattctgtatttgtgattgtcatcttgcagtgaagtaacgcgaagccttgcttgtcggttctttgctttttttttggggggtgggggggggggggggggggaatggggtgggcggtgttactcaaacagcctatggcctattattgagttttactgaggtattgtcaacatggttagttgttgtggagcagggcagattgaacttgaaggtg

SEQ ID NO: 9473 - DNA, 4829 bp, Citrus clementina
  Intron number 1 from transcript clementine0.9_009349m (loc us clementine0.9_009349m.g) derived from phytozome v7.0 (c hr-ID scaffold_27; pos 39846 to 44674)
tatcgcttgtcgcaggtttgaccaatataagaccattgtgattctttatttttttttcttttttcttttttgtgttggaattttgttggttttcattacttttgatatacttgtgagcaattctattactttgacatatttgattgttatggaacagaaaaaattgttcttttctttttgctgagtggttaggtgaatgaggtgccagtttgtgtgaaatgtgatagtatatatttgaatttgcccttttttcctattgtccatttcttggataggcttgtttcaaaagtgtgaaactgggttttttgtttttttggttgtttagtacctgcgtttgttggaatagcatagacatgaagttgcagtgtttatgtcagttgtagagcattagacttttctttctccatatagttgaaattgaagtcctatttttattttattttatttttttcatgtttctcaagcttgataagtggcggtgcttgtcttattcaagattgcttttagaaatagacaggacagctagatatatagtaagaagcaaaatgagaactttttgtagaggtttaatgtttcttcttgttatataggaagtctagtggttttcttcactggttgatggcggcgttttgttttgcatgtgtttatcggctacttttcagttctgaaggatctaaatgacatgggtttggagatgtataatctttaaggtgaagaggaagggagtctggttttctgctgtctatttctgggcatgttcttcgaaaattttgtctaattaactcagtaggttaagggtaaaatatgtaaatattatatgcttatcattgttcttacagctttagttgagaattagttgatttgggaacttatattttggaaattaaagagaatttactacttttataatactcttttcaatagtttgagtttaaatcaatgtctggaacgtgaaaaaatgtctgctctcatccccctcccccaaataatttgtagcttttctctgatttttactcatagaaatctgaaatagaaagctgatatgtctacttgtttacttgatatattaagactttgttttggttgtatacttttggccttttgaaaattctttccaaagtgcttttgtgcgtgtctttgcatcctttatgggggctacctgcagtgcctcaatttcttgttttatggtctgtggatttatgatgaatttgcacagaactctcagtctgtggactccagtctgttgggctcaaggaagatatgtgtagagcgctttaccttgggcatgatttgtttggagatgattgagggctttctagaagtagagggtagttcctctgtcagatggtttagtgggatgtagagctgggtagttcctgtgtcagatggttaagtagaattaagagggcatttatatggtatgtcagtattggggtttatgcttgccaagatattgtgaatttgttctatggcagttgaggtctttagtcctgtttgggattgaggagctgtagctttctgctgtggaaaaaaagctgtagttatgaaacaaaagttaatagtatacggtatatataatttttaaataataattttagcaaaattattaaagatataataggatttttactatacaagtgaaaaatcatatcaacataggtttcaagctacagcagctagcgtttaccaaacactttaatattgtatcttttaagctacaactacccaatcttaatcccaaacggacccttagcgttgtagttgtggcattactctgcagatgttctttttcatcttgtggttttggcgcattctgacgcatggaatattgtgctattcatattcactgtgttgctccttctctctcattttctggagaattttttttaaaaatcttttcaagttttaatgctgttttcggttatttctggctgctgctgtacgcagtttgtatttgttttagttctggacttgattactttcatgctaggctaggtgaagggaaattgtagttcccttataacttccttgcaaaacctgtctgataggactatcagccagttaaggcctgaaagtttgagattattaatcatgccgaacactgaactggttcttgcttgtgttgttattttcctttaagctatcctagtacatcagatgtatatattctaaggttttctgtggaaactttattaatggtagtcctttcaatgaaccaccttaaagttagttttgctagatcctggtaatttttgtggttataaacagaagtttatagccgtataaggcctattcagtaccttcgaatgacttggtgctttgttttctttataaacatgaagttcttgggtgcagttttttgggtgtgctttattttgagggccgactctcatttctgatgttgatttgacattttgtaactacaaagttgctgacccaagtagtcttacttgtttgatttctttcttactgctctaatttattatcaatgtagtacatttagcagcaggattttgatgaataattgttgctctgttgtgtttgcttatgctattgagattgcacttctgtgcacacacagtggccgacacacacttctttactgtgcttttaacttaattatgcatatagaagtttaatttttatttcacacacagacacacacacgtgcacaataattctcaggtgcagatgccttttttttttttaattttccgtgcggatttgctattatatcatatggcatatcagttaattgataaaaaatgataaaaacaccaacacaccatatcgtttaatagcaaatctgccggggggggggggttagaggagaggggtgggagtgggtgcccgcttaagaggactctgtgtgtgtgtgtgttttaaatttcttgagtgacctttctgtttttattgcatttagtttctgtagattatgagagtcactgtcatggacaataccttcactgttcattactgtgaagtggagctcccatatgcttgggtaaatgaaaggttcactatgtttgaatatcatttaccttattcacaggtggtatttgggctgacctgggagtttctccaatagtgtaaacatgttagaagttcaacagcttatttttaaatgctgtatatgctttctactgcgtttaaaatttgatttttaccctttagtgtggcttgtttgttttgtccccaatgctattaccttaaatgttatcatgagagacacgaactataatctctcattaattttgttgagttctagagcaaaggtgaattgcaaagttcaaggagatgatagtgaaatttggtggcaacaaggtatcaaatggttactattttgaatgattattgtagggaaccagatttagaggagtgtcatgttagctttatgctatttgatatagtctctttatgagcaatgaagtctgaaagttgcattgatatggataaggtcacttgtttggcggcagggtgagaatatagttaaaatgggaaaaggatatgggtcatgaagagaaatgatatcgataattcactggaaaaaatatgggccgttggcccatgattcactgttttgcataataaatattttgctaagcacagttatgcttcgtataatcagaatgttccttagttttccatattgatacagtaattatttagttgtttacttgtagtaattttatgcctcttctggttttctattcacttcatagttgtaactacagagatatggtaatttcttccattacagttatttcttccatttaggttaattttttcccccaccatttatcttgaggagcagattatcttttttgttggttggcatattcttccaatcttgcttattggatgtgattgccttttgaaccgcaggtcattttccttgctcagttgatatccttgtggttgttcgctttgttaaaatgtttcttttcttctcttcttgttgaattccaccgttgcctcttatagaaattaatacctaatcattttcgtttccactttctcattcagctttatgctatatcatgtgaaaacagcaaaatcagacctgaaacctgtttcattatcctcgatcaagcatattgcaaacctggagcatccacttttctttctttgatattgctatttttttaagacacatccgttccattagtaatacgtcagtagagcttacactgaagtttgcttttcttcttacctgatcattttagtttccactttctcattttagcactaatatgctatatttagaacagacatgcacttttgttgcattttacatatcaagaagcaattctttttttttttttaaatattctatattttgtattcatatagctcatgcatctgctggtagatcatactttgcctattctttgttattggcttattgccactggaaaacgtagcttttctgttctttcaggatgagatggcttccaaatcttgacttatttcttgaactcagtggagtgaatttccatttcaaatgtcttagaagacaagttggtcttatccaaatgttgcacaacataataatttgatgcgatggttcagtttttcctttactgcaacttgtagagttgcttgcatgatgataatttttgatttctaggtggctgtaatgtacatattatgcctttcctatctatgtatgccttagaatataccctcaaactggtatatatgcattgtctttgctgccattttagttccaacatgtaggccggcggtgctgtctgagaaatgcctgaatcatcattttcaatgcctttgatatgcaaaattacaggtcttctaaagacttctccgat

SEQ ID NO: 9474 - DNA, 2756 bp, Citrus clementina
  Intron number 4 from transcript clementine0.9_025628m (loc us clementine0.9_023742m.g) derived from phytozome v7.0 (c hr-ID scaffold_19; pos 1415478 to 1418233 reverse strand)
gaagaagggcagaataagggactcattcttacaaggtacactatttagcaacattcggcagcctttttaggaatatagaaaatgaccagctgaacctgaactttggagttttgaaaatgactttgtattcccattgcccattatttgtatttgttgacttcaaatttgttttcaaagcttttatcattttaatttgtaaaagcattctctcataaatttgaaaactacttactacaaaatcaccttagaattctatttctgattaccatctatggcaagtatctattctggtaagtttgcctcattttgaaaccttgatgtgacccttttgaagtgtaccagataaaagatttgccttagcaaacttattatctatgtagagaaatattgaagtaacattacaatagtacagtaagttgaaaacaggagaacccacggttgaccatcaccgagataaaagtaatgggactacatttcattaatgtagactgtattttgtacccttaccagatagaatagtgacagcagtcattgagggccacaaatcatgattatggctagactatcgccattggcacttaaggatctcttgtcaagataagggttggattgagccagaatagcacaactgcatgcggtggtggcggcagtggcggcagtggcaccacactggatacatatatgaaatgagaaaactagggaaagtgaacaggaaaagaaaagacgagaaagagagatggtgtttgaaaggaaggcaagccactctgcaggcttgagctattccctgcttgaggctgcaagaaaagaaacacacacaactgagggaaaggattactagaagggaatcaatgagtttagttcagtcgatcgaagtcgtcacggttagaaccatgctgtatatgttgaagtcaactttgagtaaagtggcttcaaaatcgtatccttctatcgtacagagatgccatttaggaaagtctcattattctcacaattatgtgctcaaggacctgtttgattgaggtactgagattttagaatagttgtagttataaaataaaaattgataacatatgataagtacgatttttaaatgaaaattttgacaaaatgataaaaatattagaaaattttcatcatacagatatgaagttaatttaacttagtttttaaatcatagcaaatgttaacacgacactttaaaactacaaaatcaaacaagtttcattccttcttatttttttcccttaagaatgacactaatttatttatttttttggttaatacaggggattttttttttttaaggaaaagggaacctaatttactcctttaagaagcaacatgtatggatggcaaaattctctacggatttagggccgcatgaggccccaccttaaatgagaaaaattttggataatttttttaaaatgcggtgagaaataagagaaaaacaatctctaaattcttaataaagtgagatttagttttgtactcttcacattctactctcactctaattctgattatatataaatattttttattttttatttatcaattacaatattagttaataatttttcttgttatttttacctaatatatatagactataactaaaagaaaatcctatgatctaattcttattaattcaaacttaaaatattgttatgctttctttttttctcttaagatgttgctctcttcaaatattttttaattttgatataattttaagatattgttttaaacttttagagattttttataaataatttaaatattttataatatgatgataattttattgaagtctctagtttttaatttattgaaaacatgtacctatatttactataaaataaataaacctggaatgagatgaggatagaaaaatcattctctatataaagatcctccatctctattccactaaatttattgagaaatgaagtagggaatagaggtgaaacttttaaaaggatggagaatgagttaaacttccctacctccacctcaccccattgccatcccgacttttgatggtataataattttaagtgcgttcctaaagcacaaataggtttttctgaagccaatacctcactgtacaagtacaacccacaactgaaaataactatttctaaatcgatcataatcttgtctcttgaatataaaatcaaataattggcaaatcagcaggatcatactttctagaggagccaaaacataaggccgtttagccatatgggctgcgacatattctagaactagaccaactgatacatacatgtgggataagcatctcagaagtcccaagtaaaggacagaactcattttgaattttgttggtatttacaatcccaaggggtggcaaaaaatggcaaccgtcaaaccttacggctgaactccgagtgccctgtcaagtgtccagtttgtcagcttctttgattgtgtatccaatttccatatcttctcttacaagagtcattcagaagttcggcacacactatgtggcaggaaccgcataaatattgttgtaatgaaatgcaacttatatcggactgacactcgatatctgctttcagaaaaattgtagtcactatgggttctttgtaacttaaataacaaaaccaaaaagatcagtagttggatttttcatatctaccaaatttaatagaaaaaagggaatctgaacctgattctgtgcgcttgttgcagttgtccagcgctgacggtgatttactgctgctgaa

SEQ ID NO: 9475 - DNA, 4263 bp, Citrus clementina
  Intron number 19 from transcript clementine0.9_029099m (lo cus clementine0.9_029099m.g) derived from phytozome v7.0 ( chr-ID scaffold_54; pos 572101 to 576363 reverse strand)
tggcttcaatctttggcttcgttttggggtcacctgtatgtacagttttctttgcaaagctttgaattatctttcatatttgacttgaataattaagcatttggaactgtttcttgtctttcgttttattaaattgtttgttagcggttatagtcagcatcttgtgataatgaagaatttggtcttaaattgatgccactgttggtaaagaggctttgagtgtaatccggcatttggtatgcatgaagtgtcaccttttctaagctttgtgtgcatatatgccatcttccttgttgttttcctttcaattgatttctgcttattaatgcggttagtaacagagtcactttgtacatcaattcattttgcatagagtccagaatatcctgggatgctttactacagtttccgggttgaagataaaacttggcaaaagcaagatgtctggagctgggtttgttttggacattgcagatgtgcaagctctgatcagtttgaattctttggcttgccaattgggcggtgttcacagttagttatatgtaattgtctgacagagatgaaaggtcataggactgggatagtgatttttcttggagggggacacttggtcaggatctcattattcagacttcccttcagttctttctgtcttccattttcaattttggtctataagagactgaaggggagaaaaagtgatccctagatcattcaagtgagaatcctaagcacatggaaaatggaagattatgcctgaattgaattagttattagctgtcaaaccgtcccttatgctttctgataaagcatgaaagatttggtgtcattaatagagatgggaaactaatggaaagaaaggcagagagaaagcatgtgtgcacaagaacataattggacggtaatctgcctgttgttgttgagggatatagtggagaggtatgatttttgcagtgtatggatgtagaaatggagattatgtacgtatcttggtactaattgctcggactgactgatggagagatatatgtgtaatttctactgttgactggaagctgtttgatgcgattcatattcttaactcactatctaaatgattaggaactgctgtgtccttccagttttgccttgtgaagaatcataaatataggtgagaggctggaagtagcatgcagttggtgtgggtattaggaattgtagtcaacatcctgtcctgtggtggtcccgagagttgtatgcttttgtcctctgatttgctgtcagaatgttccaggagtggtatatttttgttcaaatcagatttttaacccaaagtgtaccattggtgatttctgtgaaggaaactgtcttgatgaaagatgaattctgctgtcagagtaaatacctctgctttttctgattctagctgcattagctggttttgggttctttgacggtcgggaaatcatgtgggtcttcatggttcaattccatgcgtcgttggtgagctactgcctttgatgaaaagatattttctacggttcttcaatttaaatctgagggttagacagaggatgctcttgcaaattaagggatatttatcttctgttgaggcaacatcagatatttgtggtcaatgatgtttctattggggtccctctgtcaaagctgtcaagggtgtgaggctgttcacttattcaataaagatgggtagttatttttaattggagacttgaatttttttttttaatttttaatttttccttgtttttccctctatggtgaattgtcatgtcatgtaagtagtgggtccatagtcttctgcatgtaatgtgtggattgtcaaagagaaagttggtggacaacttgttatttaggaatggactacctgcataggctagtgagctcactccctttgcctacagtatagaggaccctgttcacaaagttggatgtatgaatactgtttgaacttctataggtatgttcatatttatctttgttttaatcctagttcttgactgtctttggtatccattgatatgtagtagtcccatgatgtgaccatgttaactgagactcgctgcatcttgatgttactgagtactaaattttggatgtttatgttgattgccagcatacaggtgggttttcctctggtattgcacaaatattaaaatgttattgtcatggtatacatgtaaagaatcctttgaaagcctgtgaaaataacataattctggcagtggagaattaattaatgtttattgctgaatttgatgcttggaacagttttggcaatctctttttttaaaaagaaaagattatggtcttgaatctatgtatatgtcttcgaggtggatctccttagcataactgtaataattctaattcacagaacactaacatttaacctggatattatgtgaatacaacttggaaaaagatacaggagagcatgcttaatagtcgattggtagactattcagaatgaacacccccccccccccccccccccccccctccccccaaaaaaaattgggggcgggggggggcaccacttttttttttttttttttcattgaaagttgctgtgccttacgatgagtttagcctagtagactgctggtccacttttttctggaattcattttttgcatcaataaaattgtgttgtttctaaccagaaaaagaaaacaaaaactgcattagcggttaagtttttccttcttgcaaagaagttaaagctaagtataactcagattaagttcttctgccttctgtttgtgcaaatctcccccctgctttttgtgtatgtttgtgcagccttagctccagcccttaccaaatgtgaaccaaattctttcccaatcacagtgtgaatagattgaatctctggacctcttgtacacttggagaaacctaactaatcaaactaagtggtgcatgtgctatctatccaagcttggatactgaaggctgcaactactaaaataaggtaatggaagatcaaaaaataacaagcaagacgaaaagcggatcaaaaggagccagtcatctgctgtcattaacatttcacaccaagtagttttgcatttcatcgccatatttggtgtttcctactctgatttagaataatctgtctctgggttagttgtctattataaaaggctcatttctcaagctttgtaggcaggactgctagtgtttatagtgcctgagttctttggctttcttgtataatggtggtaacagcagatgacaacaaatattgtttctttatgcctaagttcttctcagcttctttgcactatatttgaaaatagtttcatgaagaaaatcaaagccaagtcctgctccctatcgatcaccagctgtaaatagggtgcacaccatgacccagtcatcttattgtcccatgaaaatgcttttctggatcgttgcaatcattttacagatattaaagcctgagaaataatagtgcctgccttcattgaatattatttggttgcagcattaggtctggacataacaaccctacaaaatattaatgccaatgaattttccctttttaggtttcctatcttttttcttcagcttgcctgcactttatctggcaatagtttcttactgaacctagaagctccctgttgttcacagttgtgcaaccacgttgcatgtggtacacattgtggaatcttcctcttttttgataggaaactagtattaataagaacaataattacaaaatgtgaacaagaaatccacaaagaaagaaacactcccaaggattataaccgccaccttcagatgctcaaacaactgtctgggcattgatggaaaattatgacttctcagtccttgcttgaaccttaaaaatggtgattttatgtggaagtaatggtgacattgaattttttgcttcatgtcttttaacagtttttggacttcctgtgctgcaaatgagaatagcttcatatagaaatttgaagccaactccttgtagttgatgattatgctattaatgagtctgcatgtggaacggtcatgtttcccatgttttttcatgaaagattgcagggtatatgttgttatggtgataagacaaaaatttcatactcctttttcatttttacatttattcaaacttattgaagatcttctctctctctctctctctctctctcttcaaacatgaatttgaaatttgcatttgttttatgggatttcttgaaattttactaagttcaatttccatatcacaggtgcaagaagtacccatca

SEQ ID NO: 9476 - DNA, 3042 bp, Citrus clementina
  Intron number 6 from transcript clementine0.9_015722m (loc us clementine0.9_015744m.g) derived from phytozome v7.0 (c hr-ID scaffold_149; pos 196843 to 199884 reverse strand)
taaagcaatctctggatcgtaattttagaccattggtaactggtattctctctctctctttctaagatttttttgtttcctgctgtagcggatttgttgtcatattgtgagctcaaattagtgaaacgcttctctactttatttttaatgggtcaagaattgtttatccgttcagtgatcagctaagctaactttcctgtctactgcctgttttggatatattgaactgcttttaatcttacaatgaccttgcctctgatggatttctgtgtcctgtcaattatccgctgctgccttctgtacatgtttcttgtagtttcatgctcagcatgtgctttataggttgggacaatggactgcataataagaggcaaagattgttctaccttagtactatttcttatcttaaaatgtgtttcttttttttttttttggtggttgggggggtttaaaaaaaagaaaaagaaaaagagaacaggtacagatgcttctctctggttaagccaagtcaattactatatcctttgttacagtgaagacctataactttggccgcaggtaggggatgggtatgctgtacaccatgaaccccgtacctaattttagctgtggttttgttaaacagtcaaaatactgttgtatccatagttaatcatacaattggttgattacattgaaattgtttgtcactctgcactttctatatgattcgtgagttgcatgcaaaaaaaagttaaagataagactaagaatgactgaggaaaagaagagagaaacataggaaatttagcagctaaagaaagaggagcattggtgtcctgtcttgtgcaattatatatgtaagcatctataaaataaaatatagaaagatagccccggaataataaccaatactcatgtatttatatcttggaatttcgaaaatatctctccctttttttaacaataagcaaaccttattctattaaatggttattgattaaagtgggaattaggatactggcataaagagaagttgaaaacctaagtgtcttctaagatctcattagactaagtgccttaccttataggaagcatggtgtcatggatttttcttctatcgcgctcatctgtctgtgtgtctcattctgtttctagtgtttcccaattctactcactttttagctggttttagtaaatatcaatcataaaagtagccttataagacattgattaccttcccaatattctattccaatagttttacatcacctctgatgaattcacaccactgccaagacttcacttcattcctatatatttcttcttaattcattctttgactctcaactgatgtgtaatgctctatgagctctgtttttgaactcctaataagtgctccgtcctggtaattctgtactttgatttgtgacattttggcaaatatatctctatatttgtcgtggatgagagtaaaagagcgctggtatcggtgctttatccttaaaatttcaaattgctttttcagatttgtgcataagagccatgtgtgttccattgaaattctttggatagaattgggtatgtctcttctttgctttataggttgtcttcacagattttctgccctgctgtctctggtttactacatcagaccaagtccaatgccagttttatgtcttatgtcttaagtccttgcactccgatttctatgtcagagggtctaatttcagagaatctagaggtcttggtaagattttgacaagtatttgtagttggcttgtcatgatctgggaagtagtgtcagcatttgatgtggtgaatgatctggtagctgatagtgtaccgcacgctgatggtctattagatttgacataagaaatggactgaatggcatcaacagctgggaagatctgaaagatacattaatttctgtctcaatgccaatacaaagctagacgacaatagaaaaaaccctatcaggtcactgtagccatattcatgcttgccttatacatggttgaggaaggataggcactgaataatttgcgaattcaatttgtgcaccaattatccttcttcttcttattttactctttaattttaaagcttccatttaggtttacgctagacctaggatatagaagatcatgaattgaaaaattacaacaacataacagtttgttaatgatcagttgctttaacaatgtggtagaaaatgagtagacatgtatgatttttacatgctaaaggtggttgcattgagttggattcaagcgttcatttattaagcaatccatgttccagttttacctgcttccgaattgaactgttaattccatcaagtgaggcaaaatgccatgtgattagtggaactgatagtagattagtagctatgctacaatcataaagtttaatcccaagtatttgaggcaaagtgacacagcatttgttcatgaccattacgtaggtgattggataatgaaattactgtactgaaatggcagtctgaatgcagcaccacatcactatgatccaagactttgggatacaaacattgcaagtatttatcattattccatagattagttgtagctctcctgcttggaaaaggttacacctgaaaatctgttcttccacaaggagttagttgactattgaatcatatgagaagagctttgttttaaggccttcattatttttatcattttcttactacccatgccatctgctagttgcacttgcacaaatcaatggaaaaaacactgtaagtttgtagtgttagcaaatcctctaaatttggggagctgtcattttctgcagtccatgtttcctccattcattgggggatattttagtgttgtctgttagaagaattttccatgtagcttgttatggttagaattttgtgcctcagatccgtgaacaaatgtgtatatatttgcagtgtaaatattctgttgtaagcactatactggttttattgtccttttgtatgaatcttattggtacctctttcagcaattaagcagtaatgttgtcttcaggacctgggaatatttt

SEQ ID NO: 9477 - DNA, 1027 bp, Citrus clementina
  Intron number 1 from transcript clementine0.9_029720m (loc us clementine0.9_029720m.g) derived from phytozome v7.0 (c hr-ID scaffold_67; pos 134295 to 135321)
ctagcaacctcgttgatgaattcttcaccattgccttttgaattatttaagagctttactgccacattatgaccgtcaaagtagttttcctttgtaaacacctccatagcctccttggccaagttgatgtttgaaataattggtcattttcttaatatctacataacaatatcttttaggagcctgagattcataattccataaaaatgcctcaatgttcagacaactttcagtggaattgtatgatgaaagttttcacctgaagtaaaaggctataaatatcaatatgccaactgcaatggctgatgctcctgcaaccagagaaaggagtcactgtcaacttaaaatttctttctctacttaaagacagatggatgcttccctcaaaaccatgagtagaagccaaaaaatacttcagaaaattttggatggtccaaacattgtgctagcagatgtatttgattaaaaagatacattactgttttctgagttttctgtttcctgcaacagaattaaacaaagactggtgttagttgagaatacgaaaaaatgtcatgatgttctcaaatcatccaaattttgacaaaattggacaggcaactgacagaatagccaatctcaaccagatacagaacttgctgcaacaaatctgctgctttctccaaatacaggtaaagggacagccgaaatccaacaaataaataaaaagagactgaaaaataggaactcgttttgttgcatgttattagattagacatagcttatgtaaatgtacaaaaagaaaaaaaataaaaattactaactcggagcagatagtgttttgttcttagaataacaaagaacacaagaaacgagtaagaagccattaatattccgaattcccaatatggctggagaaatcaactaataaactactaagaatattcttaatcaactaataaactactcagaataatctttgtaattctgaataatctttggaatggcttcaggctctacctcgagccttagttgctggatttgtgaa

SEQ ID NO: 9478 - DNA, 1449 bp, Citrus clementina
  Intron number 1 from transcript clementine0.9_003015m (loc us clementine0.9_003015m.g) derived from phytozome v7.0 (c hr-ID scaffold_2; pos 6737948 to 6739396)
agagaaggacgcagagctttttgccttggcaagtgaggatgatgtgctaaatgaggttcttgttgatacatcctcagtgtaacttctgttttaattcaatcatttagaaattaaaatttgtaggatttatttaattcttttcactattttttctttcatttttgtacttcttttacttactctttagaagattttggggcagtcaggtcggagaaagagggacatggttagggaattgaatttgtattcctgccactgctcgtggtcatctcttgagcaattagtcatccttcatcctagcatgatttttggagcttctcgatatgctgaaaagaaaatcttcttgtttgtaaagatagaaagtggtgcatgaacagaatttacagaacaggaagaacgttgtacaatttttgtttctcaagtaatttggaaaattaatagtatttacaaaggggaaagttttatgatttctctgctgggttttagatgatacccttcatcttttcatgtctctgaacacaaaaaatgtttgtcatttatcttcaagagagtccaaatacttgtgtcagttaacgtggctatgttttaacttctattcattattcttcttgcttggacttccagtgggcttttgcaggcaatatttgcattcttaggcaatctaagagttttatttaatttggtttatgtgctgctaagcttggccattatagtcatgactgacgattgagttcattctgaaaggcatttagctttctgtctgcatagttattctgaatcagctgataattccccaaaacaagcttgtagaagtttatatgtgtgttgtttggatcgtatgcagccccttcaagagaatgacgagaggtgtttgctggaaaatcatgctcaagattttcttttctactagaatttgatgtcttatgctagttcatattcctatttagaggatctgagctgctaaagtatcattcagttccaattatagattctgtgttctccattccagaacaagtaaagcttccatgaactttgctgtctctgcttctagcaaaaccaggttaagtgttttgtcccttgtgtgtgtactttagtttcatgttttatcaatgattatcctttaaactctcttctaagttaggaaccaaaccaaactcaaagtgaaccttcccctttttagtgtttaattatttattactttgcatgatctatagttaaatcgatatttcagttttcacgctggagttttgtgtttgacctcaaacttttagttccctaaaagaagataaatttgtgtttgactaagatcttggtctagatgtggcttaaaatcaattatggtcagtgaagttgaggaatgagatgaatatatataattactctatttaatcttttctatgacagaaagatatgacaatgatattgttggctcaggaaggccaccataac

SEQ ID NO: 9479 - DNA, 3505 bp, Citrus clementina
  Intron number 3 from transcript clementine0.9_005347m (loc us clementine0.9_005347m.g) derived from phytozome v7.0 (c hr-ID scaffold_61; pos 930599 to 934103)
gacttcaagtaaggcctctattgtcaatattgtagaaccatattgcattttagtgtattctgtatataatacatggtttaaaaatctataattgaaaaaaaggaccgcatatataattttctataatctgacaataaatatttttagatcttatgatactcattttaattatgttgaatccaaagacatccatattttgtcaaaaagcggtgatgtgtcaggatgttcattcctacatattaaaagttgaaagcatataggttgtgctttcaactttagattgtggagtttggaaggcatcaggacattattctggtaagtcttatcttaaatggttgattaatgatgtctccttggctagtattcctcttaaaattcaagtcgttttgttggccttggctcaaggaaaattaaaccctgggaaagtaattcaaagaaagttccctaatatgtgtctatctccttcttggtgtgtgatatgcaaaactagtgcagaaacttctaatcatctttttctttattgttttgtgacttcaaagttgtggagtaggttgtgcaaagaggctaacattttgtgtgtcatttcgggttcttttcattttattcttatggagaattcctatgcttttagtaaaggaaaaaaggccaaaactctttggatataaatgtggcagctctgttttgggtagtacggcaagaaagaaatcttcttatttttgaagaaaaaagtgcagacaatattgaagaattatgggatagaatctgtcttctaactttgttttgggcttcagtttctaaggagttccaagattcatatttttttcttcattcatctaagttgggagagtgtttgagataggtgtctaggttggtctagttggtagtgtcattagggtgcaccaaatttaaaaccttactactaatataaataactagtacagagcgagtaaggatcgatcccacgaaaactatgctagttgtatttattatcaactctaaagcaggatttaaaataaaataatagtagtaataataatattaataataatataaattaatctaattaaagaaaattctaattataaataaaagggggtttttatgaatttttaaataaatagcaagaaataaagaaattaaaactatgaaaacaataatttaacaaaaactctaattaaaggagagagaaataataatgatgaaaattttggttaaatgatcattcgccaccaccaaacatgcacataatatatcaattctatcatcaatttctattgaaactaccttagacaacaataagttttgttagtctcaatctttcctgagtgtatcattaggcaaaacaagtttttcacctaatctctaaccattaaataatttaaaacaagctctttaaatttaagataatggaagcattaagtagagaaagatattaggttgatctaggcaataaacacacaagctcagattatttaacctaggttatattctccgattgaaatcattgattccaacctgctactaatgattaaaatatcaagacaattacggatcaggaattttaatctagcaatagaatttattcaagtcctaaatagaatttattcaagtcctatctaattggccactcaaacaagacgagaataaaatcataaacattaattatagaagaacatatacaatctcaattaaataaattgaatgatagaaattaaaaattaattgcatagcatgtttggggtttttaattcaccctcaactaaatagaaaatctagcctaacataattgaattgggaataaaagagtcaataaaaccagacatagagattaattcaagtggctgcctctatttttcttttcttctcttcttgctactgctctctcttcaattcttcttggctgccgattgtctattaaaagccaaaggttggctttttattatgcatatggttggccaaatccttattggaatttatttccaatttaaagcaattgatttgcttcctttaattgccatgaacatgctgtccactttgacaatttccttttacttcaatttgctttccatatataatgccatccatgtgcaatttagtctaggcaagccttatgcatgaaatcttttttaattggtaacgtgaatcttgcatgcaacttataaagccatgcacattaaacaagtttccattttatgtatgcttgttcccaaagtctttattaatctccttgaaatcccatatgcttccgaatgtgcatcaattaattaattggcttcgaaaaatcttcggttatttccttttttaattccttcaagcagatttcttcttaaatgctccgatttaatttctctttaatcccagaatataactaaaataacaaaaaaaaaaaaactaagataaaaattaacacaataaaattatttactaaattaaaaattaactaaaataactagaatatttaagaccaaaacaagaaaaagatggagaaattaatagcaaaatatatggaaaatatgcacttatcactagtttttgtagaggggattggcatattttgtatagcacagaaaaagttttcatttttctgctttctcagtggacagctggtccacttcttgtaatgtttcttcatcattaatataatatatagtttcttataaaataaataaaataaaaaaagaaaaagaaaaaagttgaaagcatatagatttatcagatattatgttaccttttgttgagtagtgaaatatgaatgatatctgtgatctgatgaaattggaatctttttttagatcaacagtcaattagaatccattgagttgctaaatatacctgcatatttttaactagttattaacaggtctgtttataaactcgcatagcaaagttgtgctataaacacaaattttccttatagtttcatgttaacttttttttagttgcttgtatcaaaagacaatttagttatatatcttgaatggagtcagatttttcttgggcttgattgagaatatatggaaatggtatcaattaaaaaattttaaaaaggaaaaggtatcaaaatacaaatcctggagaaaattttcgttgagtttatatatgcttcataattacattggtagttgggattaaggtggcatcaaactgaattgagctattaatcaagtgattttttattttgggagataaaataggacttctggttgaaaggccctaggctacaaattttcattctgttttctgctacattctttttcatggttactcatggtattaattgggtgctactgcctaattttttcaattggtaaaacctcttggtgttgtacaagagatctaaagattgaacctcgcttacatagggtggggaggggatttgatttccattcatgcaatacttgaaaaataaaataaaactaaataacttagctagaccttttggtataaaccttagtgtgtctggtggaagctgttgaccattcaatgtatggacttctgtgtacag

SEQ ID NO: 9480 - DNA, 1168 bp, Citrus clementina
  Intron number 1 from transcript clementine0.9_009063m (loc us clementine0.9_009073m.g) derived from phytozome v7.0 (c hr-ID scaffold_12; pos 4386603 to 4387770)
taaacgccattgctctgacgtcacgtgttctttaggtaattctccgtaattccttttattgacgaaattttatgctttctatgtttatttgcgttttaattgtttgaatttcagctcgattgccgttttgattttataagtttgctttataatgagttagtgaactccagaattatttggatctgaattctgaagctttttttctgaattatgaattttttttactgatttccacatgtgctgctcatttaggatccaactagatttttttttttttaaaaaaaagttgttgtaaagtataatcaataatggtgatattatatttttattctctttcagttatggataatggtaacttttttctttttggtatgttttacaaaattttagttgttatgtgatcatcctaagggcttcaagcaaagctattgagctacttcgatgttgtaactgctagcgttaagcaaatatgccttttgagctatccttttgtgagttaatgttttacggaaacaagaggctacctgtgattggtaaatttttaccttcttgacgctagttatgcgttcaattttcagctaagattgtaactttatactcaaactggttttccatcagaagaaaaaaactgatactatagtcataaatgcatcatatatctttctagaatttttgtaattaatggtattctggggagtttttctttttggacggaagagaggaataattcttttgtattttgttatgtatctaagaaagatgctgtaatttgtgtttgttgatcataaatggcacgaggaaataatagcgtatccttatcataaataagggtataaaagtttgttgccccgacactagggtagaggcataacagtctacctgataggggcatttcttacttcatacacgcacatacgatctctaaattttattctgccagctggcccatctataacaatcctccgatctgagctcaaagtaatctttgtagattgaagcattatttcatatgtatgataaatgtaaaacattactactgggtgacatgcgttttggtaatcattacatctataactttttcttcttgatatcttcgtcagtttactttgtacttattccttttcaaacttcaggacgcttaaaactactattggcggcagcaaacggt

SEQ ID NO: 9481 - DNA, 2506 bp, Citrus clementina
  Intron number 1 from transcript clementine0.9_015710m (loc us clementine0.9_010469m.g) derived from phytozome v7.0 (c hr-ID scaffold_6; pos 3502833 to 3505338)
aggtatagatatattactggatttatactagattgataaggatgcgttcatggtttatgcctgattttctaattaggttgcgcatgctgtggcccgacatgcagccgaggggattacaaagaatctgtggtttgccattttacagctgattctgtatcaattcgttatgcctgatgttgtcaacacaatgtcaactcttttcttgaggcttcctttctctcgcaagtgtgtttctttgtttattctctcgaacagtttttggaatttgtgggcatgtttgcttgtttttgtgatatgatgatgtttaaaaattacaattaggcttgcactgtctattgattaacgctgtcaatcttgttgagaaaatggctgtataggaacctagtggattagcatgacacattctttttaccagtattttttattctttttgtttcacttatgtctggcggcaatgaatatgcgtcagcattcatccagtgctcttattaccacttacccaaaaacccaaaaaagataaaaaagattacccaaaaaaaaaaggttttagaacttctgatgcgataacattatgataggaatttctcacatctcaactgtcatttggcatattatcttacctgatctggggaaaaccttctgtcttaattagcttatggatgatttgcatcagaagaagggttcttccagggagtatcccttttttttcatggggatttttatggttctgtctatagaaaggagtaaaatgtttttaaggagtagaagtgcatccttagactgctgcgggaagaattagttctcttgtagctttttgatgcttgggattctacagtttatagaacaaggatctaacaatgatttacagtaatagtatgcaaatatgtttagataactgttaaccttggctgtgtcaaattcttcctctagtctatttctaatatctcacacaaatattaagtagaactggactgtaagacttctgtgagtctcatactggaatttactgcttcttttgtcattttcctgaagcttgttgtgaacatttatcacggtgttctgctctgtaacagtcatctgtttatgttccatttgtaggtttggattgtgattcttatatttatttaagtaccatttggagctgaaagcttgccaggtcataaacactaaaaactggaagagtttttgataatttaccctcggccatgattataaaaagaagaagctattaaactgttgtgagtggtcaacataggacccttctgaaatgtccttgaaactattcaagaaacatattgctgaaacaaagttttcatagcttgagtaaaacttgacttcaaccaagctgatccttggtaagattatcaagttgcatagagttcaaaaaacttgctcttgaactcaagactaggatgtaacctttttctctaatttttctagaaaaagttattgtgatatatatatatatatacatatatatatatatataaaggcatacgaccactacactacactaaagctcctgggtgaatactctggaggtctgagtttgttcccaaaaagtaaatgagtttaacattgagttcaagctaggttcctctgttaggtgaattgatcagaatcaaaatcttgtcgagcttgaacacaaatagttgagagcttggtttatttatatcccaattttgtttgtagttgatcaatcccattaatagtaaatccatagccctaagagacttcctctagtataccaacatttagttgagagtaaaacaggcaatcttccagttcttaagcactctgccttcaataaaaaaaaaagtactctgcctagtcttgcttttttattctctgggtgaaatataatttgcttcaactcattatcttgctgggagtcattgattcactcgatctgctttgagcactcattcagtccgctgaaccttatgtacttgtttgcctgtaaaaccttagagtagtcgtctgacattgtgctctatgctgtccagtaggtctaatttagttgcactcattttgtaagatctatttctggatggagcactgatatttgaaccccatcaagacaaaaaaggggatactgttcatactatagtatcactatagcacatagaatggtagcactgttcaaacaacagttccatcatttctgtcatgatagtgttttgttggtggccaatatcatttttcattctggatgaggaacatccctctgttcaaacaaattctgcaaatgttaattttttaattccctttttttatgaagatgcttttgagatggtttcttttcattctattgaacatttatctctattactctacatcctcttactttagttttgtgactttactcaactttgtgatgtacttacttacattgttgaaactgactagtttgtgttcaacacacagaccaagatggcaagatgcatttgaagatctttgtcttgcaagtgctgactcagtattatctactgtcttatctgatagg

SEQ ID NO: 9482 - DNA, 2471 bp, Citrus clementina
  Intron number 3 from transcript clementine0.9_022643m (loc us clementine0.9_022643m.g) derived from phytozome v7.0 (c hr-ID scaffold_13; pos 3499741 to 3502211)
ttttgaagaaaaggtttttgacacggttgttgaaggttgacacttacaattttcctttcctctcttttcatcatctctggttatattgataatttaacgcactgtatggatcaactgaatggatttctgtacttgatgttgctgttgtttgttttagttgacgtttgtcaacaagatttcttagtaaaatatgtgaacaaaaatctatgtaatgtgtaatgcgtactcattgaagcgcatcccagtgccttttggcctgtccatcattaagtcaaaatataatgaataatcttagttttgtggtaaactttaaaatcaaagaattaaaatgggtttatagttgactgcaaaagtaattctctagcccaagaactagaggaacaatagtttttttggggaaatggtattggttatgattttgggttgcgaaggtgggttataagcatcaaatttggaggtataggtatatactttgcctctagcatgggaacaattacgtgttaggatcagaaaacaacatgagtcagtttagaaaacagactaatgtgaaattgattgatttttggtcctttaaattgaaaagccagattatatttgggtcttttgtctacaagtgtatatggcagatgtagaatacttaagcctctgggatatatctgacggaatactagagtactggaaaaaagcaacagtttattgtttccttaggattgtaaggtttagtgggccataactttgaactcaacttgctaagcaggtttggggtttatatagatagccaaatcaataattctaaaacaaggctgagcctgaggattttcaagagtgtattaagacttcactccatttgtcctttttaactctgccagggggatcgttaccaggctggatcattgaatctagatccagcaggatgttcttgaagttttttaattgagctgacttcttcagaatggaagctataactaaatccaggaaatatttagctctcttttaatctctacacaataggcaatcatatcattattgagttggtcaatcatctaaaagaactgattgagaattccattttaactcagagtaagcataaattaatgagttcagtcaatcatctaaaagaactgattgaaaattccattttccattgcttttcttgcagcatttccataatatccattggttcttttttatagcttctagctctttgcaaaactatatgaaaggaacctttcaagagctgcaaaaaaattatcagaactgaaatgactgaacagttgggttttagtggaacgttcagttctttttgggtcagctaatgttggttccctcgaactccaaccaaaacttaaaataggtataactggctgcaaaccagcttataaaccgaccggttgatatttctgtaaagtggttcaagaaagcatgaagcattcggctttctgttcagctcggcttgctgagaaaacaaatgaaccactgtttatccacccctgcttattggatagactgtcttactaagaagaggttggagtgtcagtgtcttttgtacttatggacgctgcattgatccgtaactttgattttctcactacttttagcatgttgcttaattgtaataactacttaagtacatttagtttcacttctacataactgctgcagaattcttctcctcatctgtgaatcctgcagtctctgagtgaatctctgacctcaacaataccatatattcctggaatgtttatcagttgcttggtctgtgattctggcagcagttcatgttatcatttgatcaacattgatgtaggagcttgacatttatcttagaagctttgcaatcagttggacctatataatgtaattgacttggcatgaaagaattccgaatgagtttaagaaagttatttagcgcttacttattctaaccaatcatgttttgatcatgataacaaactaggatattcctacatttgagtgacaactgaagaagcttctctgaagtctatacctgagcattctgtcttactgctctttgcatttttaaatatctaccacaccaaaattgctgaatccagtgagagttgccaatccgtctacctttacaaactctcatgtttaataagtaatattttttagtaatttgtgggaacagcattttttcaaagatgctttccaactcatcccatgactattttggctttcgtagaccttttcatggagacttttgaagcttgttgttcaaattaatcagaagagcttttttcttagtagttttagacatctgagacagtgttcatatatgagtttgatgaaagctgagagagccagattgtaaagcagttttctccttaaagagtcataaatgctgactcatttcttaaaaatatcttatttttatttccatattcttgtatagttgtttgatttttgtgttatataatgcagatctcaatactcgagaacagcctttt

SEQ ID NO: 9483 - DNA, 1863 bp, Citrus clementina
  Intron number 2 from transcript clementine0.9_023027m (loc us clementine0.9_023027m.g) derived from phytozome v7.0 (c hr-ID scaffold_3; pos 7551610 to 7553472)
accttgctatttatcacagctgtagcaggtatattttctattttttgacctgagatatccattgagttgcagaaactcgtaggctttttactatcagttagacaatctaagcggtaatgaggttgcattttgctgcgttaaggacgattttgcttgttgttgatgcatctgaaaaatgttaggctcagggctttatatctcattaagcccttaatttgaaagatagctcaccttggatgggttttattggccattggtttcttatacgattctttctgattaattattttttttagaaacttacttttaacttattcatattagtagagcttgactggatggatccttaccatatgaaagttatcaacgagcttcttatagacatttgaggaactatatcatgttctattctttttcttttgcctggattttttcccatcattattcttctggttggaagctgaaaagtggataacatatgtttaattttactttgtcaagttcaccatggatatagttttttggtacctatgctaatgatcataaatgggccgccttgggttaccctgttttgttttcactgttatcattcatgtattaattacattatgctgacttttcggaatgatctcctgttcatcccatgttgaatctctggaactgacccactcttttcttaggattagcgacctgtcttgtagttgtaaccctatgcaataatgattctctgtactcaagtttatgtagatagcttttgtggattcttgttgtgttatttctctgctttaggcattttttgtaaatcactagccaaatattaatgctggcagatgaggggcaagaagcagggtaatgcttgttgtcttcttaatctgtagttccctgtggaaatcttttgcaagatctagtttgttaaaatgataagctatttatgcttctcaagttccttgtatagaaaccagagtttgtatgttttattgttcatagatttaagtccaagagaaggtatctgaagtagggttctaagaacatataacatagttgaaaaccaaacattatggagaaatgagtaaatatttcccaagtccccaaaaaacaatgcccctgatctttctctagctgttatgatcaaaatccagccatgataattccagctttgttgacgcttacgaatcagttgtcattagctgaagtacattaaggttctcaaatacatggtagatggaaattcctaaaactgtccaaagatagctagggacctgaggagtgaagaaacttgctgactggttactagtcatcctcttcagcttagtatcttgccttaactgtaacaataacttctgatactgtcatcttcagctttagcagattatgttctcggtcacttacagacacgatgactcgaaaattgggatgttgcagggttctacttttatgtgcagaccacttaagggtcaatttgttgtttagaagctaaccttgttgtttagaatatgaaatatgttataagatatctgttggcctatcatacagccagctgacagtctttaatgcaataaatatctaataaaataagaagaaatgattatttttatgtgaatctacgaaataacgatgcatatcactttatgggattctggaaaataaaattgtccattgtctgtctgctttcctcaccccaaggatgtataatgctgtgtttcatttgtttttggttttttgattctgtatttctctaaactttcttcttgttgaagagcaaaattttttcaagttgaaagaaaaaatttggttattattttacatggaaatgtggatataacggtcatgtttaccgtttccccataacttcttagcaaggcc

SEQ ID NO: 9484 - DNA, 933 bp, Citrus clementina
  Intron number 1 from transcript clementine0.9_023379m (loc us clementine0.9_023379m.g) derived from phytozome v7.0 (c hr-ID scaffold_2; pos 6875095 to 6876027 reverse strand)
tactgcttcgccgcattgcctgcttcggtagtaaagtgagtatcattcattttttgtgggtttggctgtaactttttatttgtttgttgatttgatttgttataggaattttgaaattttattactggtttgattcaagttcatgcctagtctttgagttatccgtcgtctcatttaatttgatggaaatgattctggggtttcttaattacattctactttgtgacttgtagttgatatttagggttgtaatctcgaaacataaaatcttgttagtgggttgaattttgggcgtcagtagctttctcattttacatgtttgcaatgcaaatgaataattattcacctttcgatcagtatctaatcttcatcatatgatagattaacaaacctagaattgatgctgcagccaatattatttaatgttcttgcatacacatagtcaatgattgtggtgccacaattttttttggggcacaatgcctatgttctggatgcttaggagttttctacagtttgaacattctaattttttggccaataagattatctgcggccaatattatttaatgttctaggaagagcttctgtctgtctgtgtacgtatttttttgttggctgccatttattgatgtgtcttttgtgcttgattaaatgggaaatactagctattaatatcaagtcactatttgagcatatggattcattaaaggaaggctagactatgtctaaaaattgtaatgaaattctatcatttggctgttaaatcaattgcctagtttagcatttaaacccttggtggagatgtgaagaaagttttgatgtctatcattggtatcaagagtgggaagaaattctacatttttatttgtgattagaaagataacttatgtggatctcttcaggtatattttgcctgggggttgcagtata

SEQ ID NO: 9485 - DNA, 1878 bp, Citrus clementina
  Intron number 1 from transcript clementine0.9_026195m (loc us clementine0.9_025589m.g) derived from phytozome v7.0 (c hr-ID scaffold_10; pos 2739327 to 2741204)
gctcgtttttgtctccggtaatctccaactcgctggtgagcagcacgctctcaagttcagccaggtctttacttactactcttattttatattattctgatttgattttttctgtgatctatctatgccgcttattttgatcgatctcattgctattctatgatgttgtttgttttttggtgaaaccgatagctttcaattgatatatctgctagatctagggtttcttattggctttgtagtttagtacttgtttatctacaggcctcttcgtgatcttcgtttcatttatttaatattaattccatattctgattatcttttgcctttaaattgtagatttgtcgtgatgtttgtctgattttaaaaaatctttttttttatttagatcttagagatacttgtggtgtcatgccactgacagttttcgctttttcaattttaaaatttgaacatattctatttactcagctcattgcttttctttctaaaataatatcttgtagaatgtgtaaaatggatattgccattatttgattttctcgctgtaacaaatattaatataaattcgcttccatatgctatagttggacagatcctgccatgttttgacagctgttctctgccaatgctagtaagaacattgtagtaatttaattatcgataggtgaaatgggaagattggaacttctcttcatacatgatataatttctttgtcacttataacatcccttgcacccttatgctgatctctcacattgataagaaagaaaatgcgcagttgtagggctatgatattgcctaaagattgtctatttgctagttaaatgcttcaagtaatgatgactagacagctgaggttagagtgctgtaacagccttaatctgttcagttttatttggatgatgctattgctattctaaatcatgcaacttgaagtacttcagttttcagataatgttattatatctagtcattgctatataaatttcctgtctattaatatatgcttcttatgtggtgaaattgcaatgagatttgttctcactattggttttttgtctaaagtacatctattgagcatctgatgaactctgtgccggcttctataaaagttttagtgtttttattttgtttttaattttatcttcctgaaattagattaaatcttaagagaattaaatgaatcttttatggtaattaccagtgtcaaaagaaatctacacagaaaattcttagatattgcaactatattaagtaacctctcaaatcaaacttaatatttctttttcctaatttatttgtcaagaaatgaataattgaataaaatcatctgaaaactagaaagaaacccattactagaaacacagaagaggagcatttcagataagctgccttcctttgatagttagtgctttaggatttgtggggagagtgaaaaaaagagattataaatcataaggagcgaagagtgacaaaatagagacaattgattgttaattaagatttaatccaatttaccgagacacaattaataacaaagtaaaactcttttaggaagacaaataaacaaagaatgaagaaatcgagagaggaaggggaggaaaaaaaggtaaatttgactggtgagtgcactattttattttaattctttaaaaaatatgattaagtttgttttaatcttgaccgtcagatgaaatgtaatctaacagctacaaatgtgcgtgaataattgtttgcaaaaagagggctcctatcctgtcccttgtttaattggtttattgttacctcgcatttgttttcgattttctctcttgtattcatttgatgttattctcgctcctaaccaatatttatggtcatccttctgttctcag

SEQ ID NO: 9486 - DNA, 1792 bp, Citrus clementina
  Intron number 2 from transcript clementine0.9_020197m (loc us clementine0.9_020197m.g) derived from phytozome v7.0 (c hr-ID scaffold_120; pos 260433 to 262224 reverse strand)
tggtatgttgcagtttgctactaagtaatttatctgctttgccattcctttgcatttgtgttcaagtttcctctgctgtctatgtgcatgcaatttttgtacaaaagtacatctttaatatttagatccttcctcgtcctgccattctgtgaaatttctaccatattgtttgttttggaggttttgccactttatcaactacttctacaaaaacccttacgaattttaaattataagcacaatgttactatcttggcgcaaatatgctaaactctattgcatgattgtggttggtattttgctccctaaattggggcctctttttacttctcaaatttccagttcttattctacagtgtgttatagtgaatttttgtttgtattagagacttttgttacattcactggagcactttatagcaccactaccacattgatgttagaagttaactctggcatttttacatgggttcattctggattatggtttttattgatttgaacatgtcacgctgcggtctaaatttcccctgctgtgatctgggtatgatgattcctacacaagtaaagaaatgcgtgattattagttctaagctgtggaagatgcaataggaggaacgcatctaactgggatgtgggtgggcttgtttgataaatatgttggaattgactgcgatctaaaaattacggaggaagtgaaatagtatgatatttctcctgttcatgaggagatctttgaatttgcagtttctatgtggagaacaaataaacatctgtactttttcagtaaagcatgatgtgacttgattgatttataggcaatttcatttaaagttcaaaattgtttgggctttgtaggcaagcaacatggttgattttgatacaacagtggtgatctttactttcgctgacttgatagaatttccttagaaatttgcatgaaatccattcttgttaaactttttgttttgttagttttggggaaattttctatgatattgtttcctttgagggaaaggcttttgtatatctggtgcctaggaactgtgtggtaggagcgtccggtggatttgtggagagaaaacaggaatgtcttggatctagttttgaaatgaatgattttagagctagtttagagttgctttgatttacaaataatatggatgaactgcgttgaagaatgatctgtgaaaaaaagcagcaaagtgtttggcaactataattgtgaaactgctagtagtctttataaattttgtacaatgttactgtgaaagttccacgacattgtttaatgaccacaatgagatatgctgaaattctgggtgttttgggcaggattagtagaagcttacattgtcataactcttttattgatggatttatatttgttttatgcctgtgtatgtagttgccctccatggttcaccttaaagagttcagaaatctatgactatatatatatagagagagagagcccaataatatcttgaaatcacagaacttctacttctgtgactgattttgctggtcactgctattttgttaaaatcttcatattaacaaatgaattcatatctcactttcatttatttcccatttccattattatttttaagctggatgcttcaagctgtaagcattttcactttcccaccgattgtatattgacatgaaaaataaagttgagcttgctggatgtgcagtcggtgatctattttattatggtaaagttgaatctgtatgattggtgcttcaatttatacatgtattgttgcaatttttctgcaggtgg

SEQ ID NO: 9487 - DNA, 2811 bp, Citrus clementina
  Intron number 4 from transcript clementine0.9_015018m (loc us clementine0.9_015018m.g) derived from phytozome v7.0 (c hr-ID scaffold_80; pos 467872 to 470682)
caaagctaaaacctgagcaagaggtatgtattatatattcttgagaacttattatttaaggaaattttattctttattttttttccttagggcaatgacacatcaatactctattgctttctttttgcaccaagcataaccaccattgtgcttgtgttcatgaatctttctacttccagcatgtgtatagatgtactgcataggcacaactgtgttgattttttaattaataattctgcttctaaagacagtgactatcaaagaaatcctgatctattgattttagagacagtacatgttgagtccttccaaagtgggggactgagaatagatggatctgaaatctggtccctagatccacagtgcccacaacttatctacgagtatcatgctattttaaaatcttcaaaaaagaaaagaatttgtatgttttacaaacacaaataattgaaatgttgccctaagtttgatgggcacatacatgtgtcccaattgtacaaataatccaaaaagtagcctaacttgttcttctccaagtggcctgctttccagcaaatctagttacatttgtccgcgcttttgcaaagcaattttttttcttttttcttttttcgaaggcgacttaccaaagaatttttttcagagtcctaagagaacagctagaaactacaaaatccatatgcctaagatttcttgcggttatttctcttctctttgttttatatgagccactaaagatgcttaactgcaaaaatgtctaataaaaaaaaaaaaaaaaactgcaaaaatgttcaaaaatgaaccttcgcttttgcttttaaccctactttattactccatggttctttggttaactcaatgaaaatgcccaatcactgccgtatttcaacaccttcccaaaaatagcaactatatatttcagggctcttctgtgtcacaacattatgttaccatgcaatatgattttgctggatcatttggacttgccatctgccgccccattggccactgatacttaattattgttgttgtttttgtgcctgccgttgagacttgagagggagaatataatgtaacacatagtacacaattgttttagagaaaaaaaaacaaaaaaaaaggttgctggtgggatcgtcaggtacttacaggatgtacactactttggtgaaaccaaagtattgtagtattgtaatttgaaacgtcacacttgtaacttctgtgatatgaccgtcaatattaccatgaaatagtcattttctacgacggtaagtagtagataatctagtgtggcccctattttagagattaaagttttgtagggagagtactgatctttccataggatggatgtaatctatgttgtgtaattaattattttagagaaaaaaagctttcttaatagagtctagtatttgtttactcgtactaaaatataaagaagggaactatcgaatagttagatagtaaatcacttacttcaagtgacctagcctgcattacctgagtggctgagtttgattattcttcaaatatttaaaggtggttcctattcaatagattccagatatctagactgcctcatgacaatattaatgggataaggatcccctcctaactagctctcgtgagtttttaaagaatttgtgtcatgtgtttttaagtggtaaagtatggatagtatttaacctttttttttattttctttatttattaactaccgatcacccacatatatttttacttaagaatagatcggatcatgacggaatcttaatccacattaatctaggaagttttaaacattttgacagatttatgatcataaatgtccgtaaacataaaatgtagtattaaaaaaatagcgatgttatgtttttttagttaaaatacttagttgtgttctaattgatgtgttactaataaaaatttattacttgaattaaaaagaataaggattagtaattatttatcacttaaatcaattatatagtaacacatcatttactacattaattgaaatataaactaagtatcatttactacattaatcgaaatataaattaagtacagtattattcttaaaaaaaattggtaaaagcaatgtacaagaaacacatgaaacctgtactgaaaatgaccttccctgtcacccatttttgctcacctttcattcaagttgaggtttgtggcgttcttgaaaatgacccttcattcaagatgacttaaaatgagtactgataaagttttttaaaaaataataataaatttacatatatttttttagtggttacactctaagatacattagaatttgggacacaatctaaaaaatttattaaaacatccaaattaatgccctcaatattattgagagacattagctcaccattcggcaacaatctaaaaaaaaacaatgatatttgaaaaaagacacagaaaataacgacaacaaaaattttattttcttatgaattatgggatttcattttaacgatttatgcagttttcttattacagcattatcagtaaaatgtaggtatcttgctcttctatatctttcggaataaaatatatatcagttttaactttgtggcgttaacattaacccccttaatcacagtgggtgaaaaaagtaccccactaagcaataagcatgcttgaatatcaaaatttgcgggcataattgcagcaacgaaattctttttaggcaaattttcaatatcgccctaatgtaggtcatatgatcaacaagcaaagacatgattgatgatattgatgtcattgttggttattgagttgcaggttgaa

SEQ ID NO: 9488 - DNA, 635 bp, Citrus clementina
  Intron number 1 from transcript clementine0.9_008304m (loc us clementine0.9_008304m.g) derived from phytozome v7.0 (c hr-ID scaffold_47; pos 245624 to 246258 reverse strand)
gctgttcaagtatgtatacaatctttttaattgtagatcaatttaattctttatgagttttttttttccatttattttgataagattctcattgacctccaatgctactgtgcttagtcatcattaattttgcttcttttttgccatgcttcagttttttttttttttaatctatgtcggaataaggaaaatatattattatgatttgaggttttgtggtgaaatgaaaatgaagtattttaaataattgaaggcaattaaagtgtatcatctaaattctagatcttatacgagtctgtctttagtagctcaggtctgttaccttgttcatgcgcatcaaatacccaacacaacgttgaaatgactgaaaattgaaaatcagttgtgattcaagtggcgggacattgatcacacatgtattacttaacgctttgattctatgaatatgaaattattaacgtgtttatttaactaatgatatcatgctatctggatttgtaggaacgagtgaactgagaaggaacttttgtgtgtgatctgagaaagaattttgttattctgatgaagaaaacttttatcattaacttttgaaatgggctaattttgttatgccccttttgttttctataggacga

SEQ ID NO: 9489 - DNA, 2279 bp, Citrus clementina
  Intron number 4 from transcript clementine0.9_034879m (loc us clementine0.9_034879m.g) derived from phytozome v7.0 (c hr-ID scaffold_22; pos 1069245 to 1071523)
atccattgcttagcgaaaaaggcaagaagagggaggttcctctgcatttattcttgtgatggctttagctgcctggtatctgaaaaggcttgtttatgctttgatatattacatgtttataagtggtggaatgggtgaatacagagggaatttatgaccagccgtacgccagtgtttatgttggtgaacttactgctctgctggtattttatagctggtgcctgtgcctttcctggtctccgaataaatagttcttactatgtattccatcttcatgaatatggatcagtgcaagatcaaggaaaataatcccttcaatatatttttaatgcattgttcttcgactatgactctgggaattttttatctggtttctgtagataacaaatgcctgtgaaaatgtgggttaatgatcggttcaagtaaaaagtttatggcaatctggatgtaaaattttatttgtagaccgagtcggtgaggtggaaggagtgcgaatataataccatacgacttgagttcaagagaaccccaagagttaaaagacagttacgtttgtcgaaaaaaattaaaaataaacaaagccattggcgaagaataataattttgaaattgaaaagccaagtgcgacattctattgtagaaaaattaaaatcttaatcgatgtgattaattcttgaaaaaaaaaattaggtcaagagagtgtaccgcattactggtacgtccgttcaataaaactttagaacaacggattgtttaaatgactatgtaaaaaatacataatattttgtaattcaatgccaacatacacgcctaacacaaccttataatggtgctatgtcattaatatacactttttgcgtccaaagcgccacttgaatttcgtttattattattttcgttttgaggttagcatggcgtttttgttgctgttagcttaacattggggcgctgttagcgattacaatttgggtcaggatttgtttatttgatttgatgtaaattaaatgggtttgagtttgaaaaaattgattcagtgaatttgtttcgatttgcttattaaatgaattaaatttgggtttgagaatattgattcgtttgggattcgtttaataaatgtgtcacatgctaattgaatatgatctattcgtttagagttcatttattattcgtttaattaaattatttatttatgtataaaaaaatttaaaaattgaaggttaatataataattataaatgataataagtttgtattttgtaagatgttaaatttatggtctctttatattttactttgcttaatatttgtttattaattatatttttgtaaacaaattcttattaaatttgattgttatgatttgttataggataaacaaagagtaaataaattcagatttaattcgtttattaattcaactaaacgaattgaatcgtatattcgtttaataaacaaattaaatccgaatcctgaaattttaatttatttagtaaacaaattgaatttaaatcaacaaaatttttactcaactgtttaatgattcaatttgaatgcaaatcgattattcgttttgccaccctcaacatgttgtgacgtataaggtagtgtcgttgacttatgagataagttgttaactatcaaacggtggtttcattttttttttccctaattttattctcgtagccatgaaagacacgaagacaaataatgattaaatgttatgttatgccttgtgaagtttaagttaaggccacacagtaattttttttttttttttttttggttgaaaaaataaaataaaattcttctgaaaggaacaaaaattactgaagaagtgacacataggaagaaccggtcagagttttgtgtgaaacccggttggaccggataaaggagtcggttagggtagtttcataacagctgtggcctgtgtgctggtatataaagcaaaagaagtatcagtaaccggcttggggcataaaagaagaaacgtagccgtagaagagggcgctttatcttcaaagaggtaactaaaagatctaacaaaaccctaagttctatttaaccttctgattggttaccgtcgatttaacctttgattggttgccgctctctctccctttatttttttttaatttattcttttaaatttgcgctaaagttttacttgtttcgtagcttttccacgatttctctgtcggtttgccttaaatttgcgcgttgtatgacctttctctttcatttttcctaatttggcaaaccgtgtacagtgaagaaag

SEQ ID NO: 9490 - DNA, 1259 bp, Citrus clementina
  Intron number 2 from transcript clementine0.9_000085m (loc us clementine0.9_000057m.g) derived from phytozome v7.0 (c hr-ID scaffold_9; pos 187860 to 189118)
ttgcttgcatacggtgatagggagcctaggtgagaaccattattagttcatactcttgctgttcaattgtgaatacaaaattttgttttctgttgctgaacacttgaacattgcttaacgtattcagttaaccagtttcacttaatgcaattttccactattcgttcatggaatcttataattaggtgatttgcaggttgaggttcaaatgtttgactgcaggtctagttagacaatgtcatgcaaatgtaagagtatttatcaatttggaaaagaagaaatctgaatattcaaataatgatttgagttattctgttaaaaaaatgaatataaaataaagaaaaactatttctcaagtaaccttgttatctgattatatttgttgtgagaataatggtctgtgcataatcaatttgaaagatgcgttagattatttctacaactatccaatagccgttgcattgtagatgtcatttttaatgcattttaacagagttttgagattatttaagactggcagattggcagatttggagggattaatgatttggttgttgaattttacaaaagtgaggatccatgtatgttattctgttgaataaaaaatgtggcaatcaatgttaaactcaatctggtagttagagatttaattcccttctttttattccatagcctagttctactaatgttaatttctagtaaattaatgaaagaaatccttcatttggccataacccaaaacttcaaaagttgggtattgtcggcccttctaatacagtgctctttaaattctcaaacttgcgggaaaagttcgtggagccttccctttaattaaagagtcaatcattatacttctccattcctctatttctagttatcaaaagctgtcgaagtttagagcatggaaatatattgcttatttttctcagtctgttgaattgagggtgataatagtaattatctatgcatagacctgtatatatggactttcctattgttttctgtatgttgtggctctccctttttccctatctggtgtgtatctccctaccctgctaatttactctgtaattatgtactggtttaatgtgtgtatcatatatttttttctactgtccatgcatgttgaattttaatgcttatcctctgtctttagtttaaacaacatcaagctagttgaagatgggttcaaaacatattgttttcattaagctatgcgcttactttgattttctcatctgcattcactgtctagagag

SEQ ID NO: 9491 - DNA, 874 bp, Citrus clementina
  Intron number 2 from transcript clementine0.9_025256m (loc us clementine0.9_025256m.g) derived from phytozome v7.0 (c hr-ID scaffold_96; pos 259215 to 260088)
ttatttgtacaagcaagttttccagcatttagaaggtaggctaacttgaaccataattatttggccagtacgcagctttgaaggagtaactacatagaatagacattgagttatcactagagattataagtttgaagagcagaacaagaagcaagagtcctgaggaaggcaaacgactacaggtttccagagttaagtcattactgcaaaaatgaagaacaaatattctttctgttataacattaatttttatgattttgaatctgtcttttatacgtgagggcaatggcaatccgatgttatctagtgtttagtatttatgtacatgtgtagttattaagatttatatgattttctatttcttctcttttttataatttcttgacttcatatcgatgattgccctgttttaactacaattagttaagatggaactgatcatgagttgttgctttatcattttgttgaaagcccccaggtgtttgaccacgtagttttcaagacaaagccattgtcgtgatgatcccttcagctcttttgtaattgcacctttaaagaaagtgatctcttgactctcactgcgcgtctcctgaagtatgattaaagccatttcatttgtcttacaggtaatgtcatcaatcttacatcacagttttcagtgtgcagagtgcagactccaaccaatacatacatttaaaaacttcttgcggaaaccgttgaaattggacaactatgcactaattcttccattttcatgctgacaaaggctttgatgctaatagagatgcaatgtctaattgtctatatttggctgccctgtcaccaacgttttaaaatagacactctctctcaaacgaaagttgtaatcacccaa

SEQ ID NO: 9492 - DNA, 1159 bp, Citrus clementina
  Intron number 1 from transcript clementine0.9_019678m (loc us clementine0.9_019678m.g) derived from phytozome v7.0 (c hr-ID scaffold_106; pos 679077 to 680235)
aacgactactagggctgcaacatcagttggtttgggtctgttttgagtttattgtcatttatttggcaatgttttgatagcgaattttgatatgtcaatataatgtgtaattgttttgggttgagctggtaattatgctggattagattggtttggttttggtgcttctctgacggaacactgctttttttagaaattttgaatgtaatatgagactacatttagtttaattgaacactgcatctagtctaattactagacgtgtggcatttggtttggtttatccgatattctccagaatttcacttgcatctggttttgttgcatatgtttgcttgcatttgatggcagtagcagactgtttggttttgtgagatttgatggcagtttggtctgttcttggtgttgatttaagattgttcctgttgtgctgatgttaattgcaggtgcttgaatcagctagggttgctggtttattcagatggttgactcaggcgttgttactggttaattcaggtggctgactcaagttgttcatttaatgttaggaagcaaattaagaattaatgaagtattcatttaactataatttttgtagttatattatttcataactgaattataatctatgatacttttgaacaaattagagaatttttaaatatgaattaaatatgtgtgtgtatgtacattttgctatttatataataatttaaagaatatatttcaattcccacaaaaataatggctccaatttcaataattcccgccaaataattaaatttttttaatttaccaccaaagtatatcttaaagaaattttagttattcttgctagatttaacaaaaataatttgtaggattaaatttaattaaaataattaaataattttattattccaattaaaaatgtcatgtttatacgacagacaatagtcatgaatgggaagtattcgttacatgtttttccttgggatttcaggcaaatgaaaaaaagattgagaatgatttcaagaggacaggtggatgataagtattcatttttgtatatttggctaatgtcctcattagtggatttttatggtattgatctttttttttttttaattttcaattagttgcagccctagaggaagagcaggctgatcaaattgatttg

SEQ ID NO: 9493 - DNA, 1473 bp, Citrus clementina
  Intron number 1 from transcript clementine0.9_013680m (loc us clementine0.9_013680m.g) derived from phytozome v7.0 (c hr-ID scaffold_6; pos 607122 to 608594 reverse strand)
ttcagtttcaatttctcactcttagagccttaacagtgagttttcttcatcaaaatttcatttgcttttctttgatttttcctctttttttttttttatggaggcaattgatttgttattgttgattattaattaattcttaactcctctgtttagttttgaagaatatgtttgtttattctgccccttttttttaatttcttttttaacgattgaatgcgcccccagagccccccatttagtaattccggaactctttcttctgtatcgaggatcgtcgaaataagcaagaatactatttctacgctgttatatattattggatttttaagattaagcattgaactgagaatgattcaactttgtttgcgcatgcatgcatgtcgctatgacgattatgatgatcacgatggctatttaatattaatatgactttgttcttgttgctggagccgggagttgatccgatgtggattttcttttaaaacgaaatatatctttattaaattgttttctaaaaaaattaactgattttttataaccaccggaaaaggtaggacttgggagtcacaaatacggatgccaataagctgagatgagctaatatagattgttcctagccttcacaagtaatattaagcttgatttggcttatttaagtatatgaaatacagttctgaaatcatgtacataagcaatatagcatgtttatttgaaattttggggaattatgttttaggagtatgcgttctaattttataaaaaaaaaaaattatctagatttcaaatcgatggatgaagactgtcagactagatggaagttgtttagtggatcatactttgtcctaattctcaaattgagattgttttgtcagcatatgagatcaagctttgactaaggattgagccaggttcgttgtctaaatgacaagccctatgggattcttaatttaaattgagttagagccagtcagaagctgtgagttaatcaatatggatagagtagctgttatcatgccacactagaaatagttcgcgttgttggggtttgcctacaaagatgcaaaaatgtaaactacaattgcctgtgtcatgtacatgcacacagacgcgcgacattttgctcattgttgttttttccttgcgttctccctatttttgtgatgaatgaattctgcttggttttcgaccgaatgggttctctttatactcaacttgaaaatcttactttgtcttgttattttctctattgacttcaaatatgcacgtgcacctgtttttattaaatgtttgtggacatatgatttgagttcataactttatccttgtgattgtgggtaaaacttaattttatagctattttattgaaatgtacaagcatgaaagtaacataatctctcaatctacggtttgcttgtggctggctcagaaatttctttttcccacagaagaactggggcagttaaatctttg

SEQ ID NO: 9494 - DNA, 737 bp, Citrus clementina
  Intron number 3 from transcript clementine0.9_001070m (loc us clementine0.9_001070m.g) derived from phytozome v7.0 (c hr-ID scaffold_104; pos 660039 to 660775)
aagaaggaaaagaagctctatattgttctcattaggtatgattctgtccaatatatgatagtcgtattaaggacttgttttcttatggtgttctagccatctaactgcttgatcaatcttttaaatctttgaacatcattattttgctactgagttggaaatgactaatggtcattgggactatgtttgatgcctcctgtttcaaaacagtcaggagaacgggattaactaccctcgtttaaatgtcttcttttcctttatataatgttgcattaagtctggtttttgagaagatgaaggaaaagggataaatcatagagttctatagctcctgctgcaactgaatccagtttattaatgtcacctacccttccctctccctttttgttgttcttaggggccagagaagagtattaagaccaaaaaccttatatcaacacaatactctatcttaaataaatgatattaattatatgaaagagaagatacattagttgttcaatcctacagaatcacaaatcaagttaacctacgaacatcattcaagatgaaatacaagtgctgctattactcgtaaccaacttagacttgattgttattgcatgcatggctataacttgtatatctggggcttctttaactctctatgactgatattctcagtaatttcattataggacccgttaaatcccccatatacaacttataaaactcttttgtctttattaccagcttgc

SEQ ID NO: 9495 - DNA, 1919 bp, Citrus clementina
  Intron number 2 from transcript clementine0.9_004235m (loc us clementine0.9_004235m.g) derived from phytozome v7.0 (c hr-ID scaffold_41; pos 1608280 to 1610198)
gaacactcgtaagagttctttttcctcctctttcggcatgtgtttttgatacttgtttgtatgtgtgtgtcctggtcttttatcatctttatactattcttggtacttgattttgttccagttgttatgcttctcatatcttgtcttggttggggaatttgatgttgtcttaatctttgtatgtttttcatatttgttctggttgggccccatgaaactgatattgatgttgctttaatcatagttttggttaatcagtgtaaaaatattctaaaatctgaatagtttcaaaattatgggcatgataggtgtattgagttagagatgctgtgatacgaaaccttcccctttgttgtatatttcacgtcagtcaattattgagcttctagagttgatctaactggtaatatcgagttcttaggatagagatatattgatggatactgtcattcacaagttagtttcttcttcaggttgtttcttcttcaccattaattatgttgtgttgatacccaggccaatggaaggaggaaggttaaggactaaattaaatacttgaatccagatgtgtcttagtgtttattatgagtcagcaagctatgcaaatatttttgtgcagcatcacttgacccttagaccctcaaatgagggtagccaaaagaatctaaacaaaagctgattcacatgcatttgtggaatataaaacaaacacatggtacgttgcaattatggtggatgtatgatggtgctaaaatttccctatttctggctatatttttatattcttatgcactataaatgttgagttattgaatatttttttattggatttcctaatatggcatcagaccaaagtgtgtttataatgcattgcaaggttattcagttaaactctttgcatggatatgattctatctacaataatcctagaagctaaagttattatgaacgtgtgagaatatatttgattttatttcgtcataactgtagagttaatttattcttaaactttatttcgttataactgtagagttaatttattcttaactgtatgatcaacaatataccaatgaaaaggaataggcattatctaaattaaattgaacatttgaaaagttttgcaaaaataattatatatagtcacgttttaaaacactccttatcatatcaaagcatactagatatactttactggttatttctcgttaatttctctcttgacgtcaatagatagtccgtctgttgctatgacgctcttttatcaggtgggaccactatgtggttacaacactgtgttcgaatggcagaataccatcagtaggggaaatgcgactaaatgataattatttgttattgagatttatattagattttctaagtgtattgatgctagtaaataataatatttctttttttcgaatttatactaactctttacactagcagaaactgtcaccgtgaatattaaaatgttcttatttgaaatttctctggtagcgtaaaataagatatgtttgacatacatgcattggatatgttttggtagtagattggtaattctgaactctagattctggatatagttaataaaactgtatgcagatgcataaacatatacacgtaactacggggagaatcatattttgacacagatattactctcttattgatggatttgggcttcttaggtttaatagttggcccaatactgttgtagacctttgttaattgacaatttgcctaaagcatagtcatctctacttcatgcacgtgctgatttttaagttaagcatagtcatttctactttatgcacgtactgatttttataacttactgaagccacagttttaattgctacttattattaggttaatcttagtccatatttgactcttctttttttttttaactgccagaa

SEQ ID NO: 9496 - DNA, 5026 bp, Citrus clementina
  Intron number 2 from transcript clementine0.9_005310m (loc us clementine0.9_005310m.g) derived from phytozome v7.0 (c hr-ID scaffold_41; pos 1130486 to 1135511 reverse strand)
tctacattttgaagagaaacaatttaattcacaaggtacttgcatccttatccttcacgtgctgatattgttcttccttaatttctcataactcacggataccaccgtctccaagaaaatagatatttatttatcttgatttattctttaaaattccatgtttttttttgttttttttactgatatttgaaaaagaaaaaagcccaccaggatgatagaaatagtatttttaccgtccgtccgtcaaataggataacactatgatacattaaaacgacgcattgtttatacacagtattgtcgtttctgtcttgctagtatttgaatattatttttccttttagttttggttactatgtagttaagctgacctcaataaaccaataggtgggttaattagtagataattatttgctttgcattcactgattaggaactgtggttggtgtctaattactttctggttttcttttctattctattctcccccaattaataaaaattgaaaactcgtcaagatttcagatattataccgacctaaaattcaataaatttatacgatttttatgccgaatggaaaattttaagataattgacagggatgattaagtaacgttcaataaatgaatctgattattgtttataagctaataacgcaaacggtggctggctggacggaggccatcggccaggtgttctgactctatgtggtgaaggaaggacgtaccaaactaccaacaaggtgtttgttgtggggggtcctataaatagatttttgggtgagataataacacccccacttttagtatagtgacatcccacttacgactttttttttttttggcatttacaattttatcctcaaacaacagcttcattcttttttttttttcttttttttttgtttgaatcacgaggtggtcttgagtgggccctaattatgggagacacttttaagctcgtaccacaactcagactaatccctgctcgcaccgggtcggcccgtaaggaataaagtgctggccaaagtggtgacttcatatgagagcggggcttgaacccctgacctctcttaaggagtgagaataccgaatcactcacaccaaccaactctagttaaattggttgatatgatttctttggttaaaaagttttaaacgtctaaagtcaatttctctcatttcacttcgctgcaaatccgacatttttttttttactctctttgcatatcttaaatcattgatatgatttcttgtgttgcagtagtttaatgacattgtctcctcatgcattagagttttgggaaacttgagaagctttcttgcttactatgcttttctttttcgtgagtttttttttcttttaatgaatatttccttttcatgaaccgaaaaatcaggtgtgagtgaataagaaaattgaaaagaaacaaggataaatttggtattagcgacatgtattttaatttgggagttattatataaataatgggctggaaatatcgttatcttaaatttttaagtccaagggtaacaagtatatcaatcttcaatgtaaattaaatactttccaaaggatatataaaaagtaaattacaatgaaaaaattgatagcaacactccaacacccgtgtggttcgatgaaattgtcatagaggcccttatttgtagaaatctttccatagaccttctttggtacttaataatgatcacgcatacgtggcatacaccagagtttggctggacatgggccatgttatttttaaaataatgggggtattcctgaccattttgcaaatcatttggtgtccataccactttcgcaaactttaatgagaacatttactattaagaaagctttgttggagccgttttaaaataattttatttatttattttcgtgaatttgaatttcaaataaagtaatagttaaaaaattaaataggactttatcgacttcgttatttttttaataaaaaattgaacataaaattccaataacaaataagaaagataagtaatcatttaaaattcataattcaaaataaggaacacataactataaattttagcagaatagtagatgcaaatgataaatttgattgatttgtttgtcattaacttaagttctactaatgtgatttagtccctatatgttgatttacatattcatctagttcctatattttaaaaaaaaaaatttttttttttacatttggggatgaataaattctaaattaatttttttaacctatatcttttcagaatttgaatttacatgattagttaaaaaaaattttaaaaatcactccgtcatgtccataaagacactatgcaccacgaaaatctttcgaaaatattaactatttacagttcaataaacttggtctttacggtagagagataaaaccctccttttcaattttttttttctctccgccatcaacagaataaatcataatcattttttctaatcatagactcatagttgtattctttaccatcgacaattggagaccttcattcttgggtttggacttcgggtttggtttattaattgaacttgacaacttgattttaagatgtgtcctattgattgagttattaagactatgagtacctcattgataatttagtttgagaaagaccatgtttaaattttgtttggggatatttccaacccataatttgcgtaaattcactctatttcaaaaaattattgtacaaaaatttatattatttttaaaaattttaagataataaaaaattctaaataatttattaattagatccttacctttatatcagtttcttgcccattgttgaccgatactattattttaatttgaatattttctcttgtgatataaaatgaccagattgtctaacagatgtgcttttatgctatatgagtttgttttgtatgctagataagatggataggatgagataagataagattatatttaatattgtcttatgtttggtgtaatacctataattaaactaaatagtatagatatttatatacggacaaaatgtttggtttcttttattattggttaattcattcacattaaatttgatattataatttactccatttcaaaaatttattttacaaaaaaattacattatattttcaaattttaagataatgaaaaaaatgtaaataatttactgactagatctttacctttacataagttcttgaccattattgatcgatacaattattttaatgttattgtaatttgactatttttcttgtgatataaaatagctaaattgtccgaactatgtgctttatgttgaagtataaacaactctattgtactgttgtacacacattcttgtaaataacactcattctctttggttaaattgctcacttttctctttatttcttctgtaaatatcttttgctgtatgttttttctgttcaaattccttttttatttgaaatcattaaaaaaaatgtaaacttttttaattatctttttggggtggggtgaatttacacaatttgaggggtgaaaatataacttttaatctttgaatttttagaggtgaaatagtgcattaatgactacttatttcatatgtagacagcaaaagtgaaaatgtgaaattaaccatacaaaatcttaaatggagttgtcaaaatttatagttgtgtaaaatttttgaaaactttggtagtgaagagtgacaagctatttgagattggaatagaatcttctctttatcctttgtgattatgcaaaaaaattaagtagttgagtaatgataatccaaaaaacaaaattaaaaaaaaaatgattttccccttgcactgttaagacttaagactgaattaacggaactgatgggttatttgtagctgttcatttttctaatacaatagttcctttagttatttctaattatgcaaaaacctcagtaattgcattataattaatgactcggaagtaactataacagtgatatatttgagacttcttttcaaacgaaaaaaaaaaaaaaggtaaactgaagtcccaagtgaaaaagtaaggaaaataatattgggagctttgtttattttcttctaaaatctatagttacaatagggatccgtaagaagaaatttgcaaactgtgtgttctatatgtgatttattcaaaaagttagggaactagaagttattatccattagtaaaatttaacaatttaactataataattactcaaaaggaactctttaaccgccggtaggagatacagcgctttccttgattgagaatttgatattcaaaataaatggagtcattaatgactgaatgtgacacgcattcttttcaaaaaagaaaaatgtcacattcttttcaaatgtgacgcaaatttggaaaagcaaaatgcaaaaagcaaccaataaaaaaaattattaggctattatcaccggtaaaagatgatttagtgagcaccagaggctgatctgtagcgattacttagatatgtaagagaataattttttatgaataatattaaaacggtagattattcacatagtatcacgtgacactgtcgctaatcataaaatgaatagtgaatactgttttcagtagattataactcgatcatccagcagctaaagtagttagccagttgggctcctcttcttcaatccctgattattctgcagttataaatgctgcaaaatgttgttgaattttccattactaattaacttagtcgtgcataccgcaccgctatcaaggcatcaatttattcactcaaagcctgtgaattcaccaagattatagactccaatcacattttgctgaccaaatctcattccaagtctttggtaatcaaataatcaagtgcaatagaataatcccatcatagatcttacatattccatgtctcaagatattgctgaaccatcatcgattgttcaagaattaattcaaatattttttatttttgcttctctcataaacactaatatatataggctttgtactttggcagtttatttcat

SEQ ID NO: 9497 - DNA, 1100 bp, Citrus clementina
  Intron number 3 from transcript clementine0.9_026109m (loc us clementine0.9_026109m.g) derived from phytozome v7.0 (c hr-ID scaffold_73; pos 53580 to 54679 reverse strand)
ttattactccttcaatcctatccgacagactgagggtacactcatatattgtccccccccccccccccctcttttggatttggatttggatttatttactggttattattcaatttataaaatttagaaggttcatgccttgtagagtagataaacagcatgcagttttaagcttgaaataaacttgtgcttctaaaattattcccctggtgatctttgtcctttttataactttgggaatgggaaaatgaatttttgtagtgtctggtttacatgtgcatgtggattccccatttagttccttgtgcactataagcaaggtgcactaatatggtaatttatgttccgaaatattattggttgtggtatgtacagagttttgtaaaaacactctgattgttggatctttatagtatgtattcttgtttgcagttgtttctacggatagtttcattgttttctaacttactctgcaccgtttaaacttatttaaatatttgttccatgattgagtttttctcttttattaggtgcttaattccatagattctgtttcttttttaagagtcaaattttgcccgatgatggataaatcaacagaattgaatggttgcttggttttttattcatcacactcttacataccaccaatcatgcctctctctctctctctctctctctattctctctctgtctctccacactctgtgtgtgtgtgtgtgtgtatgtatatgtttctgtatgtgtttccatatgtgtttggtggtgtgtgaatgttttgaagaaggccatgcattatgccatatatgatgctttataagctatgagatctgagggcaattttttttttttttaaccaagctgtttttttcctcttacgctttccagctccagtcggtaccatatgttttgttttaaaaaatctgttgcagttgtgatgtacctgtaattacttctcacttctatgttattcaatgtgtaagagttatcatgcatttgtttctaataaaaaaaaaagttcttttattgagtatgcattcattaatcatcaatgagttgattataaatgttgttttattctcctatctgctatcagataa

SEQ ID NO: 9498 - DNA, 723 bp, Citrus clementina; identical to SEQ ID NO: 9172
  Intron number 1 from transcript clementine0.9_033702m (loc us clementine0.9_033702m.g) derived from phytozome v7.0 (c hr-ID scaffold_1; pos 5067709 to 5068431 reverse strand)

SEQ ID NO: 9499 - DNA, 1819 bp, Citrus clementina
  Intron number 1 from transcript clementine0.9_018536m (loc us clementine0.9_018538m.g) derived from phytozome v7.0 (c hr-ID scaffold_46; pos 474058 to 475876)
catcaatctccgatattctgcggccaaactatccggtaattatcttttcatattgaaggtcctttctcagatccaaatcaatttctccttgcaaatatatattcttgatctgtttttgatattggttaatagtgaatatgtggatttaaacatgattctgaggctgtacagttaaatgggtttttgggaattaagttttcagtgatcagaatctgaaaattgttgtgttttgagctttcacggctgatttgtgaagtagggttttgttcttgtggcttgtagaggcctaaagtttgtatcttatttcttggggaattgagagtggatttcttttttggcaagttatgcatttttataattgaaatgtcgatcatgagaagaagttgaattgagtgatattaatgttaatgtaactgttgaatgtcttaggagacctactgaagtttaggatttggttttttcttgagaatgctcgacaatgacaacttcttgttcgagatggatttggattcttgacaatgacaacttcttgttagatatgagatgccatttgataatcgtagctggtttacgatttttcgtatgtgtttgcatatcagtttctttgtacaatttatgcttgtttttgtattttgaattcattgacaccaaagtatatacaatttggtattttttgaatttacttctaagaaactagcccaacattttcttagtgattttgctttgctttttcttttttgatttcgggtaactgtagtttgttacaccttctgcttcaatagtgaaatgttatcattattgagcagacacttgtgtctagttgtttcctacggaagggtattctggaccttttgcttctgttgagttcttaatgcatgttgaacacagaagtgtcttcagcagtctaatttgaataatagaaattgttgtttatggtttttggtagaagctgtagtgatgaaagttcaatagaggagtcaggtactgtaagttcttttagggatttgaattttcttttgatttgatccctttcttcttcttcttattcaaatcacaagttaatgattctttcctctttgttggtcctaaatgatgcaggagctagggcttctagaggaagagaaagttcagtataggatattgtaggagcactgtgcaggtttatgtaactaaggctgttcaagtgagtttaggtttcgtattcatttttcgaatgctatagatgtacatataggattaggattgctgttatgagtaaagaataatgtctattacagttttgagattttgaatctaatgggtacaactgttcaagttataaagacttacaatgatgcttattcttgctaataaacaataacaaattatggcgttccccacattttcctagggattatgatttgagaagagttgttgagattttaagggactggtgcattttactgtcattttctgactcatggactatagggaatgtcctttcttagttatgtgatttctatgccaacttctgagaccactttacatttttcttttatgaataaagaaaaagtgtgctctcaatctagcacccaataatatgctatctttgggaatgattaaaaaaaaaaagagagagagagagggaatatgtctaatcacgtggtaattgttactgatgaatgtattggccatgcaagactgcaacaataataaaatcatttgaggttaaccaatatgggaatgagaatctgttgctaagagatgtagaaacttagggagatgatgagtttagatgcttctcaaagcttgttctgactgttattttctgattacagaa

SEQ ID NO: 9500 - DNA, 855 bp, Citrus clementina
  Intron number 2 from transcript clementine0.9_030552m (loc us clementine0.9_030552m.g) derived from phytozome v7.0 (c hr-ID scaffold_19; pos 2138183 to 2139037)
aagctggacaaggtgaaatttgcttctctcctcaatagaatagaataatctactctctcctatttgatgaaacaattataaccggaatctatgtgttaaaaaaaaaaatctagacttctcactcaaaatattttatatgtttgacaaggggtcatgagcccattggcaacccatagacttaaggtttcttgagtgcagggttcgagttccaacaatgctccggcttgattccctccaataaaattggatagaaatatacttatctccccatcatttagagtatattagatatccctctagtgttaagtgatagtcaaactttagattatggcgtagtagaattatcaaagagagtcctgatcaatttctaattgtaaatattagtagagtttttattataatattaatatataaaaataaaaaattatagtttagacttctcatcaaagtaatttatatggatataaattgaataaaatttaattgtttctacctagacctaactaaataggtctgtaaacgcatgcaagaagaagtgatgatataattgttttaggttattattctgattaagtggtgctagtcgcaatatccagtaaaagctcaatcactattatgtatatatttttctgaaaaaaagttgaaactatataatagtagtttatatgaaccgaaaatatttatcagatttcatttcttttttcattatcccattaagtagaaatagtaggggataaattacagatttccttaattaataattaaaaaaagcttcgtagaattagaattgattaactgtatcagtaaaaataagcccaaatattaatttggatttgtgttttgtagtgctaagtc

SEQ ID NO: 9501 - DNA, 3414 bp, Citrus clementina
  Intron number 3 from transcript clementine0.9_000449m (loc us clementine0.9_000449m.g) derived from phytozome v7.0 (c hr-ID scaffold_98; pos 269325 to 272738 reverse strand)
tcaatacaaccatacaactgtcgtattacaaaacggtgcgtattcatcaaccaaaccatttttttgtttttttcactggaggattgtttgttttgacaccatttttttgtttttttcacttgatttaaattttataattcaatttaaatctttttttatcaaaattgaaattacatatataattgcatattgttataattagataatataataacaaatagtacaaaaaaattttatatatcgtaaaaaaaatttcaaaaaaagtaacattgtgcaattaaatagttaaaagacactactaattttaattaattattaatccgattttcttgttttaacagtataaatattatatttcatttgtttgcacgttaaattacaatacaattttgaatttaccaatacaatttttttattattgcaataaagataaaatagtttgaattaatatctaaacatttagtacaatcctatataatattataatgtgagtaggcttctcaaatcttacctagcaaactagaaagccactgctatagaacctctaaaaatgtagatgcatatgatgaatgagttcataagattttttaaactagtacctctatacacttcggctatgtttgacaggcaagattacattggactaagtattaggattagactaaattaaattgaattatatctaacttatgtatagtacactatcgaatttgattatattagattaaatttaaatggtatttaagttaatatttgaatttaaatatcaactttatatagatatttaataagaaatattataattaataaaaaaataatattatatttatatatattattcaattagttatgtgatagtcacaattagaatgaagaaatataaattatttaaattataggttgtttcatatgagatatatcatttcattaaataaaattattcaaataataaattaattaatagtttttaagtaaatcatgaataacgaaaaataaattacttaattaataacaataaataaataaataaattttaagttataaataaaaataatgtaatgaattatagaagatatcataaatataattttttttttctcattgcctaatcctatttaaacccacatgaaaattgagattactaatcccatgaatttaggataaaaatttgaatttaatccattagtccaatgcaagtgagcatgacaaacataggattaatagtttatcccaaaaattaatccaatcctatacttaggtggcgtttgttttttggtctgaaatatgaatagagttgaatatctgaatctgaatcatacatttgtttttctatctgaatagctaaaaataaatattaagttcttttttctaacttaaaaaaatctgaaaactattgtttttacatttatgtccttacaaattataaatgttaaacaaataataaacatctcaagaaatataaataagataataaattattataacataaatcatatttaatttgatacaactctttaatattctatattatttatgttaatcaattttattatagtttatgatgtttttaatgaaaaatattcataaaaatttatgaagataaataatgctaattttttaagaaaataaatagataacaataataatagtctacaactattattatcacaagttatatagagagggtaataatgctaattattaaattttatttaagtaaggataaaaattaattaattaaataaggatattttggagaatatctttaaatgatatcattcagactttttaaattaagtaaaaagctaaaaaaattagcttaatgatttaatggctgaaattttttattaagttgaaaaacaacaaacttgacaacttaactgattaaaattaagtcaattaagtcattaagtaaaaaaaaaaacaacctcttaatcccaactcccaaacataaccttcaggagtaactaggataatcaaattggctgccctaagaccctcatttggattcaactgactacaaagattcaacataatttggcaaataaaataatcaactcacttgtcgcagaagctagtttaagcaatttatatcagaagtgaactaattgacatgtctttagggaacatcctttcaccttaaattaaaaatgttgcttttttttttttttaaatttcagaatgctcagagttccacagatgattcaggtcaatcttcaatgtaccatcaggaataataccttttctctgatgtttattagtcacgagttttttcattgatgatcatttccttgtattggaatcaggtgcaaacaagcccttctgtttctatcttcactgttctgctttggctctcttcaacttttgtgttgctcttttgaaagtgctattataaaacttacattccatgtaatcgattgagattcaatggttgaatggtcctcaatagtttcctggttgctgtattctgtgagattctcaggcacccaaaagacaaattaagtaccaaaattaaggatatatagttgaactttgcctttgcgtgcaacttgaatatattgtgttctatgagtaggaacccacgtaaatggttcctcgttaacatggattgccgttgcttgtggttcaagcaaccttgtttactagttgattccttgtcttcttaatcagaaatcatgggatacactggttgtaattctagtcatgcagtaaaatataagtattggcaaatcgcattgagcaggagattcagagccataaagctttggattgttattcgcagatatggcttggctaaccttatggatcacatttgtagcaagtgtcaaagagttcatgtatagtgtcaaagacttcttaccatgacgaaggccgttatgttttcccttgtcaaccatattttttctgagcgttcatcttctgaaactgttagtagaatgtcaagtaaatcatttggtgcatcaaaccttaacaccgttaaaaatttgttgaagtctcaagagtatttgagcaattccaagctaaagttattttcttgattcttttacacatttttatctttttctctgaacatctgatttacaagctttttttttttcctttatttcagttattatattaaattggtaacagttgaaatagtagctggaaaaatatggttgtcaaaaaactttggtgatctaacatttagtccatttacttatttggttttaatttatttaatgttaaaattacatacatacaatgcacaagacattagtaggaatccggtccaatcttagtaccacaacagaacgtgtccttaagtctcattagaaaagttagtctgagaaatttagagcagaaatgaactaagtaacacatctttagagtttgtacattcaccattaatatgatgctcttcatgattacaga

SEQ ID NO: 9502 - DNA, 861 bp, Citrus clementina
  Intron number 1 from transcript clementine0.9_001863m (loc us clementine0.9_001863m.g) derived from phytozome v7.0 (c hr-ID scaffold_19; pos 2947720 to 2948580)
tttctggaaccagggatttgcagaggctacaagtacagttctttcttctgctgtttgttaccttttgatatgtgtgtgtgtgtgtgtagtaatgtaattagtggagccggtgaatatttatctaattattgtgttagctttctttcattttttgttttgttttgttttgataatcttttaggactgtttattgtggcctgcaatcattggagtaactctttgttaacttttggtgggttttgagttttgttaggaagcataagtttggtgtttaagcttttgaggttgttgaaattctttgaaattgaagttgtatgtgaaagttccaacagaaatagataaagaatgtactttgaatctttgttgtactgtataattctggtctctcacaatgttttaatcagaaatttcaattacggacaaaaatttaacacgcttccaatttggttgctcatagttatgatgcctttcaacttgaatttaatatgtttgctagaatgaactttaagaaaattcaagttttatttagttatcctctggaggctacttatataatagtaatgatttgtcaaattcctaatagaaaattcataattttttcttttgtgaagattgaatttatgtttggtgccttttttcatctgcaggaaaatctacaaaataagttttagatgtgaaagtaattgcttgttttaataagaacatgactttcagaagagaggctgctgttccttttttcaaattaaaattctcatatttttcactttctaaatctgttgatattgaaaagtctctgaacaatattaagatgttatttttggtgcaggttgagatattgcacaggtcaaaggagctcaattg

SEQ ID NO: 9503 - DNA, 3400 bp, Citrus clementina
  Intron number 3 from transcript clementine0.9_001009m (loc us clementine0.9_001009m.g) derived from phytozome v7.0 (c hr-ID scaffold_22; pos 2644365 to 2647764)
aaccttccacttgggttggcaaaggtgaaagttcttggcatctttctcgtttagacattgaagaaatattgaacttgttggccattttaagcttttaggttcacaagattggctaaaaaataaatagtccatttgataattcgttcattggtttttgtatttggaatatttttgtggataggccctcaagactaccttaattgttgatcatccttactttctttgtggatatcgtaacaacttcctgtgtagcaattaagagaagttttttgtgtaggtgttcttcattgttgttgttcgcttaaatattcatctttagttagatatcatactcaatagatgataccgtgcaacctttctggtttatcacttaaaatccttgctttagtggatgttgatgttcatatttaaattgccagtttgagtgtgtttggcacagtgtattttattacactatattgcattattttgatttaggtgtatggtattatgttgtattcgttagcactgcattataataatgttatccagcatttggtgctacattgtattgtattaattttttatattatggttggtgctgcagtccattgtattaatatttttggtgattatttgaaattatatatttagaaaataatatttattaatacttgggaaaatggtaaatatagaatttttaaattttacagctttatttttcttttagtataaaatttaaaaaatatatataattcttcataaaataggtcaaattaacaaattttaaactttttggcggcataacatttattattttaacatttcctgaatatataacttgtggaaccaacagtaatagatgaagaaaataagcaaaagcaattcccataagtaaattgagactgtctcttttttttgctaagaaacaaagattaaatataactataagaaatatgtacaaggattaggaggattacaaatccacaaaaaaggacgagaagtcccaatataaacagaacacttagaaacggcaaagataaaatatcccaaaacccaaaaacactagctcactaagagtgcttcctgttaagatatagaagcttcccaattaagcaaaataaaaaagaaagagatgtctttgaattcagtagttatagatgcccagagggaagcccagaacttgactttgtcccataggtgtgaaggatcttccccagccttgttatcaaagattctttggtttctttcattccatacgacccaaaaaatagccaagactgcacagtcccataggacccttgctttttttgtctctcttaagcaagaaaaactttctaataggagggagtaacttgatacaggggctgaccagcttagattaaaggtcttatacaagttagaccacaaaaagtaagcagcagtgcagtgtaggaatagatgatcaacattctctgaagcgtttttacaaacgacacaccattctggaaataaagccatattaggtctccttctttgaaccatgtcatttgtgttgatttttctatgagcaacagaccaaaccatcatcttcaccttggtagggactttagctttccaaatctggtaagaaggagaaaatgagggggcatcggggttatctatgaggctaagaaagtaagatttcgtagagaaacttcctgatttatccaaattccaaactctcttatcctctttcagattattaagaaaaactccttgtaggatcccgagcatcttagcacattgttcagattctctatcattcaagtttctaatgaacttaaaatctcaactccactgcataatatagtacttacacatactagctatagagcaatcacgacctcgagaaagcctatgtaatcgagggaaaagatcacagagagcaacttctttaatccaacaatcctcccaaaatctaactctctgcccattaccaaccatcagcttaatattggataaaaatctgtttttccttttgaaataaacacccaaggacatctactactccctctagcaacatcagctacatcccaaccatttttatgcaacccatacttactttttataacactataccatagagaattaacttctaaaggaaacctccataaccacttcccaagcaaggccttatttctgttaataatatttcctaaccctagtcctcccctggattgtggttgagaaaccaccctccagctgatcaaattgagactgtctcttaacctaataagtttaaccatgtgattaaagtaatcaccaaagaatcataatagaggaagcagcagctaatgcttttattcattaaaacaatttaaagaataagtgtgtcaaagaatttttccaattatctagttctcttcttcctcttctttggtggctgaagggcttcttcatctttgtcttcttcatcctcttcgttgtctacttcttgcacttcatcctcatcctcgtcctcgtcttcgtccccatcatcatcgtcatcatcatcctcattgtcatcattgtcaccgaacccgccatctccatcctcatcatcatccccatcgttatcattgccatcatcttcctctgtgtcagatgtcttggcttgggtttctgtatcttccttgatttgtagaagcgagatctgaagatttgaagctctaaaactgaagaaaagaagcaaaagcaactgcgttcaaaaacccgcataaacccaactcctacacaggtttagtttatgtgggtttgaccgcataaagtaaatatttgaccgcattgcaatactacatggtgtaattacccaacatggtattataatactttaaaaccatggaggggctctaatacaatataagaggagcaccaaacatgccctttattcaaaacgttctccctcctggatttggcacgttttcctcattacttctgtccttacctctttcatgatttaacctttttactgagtatatcatgactattgatatatggtttgatttaggttaattttagattacccctcacaaaatggcaatctttaaaatatcctccaaactattttaaagctcaactgagggttaatctgaaattaacactttgatttattgatttacacgttgctgagatattttttttttgcaattttatgcttgtgcatgtattttctttttacatacaaattttgtgttatgtggactttgtattttacatccatcttggtattttattctatcgtttttcttggagtgaggcttataagattcgaaattggtcaggaataacatatgggtgggtgatagtttttgggtttctgggtaatagtgatttctggatttttggagcattggcgcacttaagccttcataatgtttgctgtacaggtcaacttttactggctaagggtgaagtagaacag

SEQ ID NO: 9504 - DNA, 2811 bp, Citrus clementina; identical to SEQ ID NO: 9487
  Intron number 4 from transcript clementine0.9_015234m (loc us clementine0.9_015018m.g) derived from phytozome v7.0 (c hr-ID scaffold_80; pos 467872 to 470682)

SEQ ID NO: 9505 - DNA, 967 bp, Citrus clementina
  Intron number 1 from transcript clementine0.9_013905m (loc us clementine0.9_013905m.g) derived from phytozome v7.0 (c hr-ID scaffold_26; pos 674864 to 675830 reverse strand)
caaagcacagaagaagaaaaggtaatgagaacttgtctaatttcctcaattgggcttgagcccacgaaggcacattttcatgggctaatagcctaatagagagttacatgggccttcatggatcttacttggaggcccaaaagtggacatcattgactttctcatgattacgcaagtgtttccctccacagttccaattttcccacaactttcttattcgtgccttagtgagcgcactgagaaagtgaaaatcctttttaacatttgatcactgcttttggaaatggcttctcaactatgatctaagacaataattcaatattggacttcatataatcgaatgattcaatgtatgaaattgaatttcaccaactcatcgattttctctttcaaaaatttgagggaacgaatgagtataaatctcataggactccacaagtgaccatcatttgttgtggctggtaatacatataagaagtcttatcatatatctagaagattagccaattaagatacccacccacccaccactacaggcgcaaaattagcagattttctaaattgattatgacatccatgatgaactaaccaatccacaaacattacattgaaaaatctacaaatgagaccatcaacaatacctatacttctcatatataaaattcatatcaaagtcatttaatacccatcttaattctttccgcttgtctccgatctatataatctcatacatccaatatggaaaacattgccacttccaaaatcaagcacttgaatcacaaagaatataagctacgaaagtttcaacatcttctatcttctttaaattggatggtactgaaattaaataaaatcacctattagtaccagaagccttaaccttcttggaccaaaggcttgcggccatttacccaataattcaaaccttcaagaacacaatcacatcagatcccttcaacatcacaag

SEQ ID NO: 9506 - DNA, 1082 bp, Citrus clementina
  Intron number 18 from transcript clementine0.9_000194m (lo cus clementine0.9_000194m.g) derived from phytozome v7.0 ( chr-ID scaffold_6; pos 926332 to 927413)
acgtaagatgcttctttttcctttcatttttttctcaatggatgctgcttgatattttagtatatatctcttcaaattgtaagtgaatttgcaattttttttgaaatcatgattgtaagttcatttgccattagggtgataattaatcgttgctcgcaaattttgtagacctaagatgatcaatgttcttcactagttcacagcgaactcaatttgttgaccttcatgtttaccagaatttacttccagtttttggatgatattatttgttgggtaatagttttaattgttcgaagttttgttaacacagtgctaacaaactttatttgtctaggagcttttgatatagctattggctttatgtagttttcaaatagtggattgctcttttgacataatttattcaatgaaaagaatgaacatgtttcaatttcaatatacatatattcttcagatttgctctttcaacagaggtaaccatggcatttactttgaggttcatttcattggtaaaccatgaatcagttgatgcactagaaattgactttagaatcagtagttataatttgactttttggttttggagattgagcattcaaacatgaaggatcgttgaggactgagctcaatttcgttgacaattcagtgtcattcgtgtcaacaattataattggagctggacaagataatcgtggctactaataaagtctgtgcacatgcagttaaaagatagcatttcgtgggtgtttttactcattgcacagtgtctatgaaggtcatgcttgttggtggcactgtatgaattaagttacgtttaatttttcggacttttctatttttgatctttccaatgttcaactagaagcgaataggcaacaagcattcatgggcattatcagggactaaatagaatgccttgtacactgaaacatagtataattcttttaagcattgcatacttcaatccttttaagcattcactaaagtctgtttaaatagacttgttatttttcttaaacttatttgatcattgctatcaattgtcagattgaatacatttcatcttgctgggcgaggtgaaa

SEQ ID NO: 9507 - DNA, 1033 bp, Citrus clementina
  Intron number 1 from transcript clementine0.9_026972m (loc us clementine0.9_026196m.g) derived from phytozome v7.0 (c hr-ID scaffold_3; pos 8259655 to 8260687 reverse strand)
agtcggcgcacattaacctcaaagtcaagggccaggtatttacaccttaattttttgtttatattttttgtaattggccaaatttgaaatttctatttaattaaaaactgttttatttttgtaatttttttatatattgttttttaaaaggctttcaagtcatgtttgtgaacaaaatttgtgcgggaaattgaatcttggccgaataaatagacagtttctgggaaagggatagattcattaaaaaagaatgatgttggtttgaactttgaaagattgaaaggcactaatttacaattgttgccctgatttttttttatccccgtttttggtttttgatggtgaaacttttataggggaagtcgattctaatcaatatgattagtaataaattggttgatgcatgttgtttgataaagtgtttctgacattaaaaaaaaaaaaaaaaggtatcatatttttttggatatttaaataatggtctatcgtagttatgcatcctgttattgcttcttatgttaagaattgcatagtttttcttttttctttttgtgaaaaagaagaattgcatggttgaattcagtatagagtgaaattttttactttgtttttttttttgcatctcagtatctgctagtattgggggaaatttatcacatgaaggtctactgtaggagtttaaattaatatttaattagcatgttttagttgtgtctcctttttatatagttgatggtgcgactgctgaggctggttaattagagctcttgtttaaaattttcaataattttacagtagaaggctgagttttgaaccccctggagtctattgcagttgaattcacttatttaagattatctaatgggcacctctctttactttctctatttcattttaacatttaatgtttaattatgtaggatggcaatgaggtgttttttagaattaagcgaagcacccagttgaaaaagctcatgaatgcctactgtgatcggcagtcggtggagttaaactctattgctttcttgtttga

SEQ ID NO: 9508 - DNA, 3707 bp, Citrus clementina
  Intron number 2 from transcript clementine0.9_018117m (loc us clementine0.9_018117m.g) derived from phytozome v7.0 (c hr-ID scaffold_10; pos 1171059 to 1174765 reverse strand)
ctgtgttgtgtaagaaagagcccggtagcggtaagatctcacccattgtctagaaacggaaactattttctggaagattttctttccctacctttggaatcacatttctagagtcaaacccatgcagtgatgcacatgcatatcggccaccacgttgaaaatttctttaatgatgtgttatccacccttgtactcttatttatctggggttgcttgctctctcgccaggtcgtatcctatattttgcagtagaagtcgtctagtcagagctcgcaaatttgtaaattttatattgagggtccccttaggaactattttaatttatctcgtccaattaataataatgacttaagtcatatgatctcgatatatttcattaggacacacaaatacacaatattacatcctaggaaaatagtttccctatacctctaattgttgctacttaaatataaattctacttataagttagtaagagacaggaaacacaaatgcacaagcaacagctaatgtaacttagcaactccctacatcttaaatataaattctacttaaaagttacatcatgaggtcctacattgttatgaaacactttataaatgtttcacaaaagataaaatattttattgtattgactaagtgtggacacatgtcgattcagttttgacactgattatctttttcataaaatataattcaaacaatagttcggttcttagtttgattgagtttttttttttttgttttaaatcataatttctttttgtggcatgtttagttttcgatgtttcttttctataaacaaggcttcttcttcttcttcttcttcttcttcttttttcccccttcctagcattggttgaatgttaatagttttttttttaatttttctattctgacatcaatctttgttcaagtttttatttcttttattttgttcatttaggatatgtttgagacgatatgcttcaacttgattttaacccaaaaaaataacaactaaaatatatataaacactcgattttgtttagtagattagtaccaaatatttaactagtcccctcctaataaggaaatcataattttatttaaataaggattgaagactaatctaaaaaagaaaaaaaaaagaaaaacacgaatttcaaatataatttagaaaaaaaaagcactaaaattaatatttttttaatcttttaatttaattgtaattttaataaaatgaggaatccttattaaaaaaaaaattattcatatttaaccatctctatgattcttatcttccacatactaattctagtccataaaaagaccgcaacctcaaaatttgcttgctacattccattactttccatattggcagttatgctatttgtcttattcttcgtgtgtgactaggacggataacaagagcaagaggattattatatttgcattaaaaccatgaaagagagcacatcaataatgcaatgctttgtgcattattagaacctctttgtattttccccttgaattgcgttaaactattaacaggcccctctttttcagactcttacctaacgaaatggacgcaaagcaaaccaatcacaatttcgtgttttttttttttcctcacacttttattaattagtttcttttatatatatatatatatatatatatataaagaaaattattagtatatttaataatgagagcctcgcgaatgtcaatactcacatgccccaccacgttgctcttgcttcctccaacgccggcccagttgacgacttgcgcccaccgtaactcccggtggccactttattagtacgccgtttcttttgccctttatttcctcgctcgagccaaaggtcatgaaatccttcgatcggttacgtgtgttttacttattttttggttaaatcaaaatataaaattgccaatagaaaagtagaaaataaaatattttggaggcttttgatgcttcgtttattgcttttatttatgatattaatacgtgcgaaacgaaaatgctcatgcgcgaaagtccatacacgtgaatttgagtatagggatggtataattaccatcaatatgcaaactcacccgtaaggatttggtattgagaaaaaattcatcaaatacctacgtgggtatctaccaatttacattctttatttgaattatttttatttttaattataatcattaattttttttttcataaatccatgtaagctaaagttcttaattttaaaacttaacttatctcattgcaccacacactcacacacacacacacacacacatacaaaataaccttttaataactagaaattttataattttaagttttaatattactgatattctattttaattgattgattttgtttattttactttaatgacttgaacttaatgattgcttattaaagttaggtttttatttgtttaattaatttttaacaatagttatccaaaatttacttgttagtattgttgataatacctgtatattgattaaaagatgaaacaagacattgatattagtgatgatgatttacctacaataaaaatattttgtattagattaatattttttgtatatttgttttaatgttgaaattttaatttcttatttctattgataaaatctagtattgagtattttatgcagattttttaagttattgtcataaattataattcgaagtctataatttaatattttatttattattaatttttttaatatttatgattttaaatgacaaaactcataaaaaatctgttgcggattgtgagttggtttggtaattgttaaaatcaaaagcggataatttttttttaaaaaataaaaatcattgcgagttgccagtgagtttaataatttaaattttttactagtgagtttaataatttaaattttttactgatgcagatttttgtaataataaacccgctgctgcaggtgatgtctgattggtatctctaaattaactgtgatattgctctaaatttagctaccgaacaatcattcttagttaagaagtaatttaataccatgtcaaacacacacagagtcacacatatgcaagtaacaaagacaacacgtttactcaacgatggtcatatttatattggagtgtttgaccagtttataataaagtggtttatatatggaactaattgtgatttaattttagtttagggtataagaaaggttcataattatggcttttgaatcacacgattaatttcaaatatgaacaactttatcataaactggtcaaatactctcatataaatacgcccattgtgtggttcattttacaactcttacaatactggtccgagatcgtgaaaagaagcgagcaagttgaagtcggcagaatcccggagaaattgaaaaggttgatttctagagattctcgtacatcgatctcgattcagcccagaattatatataaactgttttagcttttgatctcgttcacattcgctatcgccatcagtcttcttctttgctcttctaatattctctctccttaataaggagaaatcttcgtcaattgttatatatataactgttgcatttgtagtgactagtgagttatttgtttgaatttgtttatcgaattgcttggtttcatttctgaaagccaacagatgtattgataaatgtttcgttgtcttaaaattcgaaattagcagagagaagac

SEQ ID NO: 9509 - DNA, 2411 bp, Citrus clementina
  Intron number 1 from transcript clementine0.9_026367m (loc us clementine0.9_026367m.g) derived from phytozome v7.0 (c hr-ID scaffold_42; pos 308793 to 311203)
tggcacctcaccaatcaattcaagtactctctccccttttctttttcgatttctttcctttaatttcatgattttatgaacatgattactgctataatttcttcttatttccttttttagaaaaattattgctgcggatttgtttggttgttatgaagggtctttgtgtgaaaatcgacaaatttggcaatcttaaagcgctttcagtgatgttaaaagttgccctttgatgggctggtgtaaaagtttctgcttaattgggattctttttttttgtttttttgtttttttgtttttgggtttgatgttatgtaagaagggaatgtttgtgaaatggcggctttgattttatttcctggttagcttaagtaggctttctttatagctttagtgtgaattatgtgctgtgtttgcatatatgtgaacgtgctgtattttacagtcactgctatcttggtttttcaggatttcattactataccagtggcatagtctcaccttcaacaactttttctccttcacattttcccactttgaaatccttacaagaaaactccatacctctctctttctgtcacacattgtgatattgagattacatattaactcggtgggggattttatagcggagaatgggtttgttttggttactgtttggcatgattggcacgttgctgtgtcctctagtggagattctcatatatcattttttaaggggttgaaaattttttggctttggtattgcagttttactatgaccattatatgatgccggcacgactattcaaattttatttatttatgtattcacatatgtgatcgaatgaagcagtagagctaactgttataaccaatggatccaatcaccgggtgtttcaatgtgtgtcaacaacttgaagtgcataaagaactcgtaacctgtgccggcattctaagcgtgaccttctcaaatttaggtttgaaattcttatgttagttttcaagttttgtctaagatgttcaattgtttagattcttaactaagtttttgatatccagtggaggtttttagcaactgaaacttttgacttgttgctcctgtctataggatttatatatatgtccaatggaggttcttagctacttaatttgtaaggatccgtttcatggcaccacattttgtgtcttatatgaaagggactgtaagtaaaagagtttttctctttttgtttgttaattctggttccttgaaactttaaagagaaatctatttgacagtgctgagttgtcaacattgactggtaaattggggatctatgggttaataagtagaatgagttactccacacattagttaagtttttcagtcatagttaccaacagttggtattatagctattattttattagatcttagctacctaccacaaataaatgcataatatgcacatgtagaacaattttactgtatttagctttcattggttatttaaagggtggtcacactgactacttccctactaattaattatttctacaaatttatttagccacttaggaattgattaataagaactccatggtgtggttaaccttaatgagtcctagataagactttaaggaagtcttatccagttaacaccattatatagaactttgatttcagtcatactcttcatattataacaaagaaggttgaaatcttattcttcacattatagcaacataggcgaaggatttcatacaactttctttctcaatatatgtaactatgagtaaaatgaaccaggcttctgtgtttatattaaaaagtgaactttcatgatttattttctcaaccagtgttattaaagtcacatcctgataattagtatgcggtggactcaatgttagcaggtgttgtcacctgctgatggaggttttgttcgagggagaggttgttttgatgtcctaaattggcgagttaggggatccatgagttgatcaatagaatgagttaacctaataactagtcttttgggttggacgttttttcctaggtcttaggtcccaacagatgtttctatgactatctttatgattaatgattcacccagtttgtgccaatgccttgtcagatttatatagtgcactaatctcttggccaggtggcctagccttagatttctgtaaattctgacgggcttcttgtgggtatgttatattgctctctccctctcagattataaatttgcccatctgctgtcttcttctttggattctgtttgagcatctcatggtggtatcatgcagttttagcactgttagattctagtttatctcatgcttgcatatactttgtctttctttcttcttaaccctgctgttataggaaaccagacaaactttttctttttgtctaacattttgaattacttaaatctgcagttggc

SEQ ID NO: 9510 - DNA, 2367 bp, Citrus clementina
  Intron number 2 from transcript clementine0.9_035649m (loc us clementine0.9_035649m.g) derived from phytozome v7.0 (c hr-ID scaffold_31; pos 2021320 to 2023686)
gaaaagggtgcatcaaagaatgaggtctgatttgcgtggaaggaagtctctgttgccatttctgtcaatgaaaaataatggaatcttttgacgagacaattatgggaaatttcttctagtaacgttatctttgtattaactttcaatcaatcacgtaaaatttaatttaataaaaattaatcccataactgaaagagccacctctgtttttgtggctgcatctttccaagaatttgagttcaaagcttgttcgttccgagtgggatcaagcatttatagagctaattcattatctcaataaataaaagttggattgggccggaaaaccaacgcccacaatccaaatcaagcccaacgcaaacaacgtcatttgggccggtttgattagaggaactcaatccatttcaactttaggttgggtttgcgttgatgattttcacaaaatgatttatcgataaattaatgttaaagaaaaataaatggggggaaatctgcatcccttcatttaccggtggaaccttcatcgtgaatgatcaagcttctgatcgtggctataacggtattcataagtttcggctaaatcggatcgccgccattaaaattttttaagtacttgtatcttagtttttaccaataatgttaaaatgttggaggaaattaaattaaattattcctaggtgcagaaggagatgggattctataactaaatgttgatggtgattagagaaaagagttattgcaaatagggacgctaatcggagaaagcaaaaataccctaaactataaaaacactcagtttggcaatgatgtatatgagtgatgatatatgtacaaactcttatacaaacttattttctataaattaatttagtattaactcattggttgaataaaaatataaaataataaaaacaaatcatatgaaccaagagatatctaattcaaccaattaaattatgctacattgtttgtataaaaaaaaattatacaagaatttgtagttatattattacttgatgtatattattttatttattgaaatttgttttaatgtatattgtattcatctaatttacttgcatgcaaaataaattgtaatataatattttaaattaattaaaataatagtaattttccattacaataataaatcgtatttacctatgaagacacaatttatgccattatcatattaaaagcacatatattctctgtctgcaatgaagaccccttcaaagctaacattggtcataggcattaaatgtcgattgagaccccgtataaatggactttacaactctacatcatgtacataagcatgaagctactaagatcagatgtttcaaacttaatttaaaaaaaaaaaaagtattcagctttctatttatgctcaagtcttagcctataatctttattaatgtgtccgcctgttttcactattcaacccatttatcttttaaaattatttgaataacttgcaattaaaagcctaatagccctaattccagtatgtggggaaagaaattttggagagcattataatagaactattgaacaacgttatcaactcaaaaaaatccgccatcgacaattgtaaatgatgctaatagaatacatttattatgaacgaaagatataactttggtagtttgtattattttttattttttaaattaccccgataggataaatttctggcttcaacccttgttaaagtaactcgtgttatttcaatgaaagccaaagacaaatattataactaactatttttattctttttagttaaaacttagcggtttgaggaaattttatcaactatgaaatataaaaggaaataccaaatccggagagtttaaatgagcatcagcccccaacaaaatttaagaaacctcaaatacgaaaccgtgaatgtacacacctaaatcgtacacctgaactgttagatgttactatagcctttaaatcaatggtcctcagtttttttttaattctattcaactggctctgaattctgatggcgacaaaaaacttaagctttcataagcaattatgaacaatactgacttttatttttgaacactgatagtgtgtttgaattatatatgatatcaccccactctccttctccaatgacacaaaggaaagagaacgtgaaaatgttcccattcatggcacaaggccatataatcccattcccagcattagcccttcacttagaaagcacaaataaatacaccacaacttttgttaacaacccacttaaaatgaagaaactcaaataatctctccctcaatgctcctccgttcactttctttgaaattcccttcaatagcatagatcacgatctccctccttgtactgaagac

SEQ ID NO: 9511 - DNA, 159 bp, Citrus clementina
  Intron number 1 from transcript clementine0.9_015592m (loc us clementine0.9_015592m.g) derived from phytozome v7.0 (c hr-ID scaffold_83; pos 675827 to 675985 reverse strand)
gattacgtcgacgttatttattgtcacaggtaagtttaatttaatttttttcctacgaaaaccaaaaaaaagagaaaaatttgaagaattttgagatgatttgataatttttgttaattattaggccggacacgtcgacaccgatagaggagacggtga

SEQ ID NO: 9512 - DNA, 1574 bp, Citrus clementina
  Intron number 7 from transcript clementine0.9_014013m (loc us clementine0.9_013944m.g) derived from phytozome v7.0 (c hr-ID scaffold_92; pos 449395 to 450968 reverse strand)
cagtggagaccaacattgtgagtattttgctttcataatcataacatgatactagtttgatgtgtactcatgattggaaaatcccaatagaaattgttatctaatctagcaggacaaacaaaaaacaaaaaaaacaaacagaattactactcaattttgctgtagtcaaggcagttttgacttatctttcttggagcaagcaaacaacttgttatattcacttaggactttgatcgaacgcctttgtaggcacatataaaatccacccaagcaccttccaagaccttgttgcaatgacccaaaacagtacctacaactataatatgcaaaagcaagataaatcaacatcaacaataataaccaaaccataacacaaacagtttgcatggttcaccaaattacctatgtccacggatgtcgcagatttcactagtaaaaggatcagccaagttacaagcctcattttaatcttcaagtgatgaggtaacaccgctaccttgatgagaactttcccatattattgtgtacttcgaatgatgagatatccatctataactgaacatgagcaaagatttaacatccatctataactgaacgtgagcaaagatttaacaagctaaaggaatacgcaaacatatcctagggtatcggtttggtcagcacatcagatgcactcttgtgtgtgaattttctcaatataggttttatagaagcaacatcctatctctgactccatgatattggacaacaatgtgcttggttctaggttagagcagttgcactgtcacaatcacacgtaagcaacactacatcctgcttcaatcccacaccattcaccaaacccctcaactatatagactttgatgctttggtaattgctatgtattccacatccgtagtaaacaagaaaacagaaggctaaatcataggtctctaattaattgttccatcaccacatgtgaaaataaaatccactgtagatctcttcttatctaagtcactaacataatctgaatcaacaaaaccaacaacatttattgcatcagtttgtgtttcacacataattctcagcttccaaatactgttttcccggatttgccatgcacatggaaacaacacccatgaagaatattaaagttacaaacctcatcttaatctttagccattgcacaccactagatcgtaatatctcaaccttaaaaatcccaattgttttagagttgcactctttgttgctctcttttctctctacacttctgaacacactgttttgtggacacttgactaatgctttcctaaaccagagtttagaatatatatgaagatactcacatctaataacttattagagccacaaacatcaacacattttactgagtagttgtcttaaatttctccattaaatgacagaaataacaaaagaattactaaatcatttcaatacctcaatttctatgtactgttattataagctttattctgaggcttttaatgagcaccatattttgaatttgcttattcataaatatgcattgtcaggtatattttgaaattacagaggactcgaagttgta

SEQ ID NO: 9513 - DNA, 2334 bp, Citrus clementina
  Intron number 2 from transcript clementine0.9_006557m (loc us clementine0.9_006575m.g) derived from phytozome v7.0 (c hr-ID scaffold_46; pos 199340 to 201673 reverse strand)
gcgaaattgctcgcctcttactttgaggttgttttctgagcccattgattttcctgctgttgtcatctgtccagttcattattttgtagtatttcttatatctgtcacttaagtgcctttatgtagcgttttggctgatttctcatgattgtggtatctgcaatatacgatagcatttctgtatttttttatttgctcttatttctgcatattaatcactcaaatagaatttttttttttttaatgtgatctaagagtttctttttgagatgcaaatttactacatgtacagagactagctagtgcaactgcataggagtaatacagacattagattgttaataccccctgctataattggtggatctagactgatatcctagatttgctgatgtaagcaaagtgttatacggatctttcttgatggccttactttacttggaagttgttaattgtttattggagcagatcttcccccatttgattaggttgcatttatatgcatgagttgatttttagagcgtggtgttgtgtttcagaatcaagtggagccttacaaatctttgagaattctaaaaatttcatcctatatgaaggagactggcacttactaattagcgatgagtttctttaggatgttttctcaaaatgaattgaggttgtgcttaaaaggaaaatcagttatgaaagagatgtcattggaaagtttcggcactaattggcaagattttggcatgcttatctcataaacctcaggatgccttcagttgacttacaacggatggtggaacatgaaaaagtcggcccatattaatgctcattaagctggatggcaatgcaacttcatagtcatgacatcttattacttgtctaacaggaatccccagacacgattttgacactggagttcttttattcacaagtttgaatgagtttgattggaacaaagtaacacgaatatctccggtattaagtctatttccatcagctggccggtgggagcaagaagtttgggatatgtttgatatcccctttttttgtgtatggctaaaacagagaacaactatagatatttctcaagcttcatgttacgtttcacaacttacctgtttcatttcaatttctcaagtttcacccaactttgacacttatggcagcaactgtagctatatagacattgtaccatggcaaaacttcattgtattagaactctctaaaactttttttccccgcgtggataacccatttccagccaagtttcttgactatatttaaatatctcccattgcttatgtgacatgcttcaagtatgagattatttctcgagacttccattgcagaagcatgtattcgaagtatctgcagtgttatcacattcactaggtgtaattattgttattgcttgatattttagtaggagtatgattgagccaatgggaattgactggtgattttctttctcaaccttttgatttgtttaaggtagtacaatcttggtctactctgcaccaaaagctctggttttatgtgtccctgttttaagctgctttacatggcttctaatctttcttcttcttcttctttttttcaaccttttctttactcttcgttttcctttttcaaagatgccctagcatggtctccagtgagcttgacttgctacctaggcgctcaggcttaagtttgatagttttaattcgttgaggatgaatgagctttcgttgggctttaattaattgtagcaaattgagttgctcggtgtattacagtgctgtaccagaatttttctattaataatttcgtatagatttgatatgcactaatgtaccctgttcatatttatgccatatctgcaaatcttatcttcctctggttttgggacttttacggagctatgagattgtatgaaaaaattacttttgttcaaagtatgctatttgcatggatatttttagacagcggctgcatctactaatcgtctttggcgacaggattcactattttgcctgacctttatttttgcatttcattattttaccagaagctacaaagtgactgtttcaataatccctgatattttaaacatgaagttgctaaatctgaatggaaaccaagctggatgtcatatgtacatcttagtcagcacgctctacttgtttgtccaaactgtattacttgttatgggaattttgtatctgatttcattttgtaggcttgcttcctaggtcaatgtctttctgaacttttttttttcttccctttttcaatgagttggaaaaaccttcattgatgccaataatctcactgttctgatatctgacaaattttcagaat

SEQ ID NO: 9514 - DNA, 1699 bp, Citrus clementina
  Intron number 9 from transcript clementine0.9_001239m (loc us clementine0.9_001239m.g) derived from phytozome v7.0 (c hr-ID scaffold_21; pos 2548309 to 2550007)
agatcatataggtctcgatttcagaggtaatgaaatgctttatgtacgtacatatgattatgtctctctgcttacaccttactcaaatttctttcgttaagtgaaattacatgagtcatatgttggataaatggaatctactaaaagatacaggaaagaaacttagttgtctgaagagtctggaaaataagaattgtttaaggtgctgctaaagttgcttaaaatgatctcaaatagattgaagatcacggactgaaaacttaagaaactatgaattctgtttacatggaatccaactagtactggtatgaaatgtcaacactgctacttctattatcatcttgtaactgtaacttttgaagacaccagaattatgctattgcagtgtttacaaccaccatcatggtgccactacctctgctgttgtgacgttggtggagctagatttgaaaattgtagaggagtcgaagtggaaaaaaattaggggactggagtacaaataattttttttcaggattgaattataaatacatgtttatttttttcaaacttgtgggacctggcctccaccagacctactctacttcttttttgtcaccactttggaaattaatggggtgtttaatacgtcattatcttgttttaattctagatgatgacttcaggacagagaatagtagataacaatactatttgtgacagcaagaaagtagtgtttgcctgtatctggtatgcagactcgtagacgtctccattttattaggcattttctcgtttccttttttttggtgcatgcctctgtgctctataccatctacaatagaacctcgttaaattaatactcagataaattgataaacttgatcaaatagtagtttttgtagatcccaacttggtgccaatacggtaaattaataatttgataaatttattatataataaataaataaataaataatcttatttcctatagtacccaattaatacataaattaatcaataactaatttgaaatttctttgttgtactaatataatgctttacatgtttcatcagtcgctattgctttttttacactttttagatgaaagccattgttgtattctatgtgttatgttgggagaaataagagaaagatcagcttaataaactttctaaaaaaaagtcttctctaatgagttaccatgtaatcttgatctagtcaaaggattatcaagtgaccgattcactcaatcaatatcaaatcagaatcgtatgttacaacttgacagaatcattacattctctaattatactacctttatacttcataaaaatttccattatgaatgtgatattaactttataaataataaattattaatttattgatgaattaataattattaatgcgatatattaatatttgctaattaatagatttttcatggacccaagactattaatttatcgaggttttactgtattttactgctttttccaaaaccctacaattactggttctcttgataaaatttaagctagtttgttaagatttacatgaagtattaaatgttaatgtgattgtggtaaatcctcgtctttcatatttttaggaaggtttctctgattattcaattttagcaagttttcttttgtaattagcgtgaaatgttattgttgcaggtctaataattgattctttttccttgtagaatct

SEQ ID NO: 9515 - DNA, 524 bp, Citrus clementina
  Intron number 3 from transcript clementine0.9_000869m (loc us clementine0.9_000869m.g) derived from phytozome v7.0 (c hr-ID scaffold_1; pos 9329690 to 9330213)
gaaatcacacagcttttaactctcagcaatttcaggtattttttttttaattttaacctccttccaacatatattgtcatgtttatctcctagatagcaaggtctagttgataatataaatttgtttatgatgaattggattgctgacaaattttttttttttaatattctgagtttgagaaaatagaatctttgtttaattgagctcaagtaaaagctctgcttttcaacgaaaaagagctagaaacttagcttaggtgaagagtgttgatgtgtgtttaatttcatataaagattaagcaatgtttatgatagtattatgatttttattgcttgatctttcctctactttctcattagcttatcagaagattgtgtccttataaagccatgtgcttttaagtgttattagtagggaggtatttatgatgttacttgttttagattttttgacttaatgacacactgataccacctaattatattttgtgtggttgtatattcctttttttaatacagggaaa

SEQ ID NO: 9516 - DNA, 1989 bp, Citrus clementina
  Intron number 2 from transcript clementine0.9_006086m (loc us clementine0.9_006086m.g) derived from phytozome v7.0 (c hr-ID scaffold_83; pos 348220 to 350208 reverse strand)
ctgcttgccaaggtgtcaagttctctgagcctcaggtatatatacattttgcatttttggttcaattgaagattacccagttgttatttattgatttagttggtaaatatcatgtgctattgttaagtctaatttagttgtttgcttttggttgtttacttttctgggtttgtagttttgcttttggatgtgtggcacattttgctcttgttttctacagttaggcttttgaactcattgagggcatgttggtctttttgttttttttttttgagctttgatattttgatggcactgcaaaagcatttctaggtgattgggtcccattccaggtggtttagagatacaatgttgtgcttttgttggagttgtaatgaatggaggctttcagatgatctatgtttgtattattttgagcatgtgaattcaccggatttttttttgtctgtagcacctgctattctaaatatagagtccttttgtgttctcttttttggggttttctaagtggaattattgaggaaattaaaagtaagaaaaaagattaattttgtgatcccaattattaacaaccaccgaaaactaaagaatcctcttagtttaggaatgttcaactatttggcttggagcagaatagctaacatcaaatataagttagtttacttgtcatgtcttctattgtcctctattttcctgcagactgcttttacttgtcctatttaccaatttctcaccaagtctgtaacttgtacatacttcaaaacactttgctcagacattaatctgcaatcgcaggtgtttaaatctgttgttactgaggttgcatttcttaaaagatttaaaacttcttgtcatttttgtatttcttcgtatcctccagagtgttcatgtggaaataatgcatacttgtctctgtttatttttttcttatcaaataatacatattttccgctaaagagtctttaccaacacccccccaaatagaagagcaacctggacctcgtgcactgccaatggaccttatctgctaaatcagccacaaagaatatacaacataacactaataacttattgctcacctatttctgagcttttgatttagatcattgtaagaatttcaaaattttcttttgttgctgaaaaaaaaaaaaaagaatcttcgttttcattttattttttatccaaaaaaagagagaaataaaactacatttcagagaagtaagtaaatacacgtcacttgattactatagttgcattgttatgtataaagtgattcagaaatcagacaaccaaaagattcttgctgcaggattttctttctatttttatcaagttttgatggaaaatgtttgcgttgttcattcaattaaatcgaatgttgggcggcaaatggtagttttttacatgcttcctgggatgaacgttaataaaagcatataatcctcgcaaagcatatggactctcttggttgttaagttacatagtattcagatacccatttattttatttccatggttttgttttgttatgcatggaggcttgaattgaaagtttgcattattttaggcgtgcaaattcaatggtttctcattgctccacaaagtcttgagggttcttctggatttctttttcctcttgctatgaatagatgaggaaatgcaatgaaatataggatatggattttgacttgtgagttgagaaaagtaaatccctctagcaaatttaaattgttaaactaatttcacagaatagagtgaaagacaaatattttatgggtcacctcagaagggattcttattgtagaaaatagagttccaggctcaactagcattctgcggaaaataagataacccttttctcctgataggaaatctcttgattttgttaatttttaaatgctacttgtctgccctcaagttttacatagacaaatatataaaagctgacgggtggttttgtatctcaatatattctccgtggcaggtcaa

SEQ ID NO: 9517 - DNA, 4142 bp, Citrus clementina
  Intron number 4 from transcript clementine0.9_001823m (loc us clementine0.9_001818m.g) derived from phytozome v7.0 (c hr-ID scaffold_20; pos 1834677 to 1838818)
cgccagctaacagggttgcagtcatcaatttgaaggtatgaaatcgaaattcaagacctatgatcccataaagcttgcttctgaattttggtaacctgcagctcttatatccttttgactttttgctttgcggcgaaagaaggtaacatatgaaatgcttctaatattgtcaaactgctaagtgctaacttttaattaatataagctcataattagttatttccaccaagcctgcacctacattaaaaatgagcatgactagaaagagagttgaagcttttgtgattagacatcttgatggttggtctatatttgggattatttagaatctaatagttttgggctctgttcagttctacaccgctgaatatctgttcttagtatcttattaaatgcatcttcctaaccgaggtttggtggtaaaaggaataaaataagacaaaagagagagaactgggttctgatgcactacacagacaatttacttcttctttttctattgttgatgtatggattgaaatctattttccttgttaaaaaaaataaaataaagatattagcttggagataggcggtaaattaatgggattttgagatgtaaacattgtagtttccaacctttattgagaaagtcattgttgggcagcaaaaagcgcttaatacaatggaacatttgctttcacgtttgaaaatcttaacaattgataagagcaaagcagattctttttttccctgatgcctttttatttattttttgggtttacaccctcttctccccttgtttactgctttaagaattttttacagtccagtggttggattatttcaaatactgtgatgagaggtgtgtatatgtgcatgtcctgttttctgaaattttggggtcaattatgctttcattttttgtttggtcttcacttttaagtgtcccattaaaacctttactcactatatttactgtacttgttccctatgatatagatcacagcaacaatttttattatattcaaccatgaaagaaattgtatgaagtttctagaagaaattgtaagatgtatttctagaagaaattgtaagatgtacacttgaaaaactgtggcactcattgattaattacagttaacaagggtaaactaggaatacactagccgacagaggagcatattagacattgcattatgacttataaccagaagatgaaactgaaatcagtagacataatttcagcataatgtttaactaagttgaatgaactctagatgatttattgtgttgaaaatgaatcaagatggaaagcaatttaaatttgttcataaaaaaggtagagaccaccctccttgtaacgcttgctttaatgcctctttaagttctatttcatagtggtactcgaagttgtatgactgatctgcatgttttggcataaaaaaattcaattgttttttctgatcatgcatcaaacactggaaattcagtgtttgaaaaaccattttcgcacttctataatgtcttattcttcctcattgtcatatctataatgtccttttcttcgtcattgttatatctatgtacagtgtgtgtgtgtaaatgcggtggattacagatttacaacagatacctaccatccctagttcttctgtataccttctctggacatgaacatattttgaattaatatatagtaatgccctagaaacgtttttattgtacttgtttgagttggaatcttagatttggttttgttaatgaatttggggaaggtttctagtttcttgtttttgttacttggccacaatttttaggaccttaaaattatgtgttttaggagacttgaggattattggaataacaaatattcgtttttctgtttatcttaccccttttcttatcccaaattctcactgtttgccaccaaccagcttatatttattcttttcttgcttatgtctttgtcaattcgtagttgttctcttttaaatattttcttaatcaagcctgtaataattttctgctgattttttcattgagaaacagttccaattgattggatttatccatttttcatctttcttctactttttccctattgtttactatgaaaatttatgtggtctttaagccttttttttggaaatgacccttaggtcccaattttttgttgaatgtaacacttaggtccccaatttttcataatactctatcaggtccatgttgtcatgatagtggctgaaaatttatcttttcaaggacaaaattgtctttcactataccatttttctttttcaaattataatctgacaagtacagtaaaagaaaaaatagagaaaattctcacatcctttgactcttccctttcttttttctttttctttttttaaaacaggaaacagagaaacttgtattaagaagaaacacatgtacaaaaagtgaacaaggtgtccacaaaaaccccttaagatcaggaaaagatctatacaatagaatactgatcagatttttgacttttctctttcttttcgacattatttgtctgtgaagtggcatagcaaagaccaccaaacccatgcgggtatactcatactgaattttgttgtgaaagaattgtgaagaaagatgagagtaaacagatatcttgatggctaattttgaggatggtattggtggtggtagttcttggaggttcttcttcttttttttttttcctgttcttcgtctaacttcttgaatttttttaattatttgtttgaagggctcatgaatgaaggtaaagggtcttttctgcaattaatgctaaatgtgatttttcgaaatgctttgattagtggatgtgtgcaaaatgatgaactaaagtttcaaaagagctgtttgataaaattgccaagtggttttggatgagagattttgaacaattcagtggctcaaaaaagtttttgggttttatttttaatttttttatgagttagatttttgaattcttagaatgattcatcttttgagtttgtttgaaactttgaattgtttctgtctttgttttgatttcatttaccttggaaattagaggctgaagtttatgagagatacagaagtttgtgagagatacagagaacaagcgttgagagagggaatgaaaaacaatttttattttcgtattcttttttttaaaaaaaaaatcattaatttgtaagctagatgtttttggtttatttgaaggggtaaaaaggtaaaatgttatagaagtattatactctgtcacagatataacaatagggattcaatggagtcttatgaaaaatcttaggcgctggggtggcgcttttaccccccaaaaaaaagaaaaaaaaaatttggggacctaaggtcattttccttttttcccatcttcttctacagaccctaggtatttttgtttttaatagatttacctatttcttttgtacaactgtattttaccttgtcaactaatttcacagccttaggaattgtagcagggatctcatcctttacccctttttaaccacaaaaatgttaagaggaacagtgtggattagtcgtatgtagattttggttctgaagacgttggaatcagcatatgatgagggtgttaaagttaattggttgctagatttagaagggaattactgtgcttgcctcaggctacaatattttgaagcactggtttgttaatgtgatgaatgggagtactgattggatccttcctttggtaatacaatgatgagaatgggttcaaagttgaggtgaatttaatattgtcaagctgcttatttttaacatttatgatagtccattaacttctgagttatagttcccgtgggattttagagagaatgaaggaatacttaactgcaaaagagagttggaatctttaatcctgtctactttctttctctctctctttctctacccttccccatacccctcccaatttttagaaaaaataaaagtgacaagaacattatttgttgtatatcatgtgattttttattaagattaatgatctcccagctagaaattgttctgttggcttattacttgctctcttttagttcattattcaattagtttatttatttttttgttctttcatttcagcttcaagatactgagacaatttcaggagagtcaga

SEQ ID NO: 9518 - DNA, 2666 bp, Citrus clementina
  Intron number 5 from transcript clementine0.9_021329m (loc us clementine0.9_015106m.g) derived from phytozome v7.0 (c hr-ID scaffold_30; pos 770950 to 773615)
cagcagagttgattgaaacttttctgaactaccaggtatgttctgaaacttgcgatgtatatctttatgaaatatatgcatgctaaattaataccatattattgtgtcctttttctccaatttcttctctgctctagtgtggttgctaaggttagaataaatttgagttctattattctgactgggtatcaattgtatcaaagcaacactttttgtgttttttttgtctcattcattatggctagactcttaaataactgtgattggacatgttatgtgattatttttttgaaatagtctgtccccataaattactggtggtcagatttattttggtttcacattgcaaattttaaaaagtagacgaggaggaaaagaggaacatttcaaatacgaccagaaaaaataagaaaaataaaggcgaaccgaggcattgacagctggaaaaacagtcgtcaagccttcaaacaaagctttaaagctgcttccgattctctattgtttgctacttaaattgacatacctaaaagtgtttggtaaagtctttttcttatcagagtttggtaaagtcttgttctaatccttaataggaaaagaattcctgaatttttttaagaaagaaagagactggactttgactggggaacatggtgtgacatattatataggactattagactactaaacctaaaataagatgtattggaagtgctaatgctagatttagctttagtggaaattacaggcgtaccattgattccttaaattctgtgaaacttaaatgttagaacccgctaactgctgagttgcataggactgaatttacacataattccctttatgtgaggctccaaggaatccttgcatttcatgatcatttgcgcattttgttgacttcataatgtgggatgatatatgggactttgttgaatctatcgaccttttattattagtttgtattcttaatctttgtaatcttttctttgatattctctttgtaattattgggttagtttttgggttaattccgccctgcccccaaatgtttcaacatattccactgcgcacccaaatgtttcaataatgctcaatccacacccacatccgttaatttgaccgtttgttctaacggtcaaagggcaaatttggaaattcataccctaaatattatttgataatgataaattacatttttttgataagttaattgatgggattattattaattacttttaattaagaatttttaatgtaaatattaattattggattaacattttatctcttttaattcttttctaattcaagataaggggtatttcagacatttcattaactttcaaatagttccgttaaaaataacggtcaaattaacggaattgggtgcgcggtggaaaatgtcgaaagatttgggggttgggtggaaataacccttaattttttattattttggcgttcattgtccctttcttttaggttttgcttctccttgtcactagtctttcgattttatttcattttgatgacggtgaagatgatttatgtgtttcagtgatttttattttggacattttacaccattccttttggtaattggaattctattatttaggggtttctttactttcttgtcctgtcaattttatctattttgggtattttaatttgcaccttcctttctttaaagttattccttggtatttaatgtttccaccgttttaattgtctaaatacagccttctctgctgtgtccttttattatatggataatatagtttttgtttgtattaattttaattgtgaaacttgcaaaatttcttttagtgtgtgaggaatagctataaagattgtgttatttttgaaaaattttaagtgctactcagcgaaataaaatttcagtacagatcaacacatctaatgatatcagataaagcagaaaatgctgtctccttgcttttgtagccaagtattctttttgtgaaactccttgttgccatggatctgtcggtcctattgttatggagcttgcttttatgcttaatatgtaatgagttctggtgtatacaatttttaactaacgcccgtggtccagaatcacaaaaataagagtttgggccattaaatagcttttcaccatagaacatttgcggaaacatagataatgaataaataggagttaaaaacattccaattgtcattccaaaagtgattactatttttggcattaaaaaaacttttggctagtaattattctgatgagactagactatatctattgcttttgttgagatgagcctgatggtttctgttttttttttttaaatagggattgctttacataaaaattccatttttaatcttatttaattaataactatattgaaacaataaattatatctttaaatgctttttatctaggagctgtgttttattctcatatctataggaaaagctagtgcagaggtcacacaaatattttgtagggtagaggaagtttttgttgaattgaactaagagaaatactagctaatgaatgaaaatgcaattagtattaataattttcactccttgccatcttatttcttctccttgatttttttttaattttttttactttgttttgggtgattgcaggagaatattagaaggtgtgtctgcataattt

SEQ ID NO: 9519 - DNA, 2821 bp, Citrus clementina
  Intron number 4 from transcript clementine0.9_000174m (loc us clementine0.9_000174m.g) derived from phytozome v7.0 (c hr-ID scaffold_8; pos 3369457 to 3372277 reverse strand)
aaaatcaaggttcaagagtcattatacttttccaggtacatgctttcagactattagtgccttattcgtgaacttttatcggaatgtgttttctagagcttcatgaattctgcattagttgaatcgatgctttataaaattgctgtgtcaatattgaatactatttctatttgcttggcatgactatgcttagcaataaaacacggacaaggaagagttcattactagaatattatttgcccgctatagtatgcatctgatttgataggctgcttccgaaaatggtttattggccgtataacaatttattcttatgtgttgcatatcatctaaagaaccaaaaggatgctactcatccgacatcaaaccaattggtagttctcacttttcttccccatatcatagtgagaagggataccatttatatataagacaaccttatttaacattttgataactaatataaatcaaattggatcaactgacaatgaaacttttctacatgatttaaagcatataaaaaggaaaaattactggaaaagcttgttggctctaattatggactaatttttttctttttaatcggaaatgtgataccaattaaattaataatgtgactggttataaagattgtgaaccagcagtccatgttgaatgtcccaaactgtacaaatgaaaataagcagttaaaaatcttattggaaacatagaaacttatattaagaagaagacatgtacaaaaagtgaacaaggaatccacaaagaaatgtaattaaaagaaattcttaaactacaatatcttccaatctctgaatgaagtaaaagaaatatctgcaaattgatttaaaattgaagctgtgaggaaacaaagaaatggaaaatgtcccacagaagatcagcctgcttcttcaaaaaatttcactctctccatccaaattactcagtaatagcaaatggatatcttttccgtacaaacaaagcttttccttccccaccctaagcatattgattctcagcaaataatgcaacacaaggacttggaataacccaagaaactaaagccttgctgaatgatttgaaccataaagattatgcagtttaacaacaacgaaggaataattggtttatactttctgaatttttcttgcacataccacaccataaagtgagaaacatgcctatggtcagtgcctttgagcagtatcacaagcgttaacccttccaagagaaatgaccagaaggaaaagttgggagggattttgttatgcagtaccatggaagctagttggaattgaagaaaatggtgtccaccagtagttatatatctaggttcaattttgttgctttggaaatttcttgttggattacacatgcatcgttaaatggatgtgaggcttgcataataagaccatatttaatgtttttgttaacattaactcttaatatgggtgtttggtttgagattacttttatgctctggcacagatgtgatcctgcttctctaatgcatttaagggggtgtatttgtaatttagtacagagaagtttaggagattctaagattccaggagctgttatagactgataatgacctatgtactcttgatactttccctaagtgttttcttcacttggagatttggaatgttttgatattatagtagtatcaactatttattattttacttatgggtcccaaatttcaagttattaacaaatatcaatattgttaaatagtcatctatattttgaatcagtagttacaactattctgcgaaattgggtactagtaatttcttccagtgggtattctgctagtttgaaaaatttgcatttcaagaaagctttctagtctacaaccaaggtatgattgtttgagaacgacactggaggttgattgttgaagttggtgtattggttcattgatggcataagggtttgaagaatttgctctgtccatactctgtttatctgcctattttcttctaatttattggtcttgaagaacttgcttttctatgttttatttaaatagattctcatcatcagagcaaaagtttgcgagaatgagattttaggctattgtatatcacttggcccaggagtgtccccagaagttgtggtttccccaacaattgtgcgatgcatcatcttggcattgtgctacttctggggatggcatattccgaagggaattgacagtgtgcatgatcagtaggtatatggtagtcgcttataacacttttgagcatgcaccttcttagggtcaattgtatactctagtttgggaccttaacttgattggttgcatttggagagattttaactggcagtttaaaaagaaaaaaatagataaaagtagaagaaagaaataaattggttttatcttcgctttgagagttttattaaaaataaataaattggttttatccaatcatttgtattagtctttgactacctggtaaacattgacaattacgtaaattttttcactgtctttaattccattgcaattgcttcacaaatctacgagagcactttgcctgaatatgtccctcctctcgtatcaattagtcttttgttttgttttgttttgtactgttgtctttttttctctttttattttttacagagtacccaaactgcatggatagtctctctatcaggctacatgtgcctgtttgcatgtgtgtgtttgctcttgcattgtgcatttttctttattcagttgttcttgttttgacattcttagttctcttgttcttatttcgacattatgttgacagtctattggtggtggatctcttggagatatattgga

SEQ ID NO: 9520 - DNA, 932 bp, Citrus clementina
  Intron number 6 from transcript clementine0.9_025321m (loc us clementine0.9_020913m.g) derived from phytozome v7.0 (c hr-ID scaffold_53; pos 28487 to 29418 reverse strand)
ctcgagagagagatcgaagaattcttctacgtgctgtaagctcctacactgctgttcttgatctaaatatatgtgtttctttttgccaagtgaagaaaaatttcaaatgctttttcattttgtttgcaattgatctttaccaactgcttttttaaggaggcaacttgtctgaatgacacaagtcaagccacattcatacttcaatcaaaaatataaatgggccctttctcagcgatggaatatcaaaatcatgtccaaaaaagtaaattaaccatattgttgatgctaagttaaattgttgagttttactgcatttgagatttgaactactagtaaaatcaaggttaagaagggatatcttggggtgttcaacttctattctaagtacttgaatttatataattgtctttctgacaatcatctgaaacaatgcaatagtaagacaagacagttttgagaatttctttctgaagttttatgttagatggactatgaagattggggcattatcttccatttcaactgctttctgtagttttgatttgcatggttgactatgaactattgattagacaccagtgtcttatcccgtcttcccttgatattagaggggtggtggcagtggggagggcatcttgtttgactgtctgactgagacatataacttgctacctcttacctagtaggccaaaatcacagtttgaatagattaagtttccgtaggcaagtcctgaaaaaattggttgaaatttcagaagttggattactatagcttcatgaaggtgtttgaatcatcatattaaccagtctgtgatcttgaacttttttaattctaggaataaattgccttttgtgctcatattgagttgtggctttttttttttttttaaaagtttaatttgcttagcattgaatgctatttattctaatag

SEQ ID NO: 9521 - DNA, 1329 bp, Citrus clementina
  Intron number 1 from transcript clementine0.9_030861m (loc us clementine0.9_030861m.g) derived from phytozome v7.0 (c hr-ID scaffold_9; pos 5085689 to 5087017)
tgtttgactccgtttcccccgaaaaggtgatttttggaacagttagaactaatgtatttttaatatccgttactctgactaccttgtttgattgttgggattttgtttatgtagcttgcagcatattgaatttttttgcttacaaagtagttcgaatgtcttgaacatagtttgctaatagtggtttgtgtaaatggggatgttgctgtggtgtctgaagtgaatatgatctgtttcatttaacaatcggcactcagataaataccatataatctttcgtaaaagttaaagaaagaaattctatatattttaatggacaaactaatttaagttgccaacacatagtgtccgaactcctaattaaccaatggatcagtttcttagttttgattctcagaactgtaacatgtattttcgtttcaaattgacttgccataggtgtcacgtattaaaagaattcttaacgaatgtcattgtcattaattacagttttccattatttattgtcctttgactactgatatgaatgtcaaaaactacaccaattgaagtagagtccacataattcaatgtgaggttctatagggcaaatggggtacccatagcggttaaatcaagcccttcctttctgcacttgcttggttatcatcaaataagtctctgtaactagatgtaaagttatgacaagagctttaccaagagaagcaacagaagactagatctcaaggtttccctttcatcttgactcctttcactcttgcatagttgctttgtcacatgccttgtttcattgaaaatctcaaagtggctctatgacattacattccttacaaatcctactgtgtacatacctttttgttgcacatgttttctgaaaatataatgtgacaaaatttcttgctagagagttttggaatcttatctacactctttgcagcatggactgggttatctgtgatcctgttttgggcttgttgaaagaatgttgtggattttaattatccagtccaagctaatttgattagtataaagtttagcgtcttgttttctttagtgaacacttttacaatgttaggtttcttattatgctattatatttggtgattactatatggaagcaaattttcttctcttgcctgaaatgaaacatttatttaaaatatgcctcaatgttgctttcagatttggcttccttttctcttggcaaattgtccatttatgggctattcttcttcatggaaaaccatcaaagagtgtagttttcattttgatccttcttgggtatcttttgtaggttcaagctgtactattgttattgggggggcgaga

SEQ ID NO: 9522 - DNA, 553 bp, Citrus clementina
  Intron number 7 from transcript clementine0.9_003268m (loc us clementine0.9_002701m.g) derived from phytozome v7.0 (c hr-ID scaffold_23; pos 2515076 to 2515628 reverse strand)
gcttcagagtgcttcctgggaccctgcagttcaaggtatctccctagatgtaattattttgtggatgaaaggatttctccgtgtgttgtcttttaggttttagtccttaaagctatctcttagatatatatttttctgaggatgcaaaggcttactctccatatcacctttgaagcgttacataaagcctagttatcagaagggttttatttggtaggatttactcttattttggaaggtgtttggtaagtttttgatattctggaaatgtttatattttcatgctagttatgacacactcacatttagctagctggctgggtagctaattggtagaccgatggttgtacaatatcataaattattgcttgttttgaatttagtaggtgcaccatgacttgggtcacttttccgtggtattgtttactgaggatatctatgtttgatgctctggtgacactgttataagttatgagggtagaagtatttttcttttgatatattttacacataatttcatgggttgatcaaaatttgatctttatttgcagac

SEQ ID NO: 9523 - DNA, 999 bp, Citrus clementina
  Intron number 1 from transcript clementine0.9_022685m (loc us clementine0.9_021829m.g) derived from phytozome v7.0 (c hr-ID scaffold_9; pos 178784 to 179782 reverse strand)
tcgatcatcatcagcctttcgcatattcagatttggtaaactattttataattttgttttatttccactattgcgatcatacttatcgcgttataatcgtttgatgtaatagtattgtcgtgattgattgtttgtgtctgaaataagtttcgatttaatagtttctttcttcttcttttttttttaatttgatcaagtgtgtttttttaattgaattattcgtagattcatatcgatattttaatttgataatttatctttttaatgttttgattatgttgatatgttggaattaaccgctaatacatgaaaacgagtgaagtaaagttgaaacaaccataaaaacatgcttgaaaatagtcctgaaattaggttaatctggttatattcattgttagggttgcttttgggggcaattcgctgcgaaagcacttgatgtggcagtaagtgcttctccagaaagcacatcgcggttgtgtttgatcctgagttgcctttgtctatttcatccaaacattgtcaattagactagaaaagtacttgtcgatgcacctgaagatagtctcattgtcattatgttattagagaagcatatgatatagattagagtatgaatttgatttgagctttactagttccttgctatgactaggcttgttccagatcatgccacggatatgaaaacatccttttcctctttctggagaaaagcatgatgagtggcagaagttttttgcggttatttgtttttagtcatgacttgacatatttgactaattgattcagagaatctttgtgttgtggctgcttgcttaggttctatttctgagtgggatatatattctaacaattaacaggctgcaaggttttttatttatgaaatgaggttcatgtatttagttggtggcaagtggcaggttatatgcttggaatttgtgccacgtgcataagtatttttaaattgaaactgattctttgtccttgtttctgagtgaagca

SEQ ID NO: 9524 - DNA, 698 bp, Citrus clementina
  Intron number 5 from transcript clementine0.9_014219m (loc us clementine0.9_014219m.g) derived from phytozome v7.0 (c hr-ID scaffold_70; pos 244612 to 245309 reverse strand)
atacaggtaagcatatttttgttaccagattaagtgttaatatcaagtctcaacttttctatgcatcgattgtcacccagtattgaccagagtgagtacgatgcatggtacagatgcaatacaaatgctgttggaagttaaaactctatcatcaatggaaggttagggggaccaaattcattggtcttatatacaatgaactagagaatggatctggagttcaccaccatgccaactataatcttttaattacttaaaagcatatgttaaataatttaatcgcagctgttagtggaataagattattatctcctattggccttctggaaaaactacgaagttctggtcataaaataataccaagcaattaataaatcaattatcttaaaagatcacataacagtaaatagtgatttctgcatacgctttatgatgaaagtaaagcagtaattctgcacgagttgataagagtagcaccctttttcaattatcctttttgatttgttttatattcttagattttgatcttgatttctgcatacgctattggcatattttctctttcttgtcaatatacaactactatcatttttcacttcacatattcttattttcttagtgcaaaatctatgtacacgtctatgacacatcttcatgttctttgaatttatgacagtgtaaattggccttgaagccgg

SEQ ID NO: 9525 - DNA, 745 bp, Citrus clementina
  Intron number 1 from transcript clementine0.9_011436m (loc us clementine0.9_011436m.g) derived from phytozome v7.0 (c hr-ID scaffold_56; pos 1199637 to 1200381)
tctcgctctcagactcctcgattccgtccctcccggtaccttttccactttctcttcatacccttttcgatttttctctcatattttttgtcacttttgcatttgttcctgtgtcctttagataaatgaatttaagactatgattattggagcttagtgcaatgcaagttatttgtttgattagaatttgtaattttctgttgattcttatacattttaacaatttatttgtttgatcagaattttttaattttctgttgattcttatacattttagctgtaaaatcagtgtccgtagactatgattgaggtgctaaggctttttctgtagtgtagaattagcagctgcagctggcaagtgtaatgagtgggtgattggtaaaaattagctgccaaaagtgggcgtttaccaaacatgttagctaccatgccttcaaatttgagtagaagcacaatcattacaaacatgccctcagtggaattgtcgtaatttatattattttccagacaattgtacttggtggtctaatttttgttttcgtaggttcaatctatattctttgggtcccaagcaactatttatgtgtggctactttagctgcaaatttcatctttgaggatatcatgtcacatttagtaacaaaaattcatttttgtgaagttttctttttctggtgctcatgtgattgctactgcggatttgtgtacagagcaaaggaagtcacctatacaacgggcgacatat

SEQ ID NO: 9526 - DNA, 999 bp, Citrus clementina
  Intron number 5 from transcript clementine0.9_023074m (loc us clementine0.9_023074m.g) derived from phytozome v7.0 (c hr-ID scaffold_12; pos 3425128 to 3426126 reverse strand)
accaaagagtgaaaggcaataatccttctcaatcatatgtgccatagctacttacaccttctcaagtagtaaccgtattgaaatcggatgctttattctgtattctctaccttttatggctacttcatgtaggagtttagtggtagtgactcattatattctcatttgttactaatttgttatatgaaactaactaagaaagccatgagcgtgggaggttggcaaattgaaattactatatatgtgggataaaacaacttaccttttaaatttttgatcttttcaacattacttaggaggtttgaagtactttagttctagtcttgttttctgaacaatcaagctagatgtggtagttacagcccctaattgagctgcaaatagagggaatttgattggatggttgcagttttctggtcttgatagttttttcaagaatttcccttgctgcttgaggaaccatgccttgttgtatttctttgtcaagctggtggaatgtgtatatagctcaagggccagcagtgggagagattattagtttccatgcaagtagattgtaccacctaaccagttggagttcatgaacctcaatggcctaatgcggatgcctaaatcgcaatcatagccattgttttgcagctgtactcccttgttttttctgtgcggctacaaatcttggttctgggatttggagagtgttaggaagacatgattttacagggaattttttttcattggtccatggcatctgtatttagttggaaaacatagatgccagtgagtatgacctgaaattggaaatccaatgaacttttcttgcatgaggtccaatttgactttgagtattaccatgccattctgaagtaagcttacacagaatgtaaagatgtgtttcacttttgattgattttctgtattcttcaatttgccctacatccttcagtgaagtcattcatttgttgtttgcatgatttgattttccagagttttgtgagaagt

SEQ ID NO: 9527 - DNA, 2758 bp, Citrus clementina
  Intron number 6 from transcript clementine0.9_028435m (loc us clementine0.9_028435m.g) derived from phytozome v7.0 (c hr-ID scaffold_29; pos 1802058 to 1804815 reverse strand)
gaaaggtatctccttaaatcgcgagttgagaatataatatcttcaatctttaaatctatttagcttgtcaaaccgctaagtaatggaaccttttcaaacagtccgatttgggatgtgtatttcagaagttttgattgacttaagcatcatttattattgatgagatttgtctccttgatgttgaatttatttatttatttatattaatttctacagacattgagtcattaaaagataacagaatataatctctgtttctttgttgtatgcctgtcttgtaacccacagcggtgtgaattttttttcgtatttgttagtccttccatctaagcgtggttttcacttttaggatacatgaaagtaagaatatctttatcataagtcccacttttgatcttggtgctttgcatcgtgtatgtaagtttcaattctgaattttacgccggctgccatttgataaacaacatgttctcttcttctgagtgtataaaaaagagtaaaatataaagagctgcatgtcaaaagagttaagttttatacatttatcccagctgttgaaatgtctggaccatggatctcagccattggatgagaccagtgaatacgattcacagctgaattaaggttgaaaattttgatatttgaagtgagaggattttcaggcagttttggatttggagaagctgccgactgattgtgtaattaaagccctttaaaattgcacattctgaacagtcctcatctttcttcttatatgtgtgtgtgtgtgtaatgctttgtacgttcgatctcccacatgttgaaatctgtctggacaaaggtcttagctgttggatgagatcaatgactaagatatacagatgattaaatattgtaaatggtgttatttaaagagggagaatttcgggcagttttgaatttagagaagctggctgactgattatgtaattaatgcccttgaatgtccattcggaacatttctcttctttcttccttatttcgtctcttgctttcttcataaccatattactatctcaaaaactatgatggtcgcatctttgttcctttttttttgttgaaatttcctcacgtgaagcttttcgtcattgtttttttagaacgatcgacattcatcaggttattgcaacagagagtttgaattaagatttatcttgttgttttttttcccttttgtgatgttttgaccttttgaactttgatttagaagaatcagattaatgttcccagttgttgattccattttattccctgtgaaagtgaaattctagtcactggtttggatgcagaatattatgcaatctaaaaaacaacaacggtctcttccatcttttatttttcatcgaaatttttgtatgtgaagcttttctccaatgttttccttagaacagttgacattcattaagttactgtaacagacagaggtcggttaagtattatttatttataatttttgtcatttctgagaggtttctactgtttgaactttgaattagaatttccaattcttgattccattttgttcaccgtgaaaaagaaattcttgtcactattttaggcagagtaatgatagcatccttctttcatttatttttgctgaaatttccatataatgatgtctgatgtttttcttagaaaataaagatatgtcaagtttttattttcttgtcttttttccttcccccttttcgtgatgtttcagccttttgaactttgaaacagaaggaagaattggaatatattccccattctcgatttcatttaattcaaccatgaatgcaaaattcttgtcactggtttcagtggagtaatattctgcattttgaaaacacaatttttgcatccttcttctatttgtttttttgttgaaatttctgtatttgaagcttttctccacggtttttcgtagaacaataatattaatctagttattgcaacttaaagagttcactataagtttttattttattttatttttgagaggtttctacgtttgaacttcaattcataagaattggcatatgttttcatttcttgattctgtttaattcaacgtgaatgcaaaattcttgtcactgggttggacggagtaaacgagatcttaatgaggggggaagaaggttggggtccctaaaacacttgaaacactaattagaatatattatttttattaaattgcaattattaattaatgtcttgtagagcatttaatgcttgttgcgatgaagtttcctagtatatcttacgctaacaacatcagatatggtaactcaccggaactcttatttctttaaataacaaaatttacagttttatcaattttgtgaatctcagccgttggtctcatctaaccgctgagaccaacggtctagacatttctcaacatgtggttgaccggatgtgaccctttagttattgaatgcccacaaacttttgattttgtccttatacatgtaacgcatctaaatcttttggtttgggtactgtttgcagaactcaatttttacattccgatcttggcccttatagttcttgaatttcatgtgagatcttctttattagtgcatttttacctcatgctttcttccattttttatttttaagatggaagaatagaaaactgtgcagcgcttcacatattctttatattagagagctggatttgtgaagattttttccctgcattcttatatgttgtattgcagggaatcctccaatcacaaggaagaattttaaagaa

SEQ ID NO: 9528 - DNA, 3006 bp, Citrus clementina
  Intron number 6 from transcript clementine0.9_016268m (loc us clementine0.9_015744m.g) derived from phytozome v7.0 (c hr-ID scaffold_149; pos 196872 to 199877 reverse strand)
atctctggatcgtaattttagaccattggtaactggtattctctctctctctttctaagatttttttgtttcctgctgtagcggatttgttgtcatattgtgagctcaaattagtgaaacgcttctctactttatttttaatgggtcaagaattgtttatccgttcagtgatcagctaagctaactttcctgtctactgcctgttttggatatattgaactgcttttaatcttacaatgaccttgcctctgatggatttctgtgtcctgtcaattatccgctgctgccttctgtacatgtttcttgtagtttcatgctcagcatgtgctttataggttgggacaatggactgcataataagaggcaaagattgttctaccttagtactatttcttatcttaaaatgtgtttcttttttttttttttggtggttgggggggtttaaaaaaaagaaaaagaaaaagagaacaggtacagatgcttctctctggttaagccaagtcaattactatatcctttgttacagtgaagacctataactttggccgcaggtaggggatgggtatgctgtacaccatgaaccccgtacctaattttagctgtggttttgttaaacagtcaaaatactgttgtatccatagttaatcatacaattggttgattacattgaaattgtttgtcactctgcactttctatatgattcgtgagttgcatgcaaaaaaaagttaaagataagactaagaatgactgaggaaaagaagagagaaacataggaaatttagcagctaaagaaagaggagcattggtgtcctgtcttgtgcaattatatatgtaagcatctataaaataaaatatagaaagatagccccggaataataaccaatactcatgtatttatatcttggaatttcgaaaatatctctccctttttttaacaataagcaaaccttattctattaaatggttattgattaaagtgggaattaggatactggcataaagagaagttgaaaacctaagtgtcttctaagatctcattagactaagtgccttaccttataggaagcatggtgtcatggatttttcttctatcgcgctcatctgtctgtgtgtctcattctgtttctagtgtttcccaattctactcactttttagctggttttagtaaatatcaatcataaaagtagccttataagacattgattaccttcccaatattctattccaatagttttacatcacctctgatgaattcacaccactgccaagacttcacttcattcctatatatttcttcttaattcattctttgactctcaactgatgtgtaatgctctatgagctctgtttttgaactcctaataagtgctccgtcctggtaattctgtactttgatttgtgacattttggcaaatatatctctatatttgtcgtggatgagagtaaaagagcgctggtatcggtgctttatccttaaaatttcaaattgctttttcagatttgtgcataagagccatgtgtgttccattgaaattctttggatagaattgggtatgtctcttctttgctttataggttgtcttcacagattttctgccctgctgtctctggtttactacatcagaccaagtccaatgccagttttatgtcttatgtcttaagtccttgcactccgatttctatgtcagagggtctaatttcagagaatctagaggtcttggtaagattttgacaagtatttgtagttggcttgtcatgatctgggaagtagtgtcagcatttgatgtggtgaatgatctggtagctgatagtgtaccgcacgctgatggtctattagatttgacataagaaatggactgaatggcatcaacagctgggaagatctgaaagatacattaatttctgtctcaatgccaatacaaagctagacgacaatagaaaaaaccctatcaggtcactgtagccatattcatgcttgccttatacatggttgaggaaggataggcactgaataatttgcgaattcaatttgtgcaccaattatccttcttcttcttattttactctttaattttaaagcttccatttaggtttacgctagacctaggatatagaagatcatgaattgaaaaattacaacaacataacagtttgttaatgatcagttgctttaacaatgtggtagaaaatgagtagacatgtatgatttttacatgctaaaggtggttgcattgagttggattcaagcgttcatttattaagcaatccatgttccagttttacctgcttccgaattgaactgttaattccatcaagtgaggcaaaatgccatgtgattagtggaactgatagtagattagtagctatgctacaatcataaagtttaatcccaagtatttgaggcaaagtgacacagcatttgttcatgaccattacgtaggtgattggataatgaaattactgtactgaaatggcagtctgaatgcagcaccacatcactatgatccaagactttgggatacaaacattgcaagtatttatcattattccatagattagttgtagctctcctgcttggaaaaggttacacctgaaaatctgttcttccacaaggagttagttgactattgaatcatatgagaagagctttgttttaaggccttcattatttttatcattttcttactacccatgccatctgctagttgcacttgcacaaatcaatggaaaaaacactgtaagtttgtagtgttagcaaatcctctaaatttggggagctgtcattttctgcagtccatgtttcctccattcattgggggatattttagtgttgtctgttagaagaattttccatgtagcttgttatggttagaattttgtgcctcagatccgtgaacaaatgtgtatatatttgcagtgtaaatattctgttgtaagcactatactggttttattgtccttttgtatgaatcttattggtacctctttcagcaattaagcagta

SEQ ID NO: 9529 - DNA, 1387 bp, Citrus clementina
  Intron number 3 from transcript clementine0.9_013210m (loc us clementine0.9_013210m.g) derived from phytozome v7.0 (c hr-ID scaffold_10; pos 4981044 to 4982430)
acgaaaaagtaccttttaccactcattcccaagcttccatattgaatactttcaattgtagtgggaagttatgctacaaactgcattttggattcttaaatttagtggagctaagacgcattattgctgcctgtttgatggcaggccactgatgttcaatttgacctagatactttgatcatcaattgttcatattgatttatgctaaggaatagtaagtcttttgattctgagatagtttaaatgattgatggatagaacacgtttgaaagaaggtccttgggactttaaaggaaaatggttgggctatcatatttcccttgtgtgagtaacattttaacttctgttcagggttttagggtttctattattggtttcgatggttgctagatgttggagttgaatttggaacgggttaagaataaaatatggcttttgtaatgcctgtcttgggtattttggcgtttgttggaccttgtgccttggtttagatacaacagagtgggagtatgtagatctttgatttgagtatggcttagcaaaatcaagttctgggttttggcttggatgcttatcaccttggttattggtattcagtaatagttagatctccttgtccttcgcctttgtggttttttatatcttaatatatcttaatatccctaatgcatttttgttcatttgaattatgctcaatcgataataaacttttcatacatgtaagattacagttaacttaaataaagaacctaattctttttccctaaagaccaaattaatcttaaagagggattgagaaacttgattgtttttccttccctgtcctataggtttaaagtggtgtcacaatttgctccaggctgctcatttattttgggtgatgccaaacacttgtgattctttgcttatggagaaaatttatgcatttagagtaggtagtgagccgttggcattgtgggattgtggcgtgcttacattttctttggttatttggttggaaaggaaaagagagaacttttgaggaagcggtctggaagatgctgactttaataggattgagctttttctttcttgccctagtttgggcattcggttcatgcaaattcaaggatatttcattactttttgtgatgcaaaattgggaagttttccgatgatattcactttagttagtagactactggtctgcttgtaattttcttctcattgataaaataacttttttctttggcaaaaataatatatattattgagattttcagtattttagaatgtcatttacctgtggttgttctgcaaatcaaatctgtcttttaatttttgcctttttttttttcttttctttttgactgcacactacaggctaattacttaggatcattgaatc

SEQ ID NO: 9530 - DNA, 725 bp, Citrus clementina
  Intron number 1 from transcript clementine0.9_018619m (loc us clementine0.9_018619m.g) derived from phytozome v7.0 (c hr-ID scaffold_63; pos 1011261 to 1011985 reverse strand)
caagccacagtaagtttctgtcctttttccttttttaaaattgtttgttggttatgtttgattcatatgtgtttctcttaatctgctggattttgtttcatcaccaggtccatgacatgtaatgattctgtctatgttaatattattatacttgtctttcataaccgtagcacatgattgagagaataaaataaaaggcttgtattttacaatgtttgctagagaatgtggtacataagttttaaaatatgcatattttattgatttttgaataggaaggaggacttgcccatgaatttagaacttaactattaatgcaacttattaattcagagcaggttataggcttattggggatatagtgtttgtcaatatattgagatggtagagtcgggtttctgattagctcagacattttaatgagctttgctaattcttatatacatttatagtgatgtctccttgtagcttatctaatgttctgtaactgttgatggtttgtttttctggttctgctgttctctctctcttttttttttttttctttttttcagtagctacttatgtgaggctgtgttgacatatgaatagaatgccatttgttaaatcagtaacattgccagtgaacattgagttaatgactagttttgttttggttatgttttgaattggttaatctaactctaaaaatggtatttgatatggcatgcaaaaggctgggagat

SEQ ID NO: 9531 - DNA, 1145 bp, Citrus clementina
  Intron number 1 from transcript clementine0.9_017951m (loc us clementine0.9_017951m.g) derived from phytozome v7.0 (c hr-ID scaffold_56; pos 856329 to 857473)
ttcaaggagcttctagaggaattggccttgaatttgtgagtgtcatggtttttctttgacaccctttggaaaataattgttactacttggaaaattttgacgcattaggaatttctttaactggtgagctataaaattatcaatttgaattcttggcttgatttgtttggttggattcttacgttttcaaattgtgaattatgtcatggtttgtctctttaatcttgcatgtatttctcatgcatattggccgcttgcaatgcagtttgtaaacttgacagctttccacttatcttactgctttgggttacaactagaatgaagttcattaaaattagtgttgatatatagctgtccaattttaatttcctgttaactagatgtaaacattgttttttgttccctctttggtagattgtcaaatacaggtcacccatttagcagtatcttattttcgatacatcaacttcattagatttatggtattgccaagtactgaatatattgtagtcatcaatcgagatgaggtgttaaaaattccataactcttgttgagttttcaattaaggcttcacattgcaataatcattttctgaacttatgcagcctgtattttgaatttcaatcttgtgcaatcatctagtgtcctgaggatggcagacccggaatgtgttattttatcaattactaggctttggcatgcacattttaggattcactttcctcttcctgagcttttctgctttaatgttgggttactgctgcatctttgtgtcggaggctgctctgttttcatggtgcatatcaagactagtttatctcatttcagtcatttgggatgaaatattgattctgtgccatcgtttacatatatttttaaggcatattgtcttcttgttatgcttgttctactaattttggatagtggtcatgctcaccagattatatacaattctgcaattatcaacctgaatgttttattaatttaatttttgagtgaaaacaatcatattgctggaagccatcacttgtttgtttgtaatatgctcgtgttgaatttaagaatgagaaaggttagtgaagccggggtacataatctttacatgttttctcctttgtataggctaagcaactgctggagaaaa

SEQ ID NO: 9532 - DNA, 3981 bp, Citrus clementina
  Intron number 2 from transcript clementine0.9_023885m (loc us clementine0.9_022539m.g) derived from phytozome v7.0 (c hr-ID scaffold_1; pos 11150356 to 11154336 reverse strand)
gctactggcaagctctttgagtcctccagctccaggttttttttattttattttttaatttcaagcccagcccttgtttatataccttagcttttcttgagtgtgtgtgtgtattttcaagtttcattactctttggtttcacaaaagctccaatattaccagcttttcagagagtaaaatgaaagtcaagaaggcttattaattagtaaatatgaataaatatttattattctggtcatttgtttatttgttcgaaatgaataattctgatgaacagtgaaagatcttccaatatttaacgagataattacagtccataatgcgacgtttgaaaatttctcaattcgtttttcaaaaaagtctgcaaaaagttaaccaaatgcattctactataaacacatataagttaatgatcggtgtcatgtgaacttttataagaatagtttaaaaccctcagatttcattgatgttaaattctaaataatgtgtttatttatatgtgtatgttacattaatgagttaacttttggatgttcagtttgtaaaacctctaagaatgatatgaaaagtcttaaggtttaaaccactagggttggaaggagattggtttatttaatattttataaaattttatttgtgttaattaacgcagagttacgaatactttcttcaattgaatgctcggaggctaatatttctgacagttatattgttatttcatgacttgtcatagataaaaaagagtcaaagtacaaattatgatatagtgagaaaatgagagctgattttaactttgggattagtttttttttataacttgacaaaatatctcagtttacttggaaaattccaggggcctgcgtaacaggaagctatcatttatgattactttaaacatttaattgcacagtccatgattaattatgtagcttaagttgaggtcggtacactttaatcaagggaagaacctttgcaatcatagtaagacaaagatactactgatttacttgttggttcatggttgatttttcttgttgtgtggagttaattcctttgaacttgtcatgttcatctcaattaatatggcctatcttttttttttaatcattaacgatgaagcttcattaattaaatagtaagatagcataatggattatttaaaattggaaatttattgcccaactgttgttccatgttatcttgaagtttttcattttgaaaaaattataggggcctgagtagtaccaatatgcatataaactaactgcacttggctttgttctctttaagattaaatgttgcaggtttatatctgagtctgtaatatagatagtgctttgaagagtgaaaacataagtgaaaattgttatattcttgagtattatcaagtataaaaaatgggatatgaaacttgtatagtaactaatatggcatttgatgtgttcattagtgatgaatgataatcattacctaattaatgaaagttaataacatctactttaatataagatatgataatcatcgattatgttagtatacgcacttgaatataaattttgtatcctaactttatatgtgttgcatgcatactcccattattggttattcttgtaatgctatgatcatatttcataaatgtcaattgttattgttttatatattattccttttttttttaacttaagtacttggttgagtagctttcaagtagttttatatagttgatcacattgatttgaatcttggagtatgtagatagttaaaatttaatttagactttgctcgtagctctactttcttttgtgaaaagatattaaattggttttttcggttataccagagatttgatttttgacagctaaaatgtaggagttaggtttatatttttttaatttgagttttcgaccactaaaatggaggagtttggtttatatttatgaactcccaattttttttttttcaaaaagaatctattttggtatacaattatgtaatattttaaagaagaaattttagaaaccaaagaacacacgatgggatgattttggaaactcagtttccatgaaaggacattttagttgttaggtgatccaatttgagagtgtgcagatgtattcatgatttcctactgctgttatatatgatagtgagttccaaaaacaaatgtgttatttatttgaaataagataatcctgcatacagtgtgcttaaagagcctcttgccttgttattgtttaggagccagtctaactatctaaataatctttattctaaggagactgccaggaagtggattttgaacttgcttgaaatttgtcaacaattgtctattgatgaaaggctttgttaacaagtcattggtgtctagcttgaaggatcacatcttcaagtatagagtttattttttttaaaccgagtttattattccttgatgacactggtaacattttctctacatttgagaagcatgtatacttcttagggggtctgaactcccatgcttaaaaacatattttgtcagtcattcacttagtcgtgtcataagcagtacaccatttgttcattcaagttggaattaattcaagattgtttatacctttctcttatctcttaagaatattttgaaggagtcttggcatatgtaatgcggtacgtaaaatctttataataattttgatagcctccaaaagatcttggtaggttgacaacttgtgcttccaaagcaaaaatgtaatactgaagtgttagtaaataccttagctttactttagaatttaatcaaattttacttatcaaatctgattttaccttactattttattaaaaggaaattacaaacattctagagcgtgtggcagcatatatgtggactattttttttaatgttggactctgtgcaatccaccatgctctactgctgttgctcccacgctatgaaactttgatgtggtacttgctatgatattataaagatgaatgttatcaaaggtgaacaaaaattagtgtttctgttatattatttaattgattaaattttttggagtgatacaaaggattttaggttcaaatccttctgcacaaatgtaggaaagaaatcatgtttctgctaatgcaacactaaaataaataaataaataaataataaagatagtataaagaggaatgctataaaaggtgaacaaaaaatagtgtatatgttatattattcaacggattaaatttttttgagtgatacaaaagattttaggttcaaactcttctgcacaaaggtaggtaggaaatcatgtttcttctaatgctatgccaaaaaataaataaataaacaaagatactataaagaggaatgctatcaaaggtgaacaaaaatagtgtttatgttatattatttaattgattaaatctcttgggagtgatataaaagattttaggttcaaacccatcggcacaaaggtaggaaggaatttaaatcttgtttctgcttatgcgacacttaaaatgaaaaatggaattagtaaaaaaaaaaaaaagaattcattctgtcatgatttggaaatttatttttctattaaagggtctcttccttgattcctagtactgccacatacaaagaagataagcacacatacttagccttttgccttgttgtcgctgttaattagtcagtttacaagctgaacatgtatattgagtgtagaatggatgatttacttggatgctatttctattctatgtaaagtgttagataatagttttaaaattaaaaatttccttaatttatattggtataaataggatttcttaagtaattatattggtataaataggatttcttaagtaatcttactatctttagttttcctctaacatcacctgctaatctatactttatagtactgcttgatgcatttatctgaaactcggctggaagttttgatcacttcatgtctaacagtgtcggtatatgtaatgtgttgtgaagc

SEQ ID NO: 9533 - DNA, 2016 bp, Citrus clementina
  Intron number 6 from transcript clementine0.9_009377m (loc us clementine0.9_008679m.g) derived from phytozome v7.0 (c hr-ID scaffold_20; pos 849625 to 851640)
atagaccacttctcagtgaaactgataccgtagaggtatgcgcgtctcttagatttgcttaaatttccatcctaacatggcattttgttgtgtaagttagcaaatgtaccagtcgacacaagaattacaatgaagagtagagtattgtcccacagagattgtataccctattagctaccgaaatttatttgaaaaaccgattaagtgaatttagattgaaaactaaaataaaatatgaagtaactgaaaattaaataaagatatagacaataatagaaatcaccaagagattaagacactaggacatccgattttaccataaccaatctaatttaatcctccatctatgctattaaagtttattacccatgttgacagtgaatttccctaatctattcaatatcctctctcgagtaatatgaaaaataccttcacatattaacctattatatctctatgtgaatttaaatctacaaagattcattaacctttatagaaattcttagaaaaactgtgtgaatcacgttggcatatctctgtctttcattcaattcatggcattcattacacagagcgaaaatacataaatctcctctcggtcacattatgtatcttcaaatcattcaaatattggccagatatttaaaagtattaaacacaataatgaacactcaatcatgaaataatatacaaaaagtaacacagatttatggaattaaattttcatagttaggctacattgttgcctttgtaaattaaattagttcatgggaatataaagagaacccataaatatgataggaaacattcaagcaagacacttggaaaagaaaagagaaagaataaactcaggaagctatctccctctaatctatgcaattcagcttctccaaaattctgctcttggttttgcggctgctgattcttctcctaattcggttctgctcgtgcctttttttttttttttaatattgcttcaatcggtgaccttcccttttaataatgctgaccgcctctttaatatgctaatgcatggcctcaaatccttaactcagaaggatttaaaacaaatcaagccaagccgccaacattaggcccaccacatgctttccatttaaattgtcaattaattctttaatgctccccacgtgtttgcatgcatgatgattaattaaattaaatcttccttagtttgtttcaattaaatttctttattttttgcctttttgattccttcaagcagatttcttcctgaatgttcctatttaattactctataatcctagattgtacctaaaatagcaaaatataaaaattaacataaaaaaatataatttaacataaaattaagttagggaaaaataaaaataatatataaatttctagcacatcacatttccgtgttttctcttatgtgagcttgtttatgagatattggtgcagagaaagatgtgcttttaaatggaacagaaaaactgtttgcaaaatttcttgtgatatcctgctgccagattttatttaccgttacatatatacacacctgtaatgctttaatttcttggttattgtaatttttcattcatttgtcttcatgttagattacgaatgttttattattggttggggaccgatgtgtgtgcttggaaatgaatgtccactaattaactactggagacctgttaacgacaaatcttgttatgtatttacttttccacatatccatcctatcgcctatgttgtatttatgtttggaatggacaccatttccctgatcaaatgtcctgtcacatggatattaacacttctattcttgggtttctatacttgtccataatgaaaccataagttggttttaatggatcttgcttgttccggtgaatattgactttcaaattaatctcttgtttgttcttttgcatcaatcctagcttctcgtcttatatattgtttaattgatcttatgtaactcatttatggattgagcatttgatattctttttttgtttgtgaagggag

SEQ ID NO: 9534 - DNA, 2108 bp, Citrus clementina
  Intron number 1 from transcript clementine0.9_033655m (loc us clementine0.9_033655m.g) derived from phytozome v7.0 (c hr-ID scaffold_59; pos 501620 to 503727)
cacaagttctccacaaatcaaaagtacgtgtgaaggtaaattcttactccttcaattaacaatgttgttagattgtaacttgttagattatatctaatcgcatttgcaaatattcatatgaggagttaaagatgcttgcatacagttaggtagcatttgtttttttatctgaaatctaaatgggtctaaatttttctaaagtctgaatgagtttgattatgaaaaaatgaatgacatgtttttttccgtttttaaatatataaatataagtggtatcttatttattttcacaataaaaaacatcttaaatttagttatttgacatttatgtccttgtaaattaaaacaaaaaaaaaggattagattttgtagtttaaaaaataaattattttacagagatatttttagaatataatatttacttgtcattcataccttttttcatttagataaaagttacaaaagtttactttttctattcagatgtaaatatctaaaaatcagacataagtttaaaaaaaaaacaagtatattttagaaaaagtctgaaattaataaaatttcagacttcaaatatttaacaaacaacttcttagtccacatttgcgagcaagcgtgattatatataatgtgcttctccattatagtgtgtgatcaatcaggcaagcttaatttaaatgatcatcagtatctatggatgcgaatcaagatcaaggagcaaaagagttgtttcaaggccaagctcaactgtataagctcatgtttagtcatttaagctcgacgtcactcaagtgcgcgattgagctgggcatagcggatataattcacagccacggacgggccatcactctttctgagttggtctcggcacttgatattcagcctacaaaaacgactagcctattcaggctcatgcgcttgttagtgcactcaggctgctttaacaaaaccaaagtcaatggacaagaagaagtatacggactcacagctgcttctactctgctcatcaaagacaagccctacagcatgtcaccaactgtttcagcatttgttgacccactttttgtcgctccatttcagtctttaagtagttggttcaaagggactgagctcacgttgtgggaaactgttcatggaatcaagttctgggaatttatgaatcaaaaccctggaataaaccagcggttcaatgaagcaatggccggtgacactgaaataatgacaagctttgttgtcaaagtcgagtgtaagcaaatctttgaagggttgggcacattggttgacgtaggaggtggcaacggatctttttccagaatcatctctgaagcattccctggcatcaaatgcactgtactcgacctcccgcatgttgttgctaacttgcctgaggccgacaactttaaatacatagcaggtgacatgtttcagtttatccctccggcagatgcctttctcttcaaggtaagatccaattttaaaaatttaaaacaacttcttaaccgttttcgtgaataccagaagatttatttcaattgttctgtgcgcagcacatatatccggacgttcgatcttacaaaatcaggatttgaatgattcaaatcagatttaaagtaactgcaaaatgctatacaactctaaatttaattaacatttggattttacagaatctagaagtttaggcttgagcatgaccatttacgtagtcattttatagtgcggttgcccgcattttttcaagtgtagattcgaagtttacaatattggtaaaggcttgtataacattgaaacttattttttcataacttatatgtatatgtatatatgtgtgtgtgtttataggcggagtaataaaacgttttatctacaacactataaaattattttacaatatttaaaacaacgaatctccattctaaaaagtgtgatttgtgtatgtatatagatagatggatagatagacacacgcacgaactgttgggattttattaaaaagaaaaagtatcctatattttaactaaaatgttagatcaaacaacggaactggaactgcactataagtggtgggtattgattaaatgagtgattggcatgcttgcagttggtttttc

SEQ ID NO: 9535 - DNA, 1374 bp, Citrus clementina
  Intron number 2 from transcript clementine0.9_000018m (loc us clementine0.9_000018m.g) derived from phytozome v7.0 (c hr-ID scaffold_1; pos 11009799 to 11011172 reverse strand)
agagcaccactgataaggtatgccagtaaattttatggtttatatttttttttctacagtttattttaaaattttgtagcttatatgtcctgttttcgtggctcctccaaagaaatgatcagataaggtaatcaattaggaagaataatgcatattcaccatattaaatagttaaagatggaacgagaaacaaatacccctagaggtttttgtttgagaaaaataaaataattgtattctagatccttaacatttccaaattcttcatcacagagaaagagagagagagagagagagagagagagagagagagagagagagagagagagagatatttgtgctcaacaactagtggaaggggacttataaaatatgttatagtagttcaaaatatggaactaatgttgtatttatatactcctgtctatcttttctgggtaataaagtagaggctagacacgttctttcatatatgaaaccttatcatgtgttttgctggagttcagggttttctactcaaactctaggttttgtggtttctcttgtactacataattggactgtctttgggaggtcacttttccttttactttgttatggggatgtattccatatatggggagattgcaatgattttgttattaatattggagcttatatatcgtggtttcgctcttatctttgaggtcaagtgctaactttaaacggtattagagccaagtcaagcaaatgatcttgttcccaaattctcccattatatgaaagtcagtaatgtttcatgatccacatgccatgcatgtaagttgtattagatcttaaggtgttgttctgggtacttgcctttaagcttaagcttttgggttgggtggtaacttaacaagtgactgtaatgtaatattatgctcattttcttgcttatatatgtttcttgaatttgtttacctccttcctttttccatgtttagaaaccacaaaaattttgaatatatcctcttttttttttattttatttgcatgtatatgtttcttgaacttctatacctccttcctttttctttgtttagaaaccctgtaagtttaaaatttatccttttttcctttggctataaagttggtttttctggttaaatattgtgtgtaaaagtgttattttgtctaaatattatatgctgtttgcttcctagttaacattgtctattccattctaggcctgggaatttccttttctgatactattaatacttaattgcctgccgtgctagtttataactttatatggcttttgctttttttgcttttgtaatgcataattgttacgttctcactaatatcaggtatttgtttgtaattaggtggaaaagagaaagttgtttc

SEQ ID NO: 9536 - DNA, 2194 bp, Citrus clementina
  Intron number 1 from transcript clementine0.9_013471m (loc us clementine0.9_005825m.g) derived from phytozome v7.0 (c hr-ID scaffold_10; pos 2089006 to 2091199)
aaggttcgtggtcacagttaaatttcagattttactttactttgttactgttgttattacttggtttgctttaactgtatgatatatccacttcctcatctgcgtttcttgttttttcttaatgatcttcgactgctcactgaactaatttgctacatcaagttcttataatttcttttgttataattgctgacccgtgagacctttttttttccctcctccgcctgcatggattattagtgaagtttcaaaaaatggcttgtgaggctttgttttttattttttattttttattttttccttgtttttgttttggttgagtttttgaaatttgcttcaatattatgcaattagtttatgtagacctcaaaatcgagctttgcgtgtatttctgatttaccaataaaaaaagtggaagaaatgaagttcggtttgatgttaaggttatgataaccatcgttgttttgtaatttcttcttattcttctttgtttttatgccttttttggtaattttatgtgatggtttcttgcaaaaggcaaggattttccagatgcaaggctcaaatttgtgagcttattcatctagttttgggtaaaaatatataagtgagaacgtaatgaattcagaaggaaaaaaaaaaaaaaagtgaatatatagttcaatttgattgtctggtgactgaattcaattaagcatattatttgaagcttcttttcaattaagcatccgtctttttattatacgatgttgtgctgtttcttaagcttaaacactttgcattggcaagacacgttcgccatctaatcatctttagggcttggcttggtaagatgcctttatcaatcaaatcaatcaatctaagcttaaaccttgaggttctgtaccttttttttattaaaaaaaaattgatatgaactacaaactaattctttctttaggcttgaggactaggaaaattttaaatggcggtcttgagcttccgaactttagcaagcactttgcttcttcattgacggccttcgtcagtgttaatccttgcaatccaattaagcagaatcaggtggcttctgaaatatttgagttagatatcatgctgatgaatggtccactggtaatataattttgattttgagatacaagattatgaagaatttatcaaatatgttgcgataaaataaaatagcatgcctgttctggtggatctctatataatgatgaatatatgtaaaatgtggtatagcaccatattgatttcacctcgaataagcttggttttgggcggaagtgatattgaaggttgaatgctaataattctcaacatgagatcgtatggaagcatgagattagcttgagaacaatctaagttcagcaaagagagaattgaacagaccaaaccttggcttcgattaagattatcccatttctgtcctagggttgtctatgaggatgatgctcctcataatattcattctagggcaccattgatgctaatatgtctggctctttgcatttaattcagtcagcgtgctttttggctttttaccattcattaagagattttcctagaatatgtgttcttattttatacatttatttttctgctggtgcagcaaaggtctttattacagatattcaaaccaccttatttttcctttcaatttatttcctattactgctacatatttcggagagttctcttgattactttcttgatttcagaacatttttcatttcagattcagagaatcttttgctaatccagcttgtattattctcaatgaacaacctgaaatatatttttatactttgtgaatttgaaattatattattgagcttcagttgagcatcccttttacccttatggtcctttataaagttatcggtgacaacggatttttttacattcatagtatcttataattttaatgaaatttatcttgtgtcctatttgtgcaatggcataacacatagttcttctggccatgaaactgttagatttgacaaaactgaagttcacttaaaaacttgattatggttttataccatcagattttttcagctaattaattttgtcggattttttttttttttcatttttgatgcaaaattttgttttcccaacttactgtccttgtgtttctgataccattctgacaactatttcttctgctattgcatgtttcagtcaccac

SEQ ID NO: 9537 - DNA, 1625 bp, Citrus clementina
  Intron number 1 from transcript clementine0.9_023457m (loc us clementine0.9_023457m.g) derived from phytozome v7.0 (c hr-ID scaffold_20; pos 2788665 to 2790289)
aaggttctctctctctctctctcttgtagcttccgtatatttatacgtatttgcatgtattttttctgtatgttttgttgtagttagggttcgtagacgatagtataagtgtgtgtttgtgtatgttatgtgttctataattttgtgaaattgagttgattgtgcgaaaatgaacttttagtttgaatgatcattggttgttgtctgtttgtttcttgagaaaatggagtaagaacggagtttaaaaatattcgaagaaaatctatataataggctaaattacattcctgtggttaaaaattggtgttaataaaaaataattattattaaggtgctccttggtgttatgatgttagcatttttgtgactacggctttgaggatttctgtgttttgttttctgaaaaatcattttcagaataattgtattatacttttctatatataaagaaatatttgcttcctttgattttggcaaagaaaatggaattctggttttgaatgaatatgcttgagcatgagtaagttatggtgatgctgatgtttctgttgacattagtatttctttctaactatcttgtagcagcatgtatgatgctaatgtatagcttcacactgttttgctcaaatgctaactggattaaagttcattttttatcacggatcaaaaccagatcagtaatttgtggtttggttgcccttggactgcagagtgatagtgtaagcatgatagagacttatctcttgtttttttcagttctctgcagcatttagagagagttttgtttgggcgcttcactcaaaatatgtgcttgttgtttccgtctttgggaggaccaactacaatgtttctctgttgtgtgtatttctctttgggaggaccaactacaatgtttctctgttgtgtgtatttctctttgtgcatgcctctgttttgttgtttcatttcttcatattgatggtacttcctgtctcttatgtgtctcatgtggacctactaagattactcgtttttccctaactgttgcttttgggtttcaactacacattcagatattatttctgcataattgtgcttgtgtttttgacttgactgttacttcagcctttcttccgtgaattaaggtcatagattattttgcttaggtctcattgaattggcttaagagtgctccttgacttgtttggatgatatttataacgaggttttagtcaatctagacttgaatttgcgattttagagttcctgtaacacaatttcaagtggtggagaatctggagattatatgttggcatggtatgtgatgtggcaccctaattcttgtattgacctcccagagcaagttatgtttgtacattttgaaaatccaaggtctttatttattttttcaatgctttcattgatctaattgtgcaagtagggtaagttttccgaagtcaatgcctgaatctatttgttcataaggaagacagtgtcactgtttttggaatcttatgttcttttaaattcgtctgcatggcatgtaaattctaattttctttctgaattgcatgtgttgccactctgcatcaaatatgaagaataatacttgacattggtttacttcttgttttggctaggttttg

SEQ ID NO: 9538 - DNA, 1965 bp, Citrus clementina
  Intron number 3 from transcript clementine0.9_021915m (loc us clementine0.9_021915m.g) derived from phytozome v7.0 (c hr-ID scaffold_4; pos 7687817 to 7689781)
acaaaaacaaagctcctgaattgagacaggttcttatctttcacattttatttttgttaacagcattgtttgttgtagatttcaaattatgtgatttcaatttgtttcagtgtgattggagtatttgattgaaaagcttaaatacaactttggggattggtagggggtatagttcaatgatttaacgtactcataaaaatgttatataattcatacatacatcatatcaaacttgaacttattaaggtttaactgcaaattacacactccaccaatcccgcagctacgtgtcagtctttaattttatttattaatttgagaacaaatgcaacgtacatggtctgataatctaggaatgactaacaagagaagttgaaagtctgaaagcacaaggggccaaaaatgaaaattgtgcttgctacaaaaaggagcaagatcttctaaaaattgatggaagatatggcctagatggtgctcttggaaagctttgcttgttagttattcatacgattaataatatcaagacttttggaaacatggaaacatgtatctaaaggaaaatcatgatgagctgggagaaagtgtaatagtagatccgatatcaagtttcattttctttatttggtaatatgttatggttctttttacctcgtgagtttcttttaatgtacaactcacagttattaacactcttaagttatgataacttagaatcctagaaaacagagttgagttggttaattaattttttttgatttcgttgcaatctaatccattatatacagaagaacctttgagaatatatagaaattcttatgaactcgtttcttctattttggaagtatattgctgatgttttgtttaaatgttgattaagcttgtggggagaagtgggatggaattctcatggccattcgattgtgttctttcttctgagaatgttccatatgaggtgggatggaacaaatctttagttcagtggagggtcggccatggctttgtaacttaactacctaggtcaattataaaaatcctctttttcctttagatctttcctatgagacatgtatttggttaatataggatgctatatcttctctaactgtacctacggaattcttttagcttccacatctatgttgatctattctattaaattcttatctgtgtaaacatctgtaccttctcatgactgcactgaatggaagggagtttttgttccataagtgaagatttaaagtcttggaagattttattggatgttttttgattactgggtttgttcttaagtgagcctcttccaaatgataagctgaatggaaaaggttgtaaagaaagttatagttactgaagtgcgcagataattagtagtgaaattctttcgtgcccatgttcttttagaatcaaccccttttttagtgagtggcatctgattctacagcaatcttttttcaagggatcttatccagaacttctagtgggtgggtatataatgaaatcatcatggcatgaccctgacatgtgtctggagctgtatgttatcatgttgacatcttgatacttgtcaaagtctgaaacatgagattttttatgcttctgatgaagatatcaccttttcgcatatgatggttagtcaaatacttttggcctcagttaattgtggatggaatacatttatatggaaatttagttgagctgtcagctgtgcatctacctcctgtatgctcacaaactagtcattcaagtacactttatgtaggcttttaaatgtttagtaccaattgaattatgtagatcaaattttcataattgccaggcatgagtgacaaccaaatatattcataggcaagtttgtattcattaatgacattatttatcgcctctgttatttattaattttctgaacaatgtgatcgattatcttctgaaggttatagcagcaacagtagcaagtgatccagtaaa

SEQ ID NO: 9539 - DNA, 1435 bp, Citrus clementina
  Intron number 4 from transcript clementine0.9_033311m (loc us clementine0.9_033311m.g) derived from phytozome v7.0 (c hr-ID scaffold_29; pos 426044 to 427478)
ttgctacactcagaagtaaggttttgctgtacaacatattctgttcaaacttctgcttgaattgagatggggtagataatgccttaggccatctccaatgcttaacaccattttggtgtaacaccaacaccaaaaatgtacctttttcacaccaaattactatttcatttccaacccatttacaccaaattttacaccaaaaagaatattcttctttttattcttttaattctcaagaattaattcaattaacgcaataaatattactattaatatagataattaagtaataagtaaatttttatcgattaacaaaaaaaatatagaaaattattaaatttgcatttaattaactaaattagtacattatgaaaattaaacattacattaatatagaaaaatacaataacaataataatactctagttattcgaattactaaattcatctcataaatgatcaattagtgcatttcggagtgcaatgtgagcctctttatccttgatttgtttgtgtcgagcaagaaattcttgaaatttatgctagtagtagtagctttttaaatttgtgttaatttaattttgtaatatgtaatctagtaattaatgttattggcattttatttttattatttatttttgtgttgaatattttttatttaaaatattagtataatattcaaaaattaaaaaatgaaattaaaataataacaaaaataataataataactttaaaatattatataaaataggacatataagtaaataagaaaaagtaataagaatatttgggacttttttccctagcaccaaatgaatagtgttgcaccatatttggtgcaatactattcataacaccattttggtgttgattttggtgttacattggagaagcattttacaccaaaaatggtgtaaaaggtggtttggtgttaggtttagtgctacattggagatgcccttaaatagtatgattttgtgcttcagaaaatagaaacctaaaataagcagcaaatttactgatgacaacatatgttagtaattttcttatgataattcaaagtttttggaaactgtgaatctggtgaactttaaaacttcgattggaattcatccatttcttttctttaagagtgatacaaactgtattttttgaacttcagatgaacagaattaatcccatggtaaattggtttatggcaaaacaacaaattcttttagtttagtagataatattgcatcatattctatgtgatcacatacagttgcttagttctgatgacagtttttttttttttttttttttaattttatccaatatcctgttttgttcatttttctaaagttagtggagagagtggcggtttttctttttttctttgttttataaatacttacaattctgtcttggttattctttgcaagagtaggttgag

SEQ ID NO: 9540 - DNA, 855 bp, Citrus clementina
  Intron number 3 from transcript clementine0.9_000702m (loc us clementine0.9_000702m.g) derived from phytozome v7.0 (c hr-ID scaffold_1; pos 3676261 to 3677115 reverse strand)
ctctctctgagaaggtaaataattgaaaaaaataaattaattttttttcgtttgttgttgtttttagcaaattatttttttccctctctttgaagttgccattttgagctatttcccttgagggcagcattcaaattttctatttcaatcccttattattcattaaatacatataggtgtcacggttatatgggtctataaaaatttgagtaatgatacagctataaaattcttgtataaatttattttgtacaaactgacatggcatgataagattggttgaatgaaaatataaattaataaaaacaaatcatgtgggccaagtgatatttaattcaaccaattttatcatgccacatcagtttgtacaaataagtttgtacaagagtttgtagttgtatcattactctaaaaatttatacaaactaaacaaagaaattaaacaatgaaattaattactaataattgcaattaattgtttgttttttattttattttttttggtcatccatgaggatgatttgaatatggtgatattaaggagggaattattctgacaacttttatatatgtcagggtaacaaaattttttaaaataattttatggatggtatactactactactactactacttagatgaagatattttattataaaatattttatttataattatatgattaaaattataatttatttttattatttttattttataatttttatcgtgtgatttaaaaaaaaatgtttgaacatatccaacgtaaccattgcttatattggattagcataaaaataaaaattctgaaagcatttaattatgcatcggttggtggttagatcataaatattg

SEQ ID NO: 9541 - DNA, 2804 bp, Citrus clementina
  Intron number 3 from transcript clementine0.9_014804m (loc us clementine0.9_014804m.g) derived from phytozome v7.0 (c hr-ID scaffold_122; pos 569527 to 572330 reverse strand)
cttaatcaggtgagactgctatactggaaatgctcgttaataagttttagttttcaacgtcctttagttggtagttaattttatagaagttatttatgtctgttcctcacttctctcttttatgagtaaaagcatgatttgtggtatattcctggggattgcctcgttctctgtgatattattagttttttttttttttcaaaaaatagttggtcatgattaggattctgaggatggtaacaagattcccaggccaaaacaaaagagggtgaacgtaaaaatactaaaagatcttctttctggtaatatgaagttgcctatggggtctcctgtcaagtaatgtttagcttcagataaagtatgactagggatattaattttgaatacccaaatatgacctacaaatgaacagtcctatgacttcagattggagagtatgtgttctaattcatgcaattttttctgattctgtctagcaaaataattgtgctcattctttctgagctcatttccttatatctattattaaggtgattttactggaacagttaatatgttgatcctaactgctatgctattctctgaaaagatcttgaagctttttagatgttaatgcaatgcaatgatttgcctaagtttatactttcttcttgattcgtaatttaaatagaattatgtttgtgaaaataagcagttaactttcagatttaaaaaaaaaaaaattacaaaattttcacgacattcaaatctatctcctagatttcaaaaatgacatttttccagtcacttttatgtctgattttgatatctggattcactatggaatttattacatatgatatcttaacctcacgaatgcatttcagctagttatccagcttgcattgtcatgtgaaaggtaatgacgatagtcaagttcaaggatgaagctgtcagtgaagtgactaataattcttagacagactctttagttggactggtaggacgctgctttattaggtatttaggttctagggtaaaagaatgaaaacaattaagaacgtacatagtacttctaggccatgtttggcatgctgcattatactgtattagcactctgcattgcattaaaatatgacaatacaatgtttggcacttctccggtattgcattaagaaaaaaattaatgcgggaaaccccgcataacggaaacccgagtgagactcgggtttatactgcattggctccttcttcttcgtctcctctatttctctctctttcttttttcttttttttccctttcccctcttttttttcgtcttccctgttactctctctctttttttgttttattttttttccttttcccctcttcttcttcatcttctctgtttttctctcttttcttttttccttttcccctcttcttcttcgtcttctctaattctcactctctctctttttttcttttatttttttcccttttcccctcttcttctttgtcatatctgtttccctctctcatttttcttttattattatttttttccttttcccctcttctttttcgtcttgtctgtttcttcctcttctcagtttcttgtttgtcatcttcttctccatttcttcatcatcttcatataaccactaatagctgctgctacctcccttagttcctttctatgtttgattcaaggggtttgattttgtagattggttaaagacgacaatgatagatgagatttgtttgagatgagattgaatgccttcacaaaatttttattttattgtgctatgggaattagtattggtaattattattttttttaagaattttgtttataaaaagacaattgttgtacaacccttattcataactaaatttgggtttagaaatttgtttttaaaaaaagataatagttgtcatcatttctcaataaaatttaacatttacactaaaaaaaattattaaatttttaaaatttaagaccacatatttagtttttttaagtattaataaatattattttttaaaatatataattgaagttaatcacaaaaaaaaattaatacagtacagtgtattaccaaacattgtacaacattattataatacagtgctaatgcaatataaaataatacaatacaccagcattaaaataatacaatacagcataatacaatacaatgtgccaaacgcacccctagggcgttgttgctaggtttgtagaagctgtattaggaatgatactgtagtaatttatgactgttcttttgaaagtctttatgcctacggtagcaactgagagttggcaactaagatattttacagaaccagcatagtaggaaccaggtttcaatcttgtcaggatgtgaacagtatggcaataggacattattgaatgtgttatttgatgtagtttacacaattacaacaagtgaagtccgaagctgtggtgttagagataaagtaagctgattctttcccagaagaaaagtactgacaaaaatctattcaattagaaacttgatagataatgcctttttctagttatagggggttcaggactcagatcaacatccagtggacaagggcactttgaaattctaacttaaaggggctgcatgaatgagtgttgatgggaattaataaaactatgttaatttatacacgtcctaaatgtaaatgggtaggttggactcaccagttaatgcagcattttggtttttcctgttttatgcatgttttttggataaaatttggtaatggtgattatacgctgcaacaagtaatggtttcttcatgcagggtttgttgcagcatc

SEQ ID NO: 9542 - DNA, 1741 bp, Citrus clementina
  Intron number 3 from transcript clementine0.9_032451m (loc us clementine0.9_032451m.g) derived from phytozome v7.0 (c hr-ID scaffold_33; pos 666767 to 668507 reverse strand)
cttgcagaactgcgcgtgtttttccttgactttcggtgagggctagtcttgatatctttgcgtggtgggacttgtagattaggcgaaccacacaaaaaactatttcccataaatgaattatctgagaaatttgcaaaagattctccacttggaatctctccttttagtctattgaaagaaagatttagatattcaaggtataaaagtttctcaaaggatctaggaataaaaccagagaaactattattagacaaatccaagaactccaaacttctcaaatcgcctaatgactcaggaatcgatccttgcaatttgttatatgctaaggagaaaaatgctagattacttagtcctccaataacggttggtatactatctgacaaattgttccttgacaagtctattcctactacaacctttaaatttccaatatctaatggaagagatccgttcaaagaatttgatgaaaagttaaagaccaagatgtctctaaggctcaaaaaagtggaaggtataacataagttaacacgttggagtgcaataagaggtttcttagaggactgagcttacctatgcatgcagggatcgatccaaaaagcttattatcgtaaaactgcaactcaaccagtctacccaaattacaaaggctgtccggaatggatccttctaatttattcttgtaaagatagagaccttgcagtttctgcagcttacccagagaaattggaattgatccggtcagcttattgattcctaaactcatggttatcaagttgatcaggtttccaatttcttcaggaatcctgccgctacggcggcaataaggcatgtaaatatattctaaagaagtagaaagattgcccatggaacttggaaggatgccatgtagttgatttcctgtcaagtctattacttttaaatttctgcaatttctcaaagaggaaagaaagctcaattccgaagtcgaagatgtcaagtagttaaaacttaagtcgagccactggaggttccttaaattagcaattgtgctcggaatagttcctgagaaggagtttgttctaatcccaagaatagacagcttagaggcattgaagatgaaactaggaattgtcccgctaaaattattacgctccaagtaaagcctctcaagattcgaatgtctgggcttgatggaagagctcccgagagcgaattatttaaaagcgaaatgactatcattgatgacagattgaagatttcagctgggataacaccatcaaagttgttattttcgagcaccaaatactccagattatgtagattaccaatttcatgcggtatctcacctgcaaacaaacaatttattcacaaactcttacacaaattaattttatataatcccaaagatttttaatggataatttggtctaaacaaaattaagagcaaaatatactagaaagaagtatccataatttactacaaaaaaattttgggcaaatttccccttagtttctagagcttgaaccaactattcagttaaatgttgggtatttgtttaaaatgtgcgtacctatcaagttgttattgccaagtaagagtgctctggccgaggtcaagttaccaatatctcttggaatgagtccagttaactgattatgagacaatgaaatagcaataagctcttgacattgccatagattgcgtggaactggacctgtaacatgattattatttatgtccaatgcttgtagacgaggaag

SEQ ID NO: 9543 - DNA, 2575 bp, Citrus clementina
  Intron number 1 from transcript clementine0.9_011287m (loc us clementine0.9_011287m.g) derived from phytozome v7.0 (c hr-ID scaffold_116; pos 321891 to 324465 reverse strand)
gccggagaatcccaagcaaggttagtaaataacaatatttatattttctttttcatttttacctataagtttgagatcattatccctacaattactccatgaataattttttttttctttatggaatccttaaatgttcataaattaattaataggttactccaaaaaattaattgaggtgaaatattatgataataccaacggtttttcatttcttcactcttttgagaagcttaatcgttggtcagtttctaagattgggataaatttattatattgtcgtaattaatgcgtccatatgtcacacttagagggataagccggttcagtagggaactggacaaacacatgtttgtgtttggtaattagtaaaagaaaaaaaaaatcaaagatcattaattaaacacataaatcgattaattaattaattttaaaattatacattatattccagacttacttgaaagacatgaatgttggtgattggtgatcacgttgtccagttcgagtcaagattttttaataacttttctcgttaatgatttatttcgtattacctttgaaattaacatataccggccaatgaaatcgtgacatgagaagccatgataagaacatgtttacatggaggaatttgaatgcatgcgctagcttggaaagataaaaatatttttagaaactatgaatctgaccttaagatttaaagatttaacacaatttaattaaaaaaattatgaaagtgtttaatttttttgggaaacattaattgacgaaatttgtggtttattataagaacaagtgtaacgcatgcatagcatggattggcattaatttcatgtttctctagtcgtttataaattataacgtatgaaaaataaatctattcaaagctaaaaaaatatgaagaataaatattttgctaagaataaaagtcttaagtgcctctagaatactggagggttcattcttacagtatcaacgaagtaaacggattcttcagaaccatagctcaaagagggaagaaatatttcaatgtgcggtagcatctaggtccattattttttatgttcttacaaataaggacatagtatatccatttttatcagatgggtccccaactaatgacgtgactgctggaataccctttaattttatgttagatagatactctctcttcttaaagaggatgagtcaaaattcaacaaagtgatggtcgttcggtcattgcaattaccttaattgttttgaattttcctacattttgtcctagtttttagtggaaaatttttcttttatttgtaataaaaaaatggctgtagatgataggaccatttttgcataatttgctttcatttatcattattttataaacttaaatgagaggaatagtttctaatatgtgttattgttatgcttaaaaaaagaaaaaaaaatctcttttttcaattaggaaaaaaaaaacattatttgacaatttagatttttcactgttagagtttcaagcattactttgattctactcattttccaactcattaaaaaactcttttcagatggttcctgattccatttcttttacattcttgctccactttttaacattcctttcttcatgctttctccatgcccacttgcacataacaaaaagaaaaaaagtgtagacatgaagcaaaatgttgctagaaactaaagagattaagtaacaaattcaagaagtaaaagtttacttgggaaataacaattttcccctaaagttactagacttaatcgctttcctatactttttataatgttttaattgacgtttgatgtaaaaactttcataggaaaatttatctcagccacactaagtacttttttttaattaaaaagaatgaagtgttgttaaaaactctaagagataagtaatttttttattaacttaatgacttaattgactaaatttcaatcaactaagtattttttttcaatttattaaaatttttagtcattaggttattaaccaatttttctttttatccttttatattctttaaattagcattatttatctttataattttttatgaatatttttcatgcaatacattgtaaactaccaaaaacatttgttaaaatgttttaatatataatactaaaggggtgtattcacttgaacatgatttatgttatgataaaatattattttattttatgttcattgagatatttattattgatggaacatttaaaatgtataagagcacaaatgtaaaaatattgattttatgactttttaagtaggaaaaaaactttttaaattagaaaaaaacaacttaatgcttatcatggaagatttagaaaaaaataataaaaatatgatttagattcaaatatttaattttattctgaattcatattcagaaaaaaaaaaccctaaaataaaaaaaaaatgtaggggaaactgaaaagtgtcttctctctaatattatttaaagataggttcccctaaattatcttgggcctgtgtgctgggcccatgaacataaaatttcatttggttttttttccctaattcaacaatgtaggaggtgca

SEQ ID NO: 9544 - DNA, 1138 bp, Citrus clementina
  Intron number 1 from transcript clementine0.9_021847m (loc us clementine0.9_018463m.g) derived from phytozome v7.0 (c hr-ID scaffold_16; pos 3742583 to 3743720)
gcaaactcaacattttggtgagtgtttgcatcagaagtgttatttttgaagggttaattagtagtatttgcccatgtgcttaagttttatattgatgcataaaaacttgaatttttcacttttactgttggaattgcaattagttgattagttttaagctctctattgatgatttcatttggttccatttaggccttctattttggttatctgttagcaccttgtaaggcctgcactttgttatcaaaccaaattgaaaatttcatgttttggtctcttacacaattgacaagagttcccatgtttgagcatgctcatatgggtggggagagaatttagttttctgttatgtttatacctaaaatcgttaaaaaaaatttaatcatttatgatatttgggaatttaagcatgtatttatgttgtatgacatagatatttttcgttttagaataattcaaatccatggttggatcaataatacaagtctagttcatgttgccctaggtgattgattgacaaactcatacaaaaatggactttgatatgtaatttttgagttatcagaatatggacttagccgttttaactgttggccagctttcttatgattttgatatagccttgtaaaacctgaagtcattctggatttcactacaatgggacattgtaaattggcttttgtttgcaggagaagtagaacttgatatggtccaagagccgctattgttctcattgttatgctactttattttattttctatgtagtgctctatgaatttttatcggttatagggggtgggaggtggctaggatactttactcgttacaacaatttttgttgatacaaagttggagccaaattttacagtattggaataaactcgtggctacttaatggactaatgctttgcaacaatactttagccattcttgaaatcaatcatgaaacgatgttggttttctaaatctataatggggaatgttttctttcgtttttggacccaaactttagatcatactatttcttctttttttctttttttcttttttaacagtccccttacctttgagggacatttacatgatcttattggttttttaggtaaacaacgttggaactaatatcaggaagccgac

SEQ ID NO: 9545 - DNA, 4783 bp, Citrus clementina
  Intron number 2 from transcript clementine0.9_006488m (loc us clementine0.9_006483m.g) derived from phytozome v7.0 (c hr-ID scaffold_59; pos 718721 to 723503 reverse strand)
aggctaggactgacgatccggacttattgaaaaaggttaatccacttttctcatacttaattcactcagattgtatagttggcatcactaatcaataagatcatggaaagaatcacattcctacctttcagtggactaaaatggctgctgtcagtctattcttttgcttccattctgatgggttacatttcatgcattaaataattttctgttgcagaacatggtcatcaaagtactatattgatgaaaatgaatgactttttataatttattgaatcaattgatttgctctgcatgctgtttcctatagagagggggggggggaggggggaagatttgctctgtatgtataaatgcaatggtccttgagtgtccgtgctttgaagaaggaagttgaactggaatttttagtgctgttagggatataaatgagttgaaagggcagagtaggatttttacctagtatagattgtcaggatttaggacgttttaattgattcattgatgactcttattgtttatccatctttttagctattccatcatgggatctgttaattaattctgcattagaatttgaatctaggattacggatgtttctccataaattgccgagggaaatattgaagaaatcttttgtgcatgacaagatacttcgttgtcttgtttctttctatatgtaaagtaattcattacatttccatgtataaacctggcatatttttcgctatagatttacagtatcttcttattacatactgaattaaggtctctgtggtttgtgagagcccgtgaaaatctgtttgacaaattgatttaaagaaaggccataagttaactctagcactggcaaaattcaatctctctttctttaagctatgtaagacccttacgtattcatctgtaaccttttcatttatattggtatgttaattgattcaccttcacaaacaatgaatcatcgtcaatgctagttctcccaccatcttagttttgaaaagtagaggaccttcttttcatttgctgtagactaaaatattctgcctactaggtcatgtgttgaattgtgttaatttctcaattatgtgtctggcgatttctggaatcaactgaagacatcacctttttctgcttcattaagcaaaacttgctgctattggtaaatgtttatggatttccttcaataataattagctactgatacaagcacatacagggaaatagattaagaaaaacggactcctatgttatttatttctggatattgatagaaaattatgcatctagaaacttggaatggttaccttttcctttgtagaaaaatattactgtaacctttttcctgctataattgtgttcgcccttgttttggccttgctgtggtggttaatttttatttggagcctctgacaaacattttttgttttatttctgtggttttttgtggacagcttgcccattcccataaaatccattttttaaatattaattttcatacagtttcatataacaaatgtttaattaaaatagaaaataatgaaacttttaaatttagatgggggatattagctttgaaaactatacaccttacttggtatacaagcacttttgaccccaataggctaagcttcttcacatagcttttaattgattattttcaatcaatatagcttgtatacatactagtgaatgcatttgtggattacaaaggtatgtgacttgtcaaatattagaaaaccctagggtgctcaaaattttagaaataccagcttatggtatgagcagcttatgataatcttagagattgccatgccaaggttgtaggtggtagtttccagtttagtatttcgtcaagggagttctatgtatcaaaatgcaaaaggaggaagaggaaaagcaatatctacataggtcctagaagttagttcattgtatcacatattgattgtcagttagatggcaatggtagttgaaaatattggtatatgtgcctatttagaataaatttggtgatggctgtaactgtcttgtcaatttcatgctacgttggactatttatggttataaaaaattgtgttggtgcagttttactcttggtttcttaaatcttgctgttatgttttaatattaatttggcattagtagacatattctctccttcaaatagaactttcgttttagttggttggattcatgtctcaggtcacagtcttgaagtttgtgacaaatctttagatactttttgttagttggagtttgtgctgctattacagtctattccttgtgcaacattctccttttcattttgacttttgaactaaatgaaaaacatatgaaaatagttccttcggtttcccattgaagcactttattttgaaaattctttttctttagatcttcatagttcttgggattcaagcaatctctttttatacttttttgtggcttggagtatctggaaattgcaaattttattaaaaagaatatttgaaagttatactagtttttatgcattattggaaaactgttttgtatggttcctgttgtgtcagacaggatatgatgaatgtcgcttgtcttttagtaaactttttttatgtttaagaagaaataagtacattaaagaggaaagataatatttacaatgatgaactgggtctccttgtgttaataaagaagagagggaaagggaagggaaaagatctatagaaaaccattcagcaaccacctcaaagagaccatctttttctagtttttcttatccaaaaagaatctataacgaattaactctaaaccccctcccagttaaggtgtatgaagtaaaaagaacaatctttaagatctttcgtcgctgatacccgaagagatgtttgtgtgccaggaactggtttatcagaaattttctgacatgatgaagtataataatgattgagttttaaaacaaattttcatcatgttattttatttttcttttcttttcttttctttcttttccctttttttcctatggatatagtgttaggttccttcttctcttggttaaagcttacgtttggcatcagtatcttgtctttctatgtatttagtttgataaaattagtctagtggtaaaattctgagcattcattaaaactgtgaaaattaaataaaataatgaatataaaatggtcagaattctaacttgactgtgactgtaactgactttcaacttggccaccttcgggccgacgaccaattattgtggtcgacttttgactaatagtgaatgtatggaatgtgaggcttggaacaagactggaaatgacatgtatacctttatggttcagtacttatatattgacagatgaatatgtaaaattcttttttatatttatattttattttttagtttttattttttatttttatgagcaaataatattgagggatgaattgtgttgatctgactcacatgattaatttggtattggactgttaagagtattgtaactggcagataggaatgttgaaataatttgcaccaatgtaacaagttataagcatagaattgtaggtacttatccgtttagtcttttcagaattagattaatatattcagtaaactttactttcttgagccttgcctcttcttgaattcagaatgaaaactcttcttagttatggatacagctgtcaaatttttccatattgtgaagcatcagatttgcattccaagtatatgtttacttgataagatcccattgttaggaaatatttctgacactaggtgtgccctgagatggtgtaagcttgtttcgagattggatctcaattggaggaaaagcgatgtttttggtgttggcatgttaattatttgttttatttcatggactcctgcagtagttacgcagcttgtctctgattgtattaggtagtcagtactatggctgatatgtgacacctcaccaatttttttatgcttagtttgaccaatggattggaagatggtagcaggaactctctatacaaaggcaatattactgcctatatgggtgtcatatttaaacgttagttgtcttgtttgtttcttattgtagtgtgaagtgaaaaatcatttggtggatgccaatggagattcagcttacaaatgcggaatggggtttctggcccgttccgtggtttcttgtaaatctgaatctccgaattaaactgtttataacttcattgaagtgctaggaatagtttgaataatgctatcataattttctggggttattgctttgtggggtttttagaagaaaggaatagttcggcatttgtctggaagagcaggggatgattaaaatttgttgtcatgttgagcttccctggccttaactttatggagttggagttctcatttatattttattctttctatgcttgtgctacttcctgatgttcgctgcagaaatttcgcaagacaccacttcctcgctcactcttaaaatcatttgaaatgctttatctactgctgatagctcattctgtagtttgaatactgttgcagatgaagtaattagtcggtctcctattctgcatgctacaaagctttaaaactattttaacctcagctcagtgaggaactagcttgcttaccttaatttttcttgcgagaaactgaagagtatcttttgacgtttaatagattttatcttagttccataaacactactggattatcttttggggtgaatgaatgtacttaaccttttttcatgattttcaggagaagcagagagagaagaagcataggaaggagaa

SEQ ID NO: 9546 - DNA, 1618 bp, Citrus clementina
  Intron number 2 from transcript clementine0.9_031117m (loc us clementine0.9_031117m.g) derived from phytozome v7.0 (c hr-ID scaffold_70; pos 1244161 to 1245778 reverse strand)
attacttgggtcttgagtgtccaaagcctttaaaggtttgtttctgaacagcaattgttttcgataatttcattagtcattttgatcaagttgtctttctttggttcttttttgatgttttagactcctttactgttgggctatgggaattttaatatgaatatatgtaagctgaaaaatactagatatgtttatagtaggccagctgtcttaaagttccattttcaatagtgcttcatttcctaaatggttttcttctgccatgtgggattggctgaagaggtggttggtaattttctgctggcgttacttaattttagttatatgttaatgtctttgaatgagatgtcattcattcattcatttgctaaacatttatgctttttttatttgtattctttgatttcgagtgtggttggaattgaagttggatagttgtagcttaaaaggtatagcagtaaagtgtttgttagctgttgtagcataaaagttgtattaatatgatttttcacttgtataacggagaatctattatatttttaataattttgttaaaagtattatttataatttatatttactacatattattaacttttatttcatagttaaagttttttcctcacaacagttgtagcttaaaagttacagtacctcaatcccaaatgcacctttcatccgctatttaatcttggttcttatttgattcatttttgttcatttgtttgtttattaaaatatatacctctttgatttatacacttaaaattaacctacttttaagatttcaagagtgtgccaaggaggatatgacttcctatacaagtccattttattaggcgttgttagaataaaatatcaagtctaagcctcaaaattagtgcctaaaatttcaatatgagatcttttctcagtttcaacatgcaaatctcttattcttagaacttacttgatgaatttggttcctaaaactttttaagttgagaaagatttatatcaagttcctctattttactgcatacttgatttaacctatgagaagtatgaagaaaaataacaaaaatgaagataaagacccattcaagttgcaactctgcaattaaaaaaattgggttattttatagttaaagtgaactttattttttttattgcactaattttcatagtttgaaggaatcaaatttttttaattataataccgcaaaattaggtcaattatgtagatgccacagaaaacatgatcatgtcttttggcagctttgaggtttggtcacttgagtttgtttatgacaataatactgtcttttgcccagtgaagagacatgtactgatttgtagccactaattttgattgagtcaatgcttctcattggaatatatgcagatgatgatgatgattgtaatttttttttttttgttattggttgcccttaaatagtttgagtagatgcatgatattaagtaccaatgatcacagtaaaaacaaattttgtcagttgaatagcctcaaacttttagaaactacaagtgtttgattggttcatcagtgcatacgaaaagagctaacatttgctttattcctgatcatttttccatcattataggaaatccttaaact

SEQ ID NO: 9547 - DNA, 662 bp, Citrus clementina
  Intron number 2 from transcript clementine0.9_031465m (loc us clementine0.9_031465m.g) derived from phytozome v7.0 (c hr-ID scaffold_23; pos 2785385 to 2786046 reverse strand)
cacccagctctgacaaggaagtacaatggttttaggactggagtgaagtaaataggtaacccattgttactcaacagtggttgcgtggaagagttattttttcgttcatttcgttttcgtggtaatggtatgttgacagaagccaaaaaaaatttcatttttggtttggacaatttctttttctttttcttttttttttcatttattttactttttgttctagatgtttgtagatttcaaattattcaatcaacagaaacactaaggattttttttacttctaaaccagatttttcggtttaacgcaacgctagattgttttcctcagttcaacacaacgctagattttcagcttctattatcagattccaattatctccaatatttcacagttatctgagaatttcaatttcatatcatacactaggcagcattgaatgttttaagaacatgcgtattttgtcaaatacatacttagcattgataatcaatcatcactccattctggcaaagactattaacattcgttaataatgataatttaagaatcaaatcagtacggagccatgttgatgaaaacaatatacttgcacagaataattcgcagcagcggactttcatctttgaagtcatgagatataatatgttttcatttaccaagt

SEQ ID NO: 9548 - DNA, 1461 bp, Citrus clementina
  Intron number 3 from transcript clementine0.9_010770m (loc us clementine0.9_007240m.g) derived from phytozome v7.0 (c hr-ID scaffold_15; pos 690251 to 691711)
agaaaaattgaggtaagtacggtctcttgctattggaaacgttgcttcatgctgttctctctctctctttctccgtatgtgttttgttatcgtcacatgaaaatacaaatccaaaattaggaaattgagaaagtatgtataaattttatttttatacattttatttttcacaaagaaaaaaaatacaaatccaaaatcacaaagaaaaaagggaaaaaattgtatacattttatttttctgcgatgcggggtccaaagataatatgctcaaattctaatggtgataagtatctgaaataataatatatgcaagaagcgttaactgattccgctggttgtgctttgtggatattgcatgagaatccaatttgacatgaacatttcactgattaagatttcatattcaaatattttttttcaaactttgcaagtccatgcagggaggtttcttaattatttttactatttctggttacttctcaaaagataaaaaacattacaagtatataatttgttgtattgcattatatgctttttaactataggagccacggccttctgacagtattggcaggttagtgaaagcactgaactctctctgaggtgttagggccatcaaaacagaacaaaacttatgtagaccaattggtccaatttagaagaataaagcatggttttcaatgtttgtaggtgattactacaatgaatgatttatttcgctgagtactttctagcttaggatattatcattatctcaggtaactgagtaataagagactctggctctcgttgaaggtaaaattgaagtattagttgtcaaatccatgaagttcaattggctgtacaagaaagcttcaccgtctgaaaaatctttctttgtttgatgatgtattaccagttgacttgtggaagctatgagacatgagttgtgaaaactttatagccccttatattgagttctacatgttgaactcatttgacaaagaaagtcgagtactaaaaaatataataggatttggagctggctttttatgtctttgtgggaggcttcacttttattacctagtcctaaatacttacaattctccttctgcttgtggaatgtacttcaagttaaaaccaatactttaatagttactagcttattctgtttttgttttatcctcatatcaagcatctcactgttagtagatgtggactacgtcatttaggtacttcagtttatgttatatgccgggataataatgcatctttagagattagttccatacttgatagctccggagtgcctgtgtagcattcgttttccctaaccattttctggagtgcctgcatagcacttgtttttcctagccattttctgttgcttgtcattgcattatgtcaataaatttgattttcttctaacatatgaatcttgtgtcttccaggtagaggttgaaaggatcaggggaagagccc

SEQ ID NO: 9549 - DNA, 2731 bp, Citrus clementina
  Intron number 1 from transcript clementine0.9_024892m (loc us clementine0.9_024887m.g) derived from phytozome v7.0 (c hr-ID scaffold_10; pos 4960709 to 4963439 reverse strand)
caggtacttactcttctatattattctttacacaacaccgcatgatttatataattgttatatttacatccgtggtttctttctgataattcctttttttttctttgatattgagttgtctttagttggaataatgaatgcaacttatgatacgcctcggcgtctcatcttgaacctggaggtattcttaaattaaattaattactgtaactttttccttaaatctcaatttcattgctgcaaaactcattatgcttcctataactctaggagggatattgggccaggagcccaataacaatggcccaattgggcggtcaaattagacatccgcttcaagtccaatacaataacctagttagcttttttgccgtttgatcgcgtgcgtgtagtcaacgcaccgccaagggatcaaattcctaatcttcaaaaaaaaaaagggttattttctgcatgtccccatatgtttcaacaaattttagtgcatatcctaatgtttcaacaactatcaccacacaccttaatcaacaaaattcgcagttaattttgacggaacgagggtaaaagggaaaatgatggtttgctcacaagatccccaactgaaaccaaaagcatgcagactgaatttcaattttataaccaaacgccatcgatataatcaaaatgctcatccaaatcaaaatgcgcacaagcatactcacctcaccaatctaccaaaattcatattccacacttcaccaaatttattttagttagcttcggtttcatccaccatcaccatcgtcggttcgtgaccgccgagcactaccaccaaacatctacgcccccatgccacaaagcaccacaacactgctggccgctggtacagccaccacaacacaaagcttatcaattgatttgggtataattttacttggtcaatattgaaattggaattgatggtgaaatataaattaattttaaaatcgattccttgatttgttagttttttggtgttctagcatgatggataaaatgatttggtgaattcgattagctatttcgtttggaaaattggaaagttagcttggtggataagccttggagaatgacgattggtttgctatttcatttacacttatgttggtttaaaacggcgaggtttgggaaagattaaaacaatgttgtaggctttgtgggtttgactgtggcagtgtatcggtgctcaggtgaaaaatgatgtgtgacacaaacgagtgaggaaaattgtttcgaaaattacccaaaaaattgaaaatttcatccccttcaagtgctgcccagttccctgaggaagtacagtaacttcaacaaacacatggccaagttcaataaaataatctaatgaaattttcctttcatttgcttcaagtaaagaagaaaaacttgtacttataaaaaaaaaaaagaagaaaaacttgtagaagacacatgcttcccagcctcatctttatttttcagtaacagcatttgaaatgaagggcaaacaagtcttttactcaaatcactgacaattccatcgaagttaatggcaaaatttactaattagggtgtgcagtgatagttattaaaacattagggttagcgtcaaaatgtgttgaaacatatgggggccggcgaaaaataacccaaaaaataataataataatatggaccgtcttcgcttttgcctacaactaggggcgtgtagtggtgagagagggaattatagtttcgtcgtagagaagagagagggagagagaaagagagagagatgtcgtacttgctaccgcacttgcactcaggatgggcagtagatcaggccatcctggctgaggaagagcgtctcgtggtcatccgtttcggccacgactgggacgaaacctgtatgcaggtatcctcgcttctcctctcttaattctagggtttgcagttttgggattctaataatttcatactacagtaagctttatctgtacgttcaatttcgattttaggtttacgtgctcaaactgacttaagatttgctattggctacataggataatttggaggcatggggataaataattagcgtagagaagtaacgtagtccatgttggctgaaatttggtcaattgactctattcattggtgccctggtgtctctttcgttttatgcagtgtttaatattttactgacgtacccgagctcagcagagcagattaggaagataagattttaactatagctatgggcctatggcgtttgaggatggattaggaattgtagtctcttgcggttcttgttttgtgtactacttgtttacttagtttcatacgcgaacacatttgaatttggagcatagtccaagttcttaaacttaatacacttaatcagaggctaggacccatttgcctttcaaaaatctcttacaaaaatataatatttttcaagggatctctagaggacttgggtattgtggattccagtgcaatttgagataacattctagtaattttatttcgtttcctgaatatatgtaagagtaatacatttcaagggaacaaaactttgtggggggtgttgagatgctaatgcttttagccacaaatatgatttcacatatttatctcgcttgttcctgttttattgtgcaaattctttttttttccccaccatttttattgatttgaaagcttgatatttatatgatgaggaggtaattaattttgtgtaatttcttggatgcag

SEQ ID NO: 9550 - DNA, 552 bp, Citrus clementina; identical to SEQ ID NO: 8989
  Intron number 5 from transcript clementine0.9_028183m (loc us clementine0.9_028183m.g) derived from phytozome v7.0 (c hr-ID scaffold_9; pos 1499468 to 1500019 reverse strand)

SEQ ID NO: 9551 - DNA, 719 bp, Citrus clementina
  Intron number 3 from transcript clementine0.9_030583m (loc us clementine0.9_030583m.g) derived from phytozome v7.0 (c hr-ID scaffold_68; pos 1173383 to 1174101 reverse strand)
caaggtaccgttatattttacttacggtcagaatttcacaagttgatctttattatgtctaacatacaacatgaattaacactaaaagtattagcacactttaatagcctaagttcaactaccaaaatcaatagagctctactattagctttgagttttatccaaaataataataataatgaactgaatcgatccctgtttgtgttcagctcgattagataaaatctttccaaccgataacttcagttgttttgacacctttagttgttttcgagttaaataagaggtgaaaaacttgagctattgaacaacaaatgcagagaaatgaatgcaagcacagaataataagcagagaataatctttttcgttggctttcatcttaacgtatacaaagttcatgtcttgccgcactataaagaaagtactgttcacagccgtaatttaagtacaacggctactaaactttcaatctaaagatagtactgtgttttgggatattcatcttgatcttaccttcatttcctccagactattcttgctcacttgctgagtaacctaaaatgtcactaaatattttccacgcattagatcgaacacctgactcatttcatgcacatgattgatgatgatatagtcattcaggcattaggtcgaacacctgattcatttcaacaaacactttggtctgtccaacatttttccatttcctttcaggaat

SEQ ID NO: 9552 - DNA, 1980 bp, Citrus clementina
  Intron number 2 from transcript clementine0.9_011076m (loc us clementine0.9_011076m.g) derived from phytozome v7.0 (c hr-ID scaffold_111; pos 186968 to 188947 reverse strand)
gaagcagagcggagaattgctggaaccgccaacatgtgagctattttttgtactttatatttttttgttgtcaaaaataaaaatagtatattactattttgcaagactttttatcaaccgataaatatttattctgttctttttcgctttacatgtagcaataagatttgtgtgtatgatttttttttttctttttttcccctacttttctgcttggttcaatttaaagtaccacctttataactccactaacgtattcgattcctttctgttgtcttctattattgtgtgctttgaaacatcatggcctgttggtgatataagattccctttttggggtcaaaactagttaggatttgtggcagtgtggttatggcttccaagatagcttttgaatcttttatagcgtctaggtgaattaaataaaagtgcttttggccaagttcaaaaacataattttttccatttagcttcctcaagtagaacttctactagtagagcttttgaccgaaaaattattgcttgcttggttgtcaatagtagcttttggcaaaaactctatagttagataattttttcatgattggaataaaataaaataagtgtattttaagctatttaccaaactcacacaaggctcaaaagggaaaaaaaaaagcatactcacactgtcacacaagggggggggggggggggaggagttgctaatgtcttctcccatagacctttaacttcagcttctttcggtagatgtaaaattttcttaactagctcttctctagttacaacaaaatgacactgtacaaattaaaagagctttttatataaaaaattctatcggccattcaaaatgggcattcatttgttttggactaacatttggtagatgcttttctaaagcccttttttgttttaaaagcacttgtgaaggagcacttcgtgcatttctggaaagaatttctttttgatacttttgtaaaatattaaaaagcaaacccaaacacacgttgagttgcatgaaatttagaaggtttgtcactactgtcggctcttattaggaaaaagaaaatatgtgaattttttgcagtaaatgtttattttttgctttattttagtagaataagggaggtaggttaaataaaccaatacttatttgacttacaaccgagttcaattatgggcttttatgtctgatataccttgatgaagctagtagtcttatgtttttatactctgcagttcacattgctgcttttctttggacagaaatggatatggttttgaaatccaactccatgaaacaaatagtccatacgataaaccaagattcagaacaatttaaatatgccgtctttaaaaaatgatttttttcaactcgtctggactgtggcacattactgtgaaaggatcgtattgactgtaatatcttatgatgtgcagtttccattttttcggtttcttaatatcttttgtcttgcattttcttacttctactttgttaagtaatttgttctttactccatgtgaatgtctcagcttctccaaaatacagttgccaagttccaggaatgtaaaatatatccctaccatatgcccctagaagctgtgatatgtcaaagggcaatgagtacatttttggaaatttaattctaggagattaagaacaccttcaacgagggaaatacatttgtacacatttctcttctttttgggcaaactacactaggtgcaaattaccactgccctaatctctcctagcttccttataagtgtgagtttgtgtgagcatagaacatctgttacttctattcattacccctcccttcctttttctgccttttcctgcccttcttgaaggacggttgagctggttgtataagtaattggatagggttgctttgaaatttttatcctcctcttattaatattataatttcggtttccaaattatgaatattttggttcagggagtatcttcct

SEQ ID NO: 9553 - DNA, 960 bp, Citrus clementina
  Intron number 2 from transcript clementine0.9_022751m (loc us clementine0.9_022751m.g) derived from phytozome v7.0 (c hr-ID scaffold_2; pos 368076 to 369035 reverse strand)
tgttgacctctactttaacttggccgccggtgaaggtatgaacattcattttatcaactcttcatttttcattatgatcaattaaaatcggacaaattttacaaatacggaggaaaaaaaattattggttgccaagtctattcatggtcgatggcaataataagatcaatgaactatgttaattgtgacatgggttacaattagtagttgggtttaattatgtcttaagtttaccattccgaaaaacaaaaaacaaaattgttctagaaatatttgacatatcaaatagttaatgtcaaatctttgaatttacatggtcaatatacatcaaatttcttctaagaccttttcaactaccgacttagaaggaaaaaaaaaagaagaaagaaattgaaaatgtaattttctaatttctagcgaaatttgacgagtttgataacgtcgaatcttacaatttgtatggtcaaaatacaaatcaaacaccttctagaaagagatttttaaatggtttgtttatatttaccgactaattaaagatatttggggagacggcttttgggaaaatctagaatttagacttattaaatattaaaaaagaaagaatttagcttttgtgagcataaaacatatccttcaaacaccacatctagcttttgctttttgttttctctttaagtttacacattaattaaagagttctcttataaaccctttgcttgagacattttttcttctccatcagtcaaagaattatttctcctgtcacaaagttgcatgacacgtcgcatggcttataatatatattccttttatacgagtttctttttctaatttaataaagtcaacgtgcaataacgctgtttgtatacatgatcatgggatcgctgcatgtaacttaatatgaacgtggtgttggttcacgcaggagcatacttgcctgacatttgccaggctacccgc

SEQ ID NO: 9554 - DNA, 1887 bp, Citrus clementina
  Intron number 1 from transcript clementine0.9_004062m (loc us clementine0.9_004062m.g) derived from phytozome v7.0 (c hr-ID scaffold_12; pos 3819240 to 3821126 reverse strand)
agaattcgctaaatacagtcaattcttcgcttaaggtaatttcggtgattcttcttgtccacgcttttccttcagctaaatcgcaaacgagtctcctgtttttagatttgctcttcaatcttgaatttatcgtgatataaggtccctaccttactgtttctcacgttttttagcattatttctccttaattacagcatagcggattgagtaatgacttaaattctagttttcagatgaggcacattataatttcttttccttctattttaaaaatattttcaccatgttttctagtttgtctgtcatcactttttactgctgtaattaatttatatacttatgtactttgttaaattgatacacttttgattatttgtttgttttgtttctagatttcgagattcaaaatcttgttttgctggtcgctgagttcagttgttgaactaggtgctggtctagtgaaagactcgggtattttgcttcatctcagttttcatggatttctgtgtctgttatattatctagttaatgttattgttctttttaagggaaaaaaactcatatttttcgtttagaaaccatctgagcatcacttatgtataaaaagattgagcttttcctgcatcttttcgattcaagatttcctcgagagtttctggagtttggattatgattctaggttaatatacaatgtgtgaacttttgattagttgtcttttggaatttttatgcgctggtgacaggacagctcattctttgatatcagatcactttaagattggaactgaatttaataagaaaaaatggtttttttagcgctgctcgttttatatatttgtttcttgtccagtttacatcggttatatattttgtgccttgtttatgtccaccttaatcttttaaatttccatcaggggctcctgcctctgcttatcctgtgttggtatcatgaactgtgtatatcctgatacacatgattaaaatgggggatgtttgatttgtgcttcaaaaagtgttttctaaaaacgaggatatggatgtgattgggtgcattttcaaagacaacagtgaaaaaggctgtcactaaaatgatttctgagacagtttttgagaaattctaaattaaatgcttgttttggaagattttatgcatttcttgttttaagaaatcaaggatttggttatatcttccaaatttgctgttccacaattaattccttttgtccagaagtggaatattttatcttaaattaggaaacattgtatggcctaaatattctctgatttttcaacagtccatatgcatattaactatggtgttctattaactattttactaagtatgggcagtgaaaaagttaaaactattgccatttagtgtggaaagaaagtttactttagacattattctccctacaattttgttgtcatcgtgaataattgattattgaattctttaatttttatttactctggtagccacctcttgaaaaatgttctattttgtttcttgttgccatgatacctagttatacaaattgccttccagttactttcatttagacaacaatatcctgtacttatcatgaaattttgttgtgaaacaggatgatcaactgctatgattttcttgtgaaggagtattgtttgctcagttccattttctgttgtttcaactgatcaatccaagtccgtgttaaataaacttctattaaaatggatcgttgtgacacttcaggatttgttagtgggggtgggatacacactttgagtgacatctaaccgtagttttgtagctaattgctctcattgtggaagtcaggttgactgttctgttgtaattaagtttaggtttggttatcataaagccattcatctatcactta

SEQ ID NO: 9555 - DNA, 1933 bp, Citrus clementina
  Intron number 2 from transcript clementine0.9_017782m (loc us clementine0.9_017782m.g) derived from phytozome v7.0 (c hr-ID scaffold_6; pos 2072590 to 2074522 reverse strand)
gcaggggttcgatattgggacaaactcattttgaggtgactactgcatcttttatgattggtgtagcatatgtaggataaattatggattcctctgcgacatgctttttgcattatagtgcctttttagcttgtttgttgtagagctctaatattcgtatcaagtatatagtgtgatatttgcaattttgttaggtattaggtgcattgctagttaaaatttaataatctctgttctcaaacctttgagaattgacttggggttatcttatgaatatatatttggtttttgtataactttagggcgtttgttaaaaggatagacataaaaaattatcatggtgattttcgttaggtgctgatagtatgaggtataagttactttatctagttgaagagcctttgttgcaactgttccggaacttatcatgttttgatgttgaaatgttaagaatgaaggaactttctcttttgtgatgtttagttcaactctaataatcttccaataggagatattctaaaccctagggaggaaggtttttagtttcaacatgcttcaaaagagattcctcttgatgctcctaaactacaaaaggaaaactaaaatgtatctttcaccgtgtgggagaaatatgtttgtttgaactgttcttcatgccagctcctatattcctctttgactctgtttcattcttgtgtggggttgatgagggtagagttcttggaagttgctttgggttagaatttttattatgtgtgtgaagttagagcattgaaataatatttgaggatagtgtgaatatatttgtcctttctgggaagatattcagattactttgtcaataggattttatttcctaagaattcagagggttcctcctttccatcatcagcatgggtgccagttatggttccatctagtagtaagccttcaggcttctcctcccttaccatagttgagtagctgttttaatctaggttgctaccattttggttgggcaatgatatgccaaaaattgtaaagcatatttgcatcttttgtagtctccgacaactagcttttaggtaaaagaaaacaaatgtatatatgatctctggtttcaactgtttagaatggaaaaaaaagaggagtctcaaaagtctcacctagtgtgctgcttttaattgtttagtactttgatatcaaagattgtctttgaagtaagaaacactgtttacccatcttgagatattttaacactatggctgttgcctcagctgaaagtagcaaggttctcagcctaagtgtaaaccgaaacagttgcttttatttggaaaaaaaaaaaggaggtggttttctgggtaagtgggattccctaatttggagggacaattaacggctgcttccttcaatagcgagcatccttagaatttcattgtctgaatgagttattattctttttcttacttttttattgtctcagaaaggggggcagtggttaattttcctttacttcttttctctgttagtttcgggttttttattcagattttatgggatgattgctaaacaagagagtgttggttactgtagttttccaaaattttattttgtctgagccatctgttcccttatttcattattatcattgatacatattttgttacatgttttatattacccagaggaaatacctttctttgggggtgaaaaaaaatcccatttatgtatatgcaaaatgctcgtataagctcacatgacctgctatataaatacatggtggagttttctatcccctttttttccccgtcacccacatgctgatgagatgcccatatactcatgatccagatatgattactagggttgcataccagaatcatcatgcttcaaatactttgctttgctacctccaaactgaatcccgggtgcttatttaaatgcaggtcctctg

SEQ ID NO: 9556 - DNA, 948 bp, Citrus clementina
  Intron number 2 from transcript clementine0.9_002643m (loc us clementine0.9_001078m.g) derived from phytozome v7.0 (c hr-ID scaffold_18; pos 866701 to 867648 reverse strand)
ctgatcaaggtcatctcttccatcctacttaaacatataattacattcatagatgtcgtagctgttcttgtgtgtgttatttatgatagtttttcttattgttttttgtattatgtcttcgagtataacttttatttggtcctctcttggcacaattattatgatttgatggatatggtttgggtcaaaactcctgaattagtgactggttgagtttatttgtttgagtagcagttttgcggctagattttgtgcggttccaaattcgtggtcacctctcatctctgatcagagggttacagtaaagatagaaaccttatgctacttcaatcgcatgtgctgaggtttctgtagtcaaggagattttatgctgctgttaaatgagctaatttgcattcaccgtcttttcccccttaatgaatttttgatgaattatggtggctagagtataccaatttatttctgtaaaaccctacaagatttttaaggccggacaccatggtagatacagtacatcttatgtcatactcatttatatgcagtagctctatgtccctttttatgcgtacgtattctatacaagtcccctcccaatgagggacccctcattggaaaattaatatatatatatataatataatatatatatatatatatatatatatatatgttgattatattaggctggattattaattactttttcattcttcattacttggaaaattatgggttaatatttcctctttttccattcttcaatttcgttgcagtgctgcatactttatgtgtttgacattttctggaattaatgttagttcttgaattgttaaaattggaggaaactagtaacgaaatggagggtttcactattctgaggtttttattttttaatttgtggaaatattggcaggagctcattcatccaagggcctcaacacatttgaa

SEQ ID NO: 9557 - DNA, 1734 bp, Citrus clementina
  Intron number 3 from transcript clementine0.9_017274m (loc us clementine0.9_017314m.g) derived from phytozome v7.0 (c hr-ID scaffold_12; pos 308590 to 310323 reverse strand)
gggtgagtagtctttatgcctttcttcttaagcaatctattcctattgaaatgtgtttagtagtttgttgtttgctctgagtgaatgcaaaaatggatttgatcacttttttctagttttgttggcaaaattaacagattggcttcatgtttgaccatcaagcttaactgcttttatatagtttatgccttgtgattgagaaccatgctaaggcttttagcaacttgcaggtgtcttcaggcagtacaatgttggttttccataaaaaaaatacctgcccataaatgcaggatgaagccttccaataagcacaaatgaaaaaaaaaaaaatcacgaatttaactaatgctttctatactttcttgtgatttcttagttatgtgcattatccaaagaggccctttggtgctgattgtgggaaaaatattttggcctaaatttcacatattttatgcttttgtatgataatcttcaagtttacgaaatagggtgcctagtgtcagcctgatgcatgctaatgtccacatattgttatctcactgaccaaattgctttaagtttttggtgagtctaatctcaatctagtaaaactttttttttttttataaaaaccctcctaagattatcccattgtagtaatggtgatgaatatctgtattccaatgtctctatcaagggtaagattgcttattccttgttagattggaattggaattcaattttttgaggaacttgaacgagggagaaacacaagaagcttctgctcttttgactttactggagaatgtttcggctaatgttatgatagagtataaaagaattcggaagcttagtccttcaaggatcttttcttgcaaatcctttttggataagttgattgatgatcaagttcctttgaactttcagcctgcccatatgatttggaaagctaaaagtcccaagtaaagttcaaatttttgcttggtccttggctcttggtaaacttaatacctttgatgttattcaaagacagaatcctaatgtttctttgtctccttcttggtgtatcaagtccaagataaatggtggaagtgtggatcatttgtctttgcattgtcacactgctgtccagctatggcatagattgtttcaggcagctcaaatctcttgggtgatgccagcttctagtatatctatgctttcagagtttattcatgcttttgggaaaggtgaaaaagctagagtgctgtggaagtgttcggttatggccactttttgggtgatttggcttaaagaaatagaaggattttttaagattcagaggaagatatcatctttttgtgggaaagagcgtgattattagtttctctttgggccacagttactaagaatttcaagattcttctttcttctgcattcatctaaactgggaatggttgttggcttaattctgtgttttttgttatgattttgttgtaaagctttcgtagtcttttagatcccttgcttatcttttcatcggattagctcttaactgtatagatcttctagtgatcttttgggggtttctttctttgtggacttattgttcacattttgtgattattgttcttattaatactagtttcgttgtttcctattaaaaaaaacaaataaataaaatttcataaccaactctaaccatctgtatccctcttaattcagtgatttcttaactgatgtttaatttaattattatcttcttccaatgcagtt

SEQ ID NO: 9558 - DNA, 511 bp, Citrus clementina
  Intron number 6 from transcript clementine0.9_010658m (loc us clementine0.9_010658m.g) derived from phytozome v7.0 (c hr-ID scaffold_54; pos 1388607 to 1389117 reverse strand)
tgtccatcaggtgaagcctctctgcttcttttactcacaattttctgtagttgctttctctgtaagacttttgctcttacacgtggcaattctgtgtatattagattttaattcatgatttcctcacctaaaaattacaacctcttcatatttttgtaatagtttaaagctattggctacccatatttaacttccttaagttgttttcgtgaagttatagctgtctgttctaatctttgccatttgcttctggatatgtaggtctcactgtaaatgtgtaaaaagaagctatatagtgttttctttttatattttcagtttcacgttgctttttattctctactcttgtcctgttcaatttgattttggtgtatgatattttctctcaattgattttgttgctgtttttttaatttgtcttcatccgctaatttcatttcataatggatttttacccttttttggaaaaatttcagctatatatctttccagaggaaatcacgagagcaag

SEQ ID NO: 9559 - DNA, 1036 bp, Citrus clementina
  Intron number 3 from transcript clementine0.9_002213m (loc us clementine0.9_002213m.g) derived from phytozome v7.0 (c hr-ID scaffold_56; pos 612741 to 613776 reverse strand)
acatattggttgaagcaggtgttatacccaaattggtaagactatatgccctttgtttaacagtaaagatttggtgttagaaatgaaatatacttgtcatttctttcggtggatttttttgggttcaatgatgtttaaattactataagtaaaaggaaatgaagtaaaataaaataagataaatttgaggtgatttctcatatgaagcttctgttatgtttgcaatatatgagagatagcatctataatgggcttaacattattacactgacttaatatctcataactatacaagcaataggagttttaaatggcaattttcaaatgtagacgtttttaattaattaatgcattcataacagtaggcatgttatttagactttttagtcattctcaatagtttctcaaagagtagcataagttgatttgagaaacaccaaggggtggattggacagtgtgattcttcgttttcaatcatgaggtcagaggctcaaatctccatagggcggcctactttgaatataggccataacttctgtaactaccaagattggagattttggtagtactgcccactttcagacctgctgtatgggttatgctgtttctgggttattagataaaagaataagataattgaaatcttgcatgggtgatatttcaatttttgactggtaacaattaggtgatgttggagtttgatgtagacagagaaagaagaatgtttggagttctttctaaaattgagttaatatctagacatttcaaattttgaagaccaagttgatgaataagtagacaattacagcatgtctggacaccttgtggaaactgagtggtgcatagattcattttcatggcccttcatctgcagactataataaagtgttattgcttgcagcagattcagttgagagaaattatcacatatagacacaaatggatagtatcagttccactgggatatcttgaggtgtcttgaagacattaatcttgattagaaagtctaattattttcagtactttctgcaggca

SEQ ID NO: 9560 - DNA, 1277 bp, Citrus clementina
  Intron number 9 from transcript clementine0.9_002561m (loc us clementine0.9_002336m.g) derived from phytozome v7.0 (c hr-ID scaffold_23; pos 1109108 to 1110384 reverse strand)
tcgtgtgagtttcttttgtactatcaggattctaaggaaaaagtatagttatatatttagaagaaagtaaaaatgtacattaatagtgtctttcgtgtctaagtgctgtggtgttgaatgtgaatacaaagttcctctttctctttttccccccttttaaatgtttttgtgaccattaccctttttactaaggaagtcctttacagttgactgcctgtctttggttcccatattggccttgagtgcctaaatcatcgaatgttatttatatataactattatgtagcatagaagcaacaacataacagtgaccacacttaatggtattcatgcattacctaagttataatctgtgagaataaagaaattcaatacttaatttttatatctttaaatgtaagttacttgattctttatattttataaataaaaaaagttccttggtgtcactggcttgtcattttgtctcatctctctaaatttccatgccaagcatcatgatccatgactgctctcatttaggatgcacagttgtaagcttattaaaggaatttgtttgataatatgagtttggtttcatgtccgtttcttgtagatacaagaaaaggaaaaatagagaagcaatagaagttaaagaaactgttttgttcaggtcattttctattaaatgatcgtgcgctgaatgaaagtggattgttgctgtttagaaggaatgatacattggaaaatgttctttgaaaaaagtatcagtgagatgttttaaggtcctttttggagcccaatgagctcaaaaaatttaaaaacacaatactatcgaagaaccttcacattgggaattgttgattaggctgttctatacttttattactgccattttgagtacttgaaattaatatgatgtttggaaacagacaaatccatctcaaagacctctttgattctagtagtcaatgattcaagtttaattgtatggcttggcttgaataagatttgcttgttatgacagggtaattatttctcagtttttactattcagataatataggttcgggcagttcacagatatttcctttaggttgactcttgtttcttgcagttaactcaattataatatgttaggtacagtgtcatttctgttgtagactttagagataaacttattgaatgaattttgacataactatttagaaccaatgaggtaaaatttagactattttgtttcatagaatctcaaatttgttgtatatactttcaggttgttccagtaaagcgcttca

SEQ ID NO: 9561 - DNA, 4690 bp, Citrus clementina
  Intron number 3 from transcript clementine0.9_017854m (loc us clementine0.9_016848m.g) derived from phytozome v7.0 (c hr-ID scaffold_35; pos 725395 to 730084 reverse strand)
ctggtagggattacattatttcatccgtgaaagcagtaagttgctcaattaattcattgttttatactcaattgctatttcatttgcttgcatcaatttacaagattgttttataaggtatcaattgttatgtgtaaaatgtcattaagtacaagaaaccaaaagagaggagagtacaagtatatgggatgtgtattaaacagactaatttattgcggcaaatgagttactacaatctaaagaatcagtaaaaaaccccccaaaaaaatgaaagaaaagaataaggaagtgcaaaatggaggggaaaaaaataggactcttttgatgaatgaaattccaaagggttagaaattggtttgctaacatttacataatcaagtaaaagtctgaatcatcctttaaaaagggaaaaggagcgaaagatttgcaaatttaaaatgtctggatcatacttcaattaaatttaatgtttcactcttcatattcgcagagttgaaagttcagtctgttttaagtttttttcatgtttattgttatcatgtatgctcctgtctaatatcaggtttttgtaggttacagaagcaatcattagccctgattttatccttggttgttgttaagaatttgtgtatttcaaatttgtaaattttgtcatctgattataaatactgggtctaaccaattttacaaggctacaacataaacttccactagggatatctgcttccatcatataaaagtaaacgaatgaggagaaatggaggtcaaagtacatccaaagactgctattactaactggcaaatagaggcagtaccccttcagtttgtagaggaaaggtatttagagtaaaaagggaaaccttgccatcggttgcaggtctctgaaacttcccatgccaatcagctaacaaaacgaagttcttgatataatattttcaatgctctgtgttactgttctttcatttttaaattttgtggccaatcttttaaatttttcaagttgacaattgttccgtatatgttgaagagtttaagcatttaccaagttttcaatcattgaggccaaaagagttctcctgcatgctgatggtattataaaagaaatactagtttggcattgataaataaatgtttgatgtacactttggttgtttttctctagtggtgttgctatttctgttctttgttacaagccgtttcacagtaaccccaaaaagtaaagaaagaaaatattgaaaaatctcatatgcatgtcccagctattagtctatgcaacactaactttccttctctctaattacagagatgtcttccacgggagggtttggatgagcattttgtcatacacatggtagtcatgaactttccattttactattttctttttttttctctctctttgcattaatatatcgtttgtctcattttggaaaattttagttctttctttagaatatgtttttcatagatggattgcttcctcttgttgctttgttagattttatattgttattatttcgaactgtccggatgattgctatttacatagaactcatctgtgtgctcagaatttcctcatattgaaactttgatgtttgatagccttaaggaattttttttttatttttaaagtggctcagaagctaatagaagtatattagtaacagggaatgtacataggagagagactagagaagtccactaaaaataaggacaaaattgccaatgacaaaagctagaacactctaagatgagactttctatccctattaagataaaattgcctcccaagtggttgatacattctgaggcttttttgtacacaagatatatcaatcctattgatattggtatgaagaaacagccttcaaaattgagtgagttcagacccataagtttagtgacaagtctttataagatcatttctaaagtcctctctcttggactcaaagaggtgttaggggaggccatttcttactctccaggggcttttgtgagggatagacagattttggatgcagttttagttgctaatgaaggcttggaggagtatagaaaatgcaaaagacctggttttattttcaaaattgactttgagaaagcttatgatcacattgattgggactttttagattttgtgttggaagctaggggttttgggcaaaagtggagaagttggatgagggactgcttaaattctgtcagtttttctatcttcttgaatggtagacctagaggcaagattcatgcttctagaggtctttgacaaggggaccctttctgtccctcctattcacaattgtggttgatgtactcagcagattagtggacaaagcttaagaatccaggctgactgagggtttctcaatcggtaaagataaaattttggtttctcatctccaatttgctgatgacacaattttcttccattccgatgatgtaggaaaatttcacaatcttctcaaagttgtggatttcttttgtgcagtttcaggcttgaaaattaatttgaggaacagttcaattgtaggcataaatttccaggatcaaaagttaattgacttggcttcttcagtggggtgtgagattgggaattggcctctaaagtacttaggattaccacttggggggaactgtaggaaagctgatttttgggctccagtcttggagaaagttgagaggagattggatgggtggaagaaagcttgtctttccaaaggagggaggctaactcttatccaatctgttctgtccagccttcgttcttattttatgtctttatttcaaattcctgtttcagtggctaaaaggatagaagaggctatgagggatttcttgtgggaaggcataggggagggtaaaaaagatcatttggtcagctggagggtagtttctcaaccgcaatccaagggaggactagggttaggaaatattattaacagaaataaggccttgcttgggaagtggttatggaggcttccattagaagttaattctctttggtattgtgttataaaaagtaagtatgggttgtataaaaatggaagtatgggttgcataaaaatggttgggatgtagctgatgttgttaggcggagtactagatgtccttgggtgtttatttcaaaaaggaaaacagattttttatccaaaactaagctgatagtaggtaatgggcagagagttagattttgggaggattgttggattagggaggctgctctctgtgatcttttccctcgattatatagcctttctcaaggtcgtgagtgctccatagctagtctgtttaagtactctgttatgcagtggagttgggattttaagttccttagaaacttgaatgatagagaatctgaacaatgtgctgagatgcttgggatcctatggggatctgagagaggataagagagtttggattttagataaatcaggatgtttctcactgaatctcattgataaccacaatgctccctcattttctctttctcacctaatttagaatgctaaagtccctaccaaggtgaagatgatggtttggtctgttgctcatagaaaaatcaacacaaacatcatggttcaaaaaagaagacctaatatggcaatatttcctgaatggtgtgtcttttataaaaaagcatcagagaatgtcaatcatttatttctacactgcactgctgcttactttttgtggtctaagttgtttaagaccttcaatctaagctggtcagctcctgcctcatgttactccctcctattggaaagtttttcttgcttaaaaggagaaaaaaacaagggttctatggcactgtgagtcttggctaatttttgggttgtatggaatgaaagaaaccaaagaatctttgataacaaagctgggaaagatccttcacacctatgggacaaagtgaagttttgggcttccctctgggcatctattactgctgaattccaagacatctctttcttttttattttgcttaattgggaagcttttttatcttatgatggatgcattcttagtgagctattgtttgtgggttttgggatatttatctttgcagttttttgagtgttttgtttagattgggacttctcgtccttatttttgtggatttttagtcccaccaatccttgtacatatttcatgtagttatatatataatcttttgtttcttggttttgtggttgggggggggaggggggaggaatcctattgatattggtattctcttttgatcactaaagcaattttatgttttttaaattggctttagttacaaggatggattttgtattcacatatgctttgtaggtttttaccatccccttgtgcacatgagttccttcttgtttttgaatgagcattagcactgatgggggaggagaaaacaaaatcgagctaaacattgattggaagcctctatagttgttgtaactcttatttagatgtataattctcgaaaagtattcaaagcattgcttccagttttaaacaataaattttgctatatcttgtattgtgaaattgtttgacaaataccaattatttggctgacatggaccattcagtttgttttacttgtttgcatgactttcagattgctatcagtattgatgtaatttaactatatattccctctccaaatctattttattgcaggaaggagttaatatcttggctgtcaatt

SEQ ID NO: 9562 - DNA, 3379 bp, Citrus clementina
  Intron number 1 from transcript clementine0.9_020032m (loc us clementine0.9_020032m.g) derived from phytozome v7.0 (c hr-ID scaffold_80; pos 987698 to 991076)
agtactctactgaatcaaggtttctaatgaattctaacactctactcaatctttattgttctcgttgcatgttttcgctttgtgtgtgtatgtatgtgtgtttttggttttttttttttttgcccttttccccattttggccatttagttattatgttactgttcaggccttgcattacacaaaattcatcatattttcgactatatattttaaagtttgagctttttgaattttctttgtgtatctcttttgactctcaaacagaaacatatacaaacaaaaataaaacatagaacaaacttctggtatcattcttgatatgtcctttcctatatgccaatgttcatgatgtttcatgccaatgtcactagtcactacacatttgcagtgtttttttttttttttttttttttttttttatagcttcattgagtacttttacttgcaattgtagaggtgtatcagtgctttgttttgagctagatacttggttaaccacctgattgattgcatagaacaatatgctagggtcgatcatggagctttgtgttatatatgggatttgatgaaattggattcctttaaattttctcttaggcagaaggggcatgtgtcaagaaatctgctactggtctatcacctaggattgtggaatctattgatatttgtgaaatcaagtataatgcctctcacaatgataatgtggcaggatatctataaagattttccaccaagaggtgctgccatatttttgaaaaagtcaacttcggacttagggcagttggtagcttagctccatagataggaggagaaaaccttgggataattgtggtttatcctccttctctcacttcttgttatattaccacgtgtaatcataaaaagtaaatgtacatgtgaaaaaaattaaatggaggaagcgcaacacaccaaaaatactgaagatttttttaattatgtatgtcaaaatgatctaagtattttaattagttatgcaacaatgatttttcttaattttctctatgccttcaccaatttagttaggtttgtattgttcgacattctttactatttggggatagtgatatgtactgattgagattaaattctctcataatataatgtcttaattttctatgacaacaaaagttttatcattagctataaagatcttttaaacgaattaggattcagtgctgaagtttttttttggctaagtacggaattaatgatcaaaatttattttgagtttttattttttttatttctcttacctaacaactattgattcagtgctcagtaaaaactcagttcagcactgaatctttatcccttttaaacacattttatattcagttaattcataaaaagctttccttcctattcaggcctttgcaagtcataattttcaaccatcatataatgatcctacttttgtaatttccatcatagtctttcaccaccacttaattttgtgcacaatctctcattatgttaatttttaagacttaacttggaatgttgaattgaaattcactaattaatttccaaataaataggcaacaaaaggtatcaaatttaaggtttcctataactaagtattcttaagtctcattttggttttgaaacgtatgtatcctacttaagagggcctcctagatttgattttaagtaatatttttgagctcttgtcaaataacttagaattttagattttgtgccttgaagagtaataatataagtgtaaactcttgtataaattgatgtgacataaatacattggttggataaaataactcctgaccaacatgatttacttttattaatttatatttttatcccactaatgtatttatgtgacgtcaacttgttaaaagtaagtatgtacaaaaatatataaatctatcattattcttccttaaatgtatgcaagtgtgcatttttttttaacttttgtctatgtacgtacacgcatgagattgtaatggtaggaattaagatcttatgatctaaattaaaatttaatttttaccattcatttattataagtgaatgtcttaagcgtagttgagtagaattgttatagtatatactacttttaacttcaaatttcgaatgttggattaaaatgaaagaataaataaagaaaaaaataaaaaattactttaaaacccttttcaaccctgaaaatttgatgtataataatttgagtgatgatagaggtacaaactcttatacaaaattgttttgcacaaattgatataacctaaattcattggtagatgaaaatacaaaataacaaaaataaataatgtggtccaagaactatttaatccaaccaattgaactatatcacatcaatttgtacaaaaatttatataattatattactatactgctgagaaaaatgtgatctcttatataaatgtacaacaactagcttatgctataggactcaatattgagaaatttaggcaaagatatatatatatatatatatatacacatgcacatttgcagaatatatggggttggtaaaagggcttctttgctcaaagtgaatgattattatatctgtagatctttgttccttcctattggtaatgtatgatctctggatttagatgattattcaacattacactataaacctgcttcttattataatacttgctattgcaatgcctggatatcagttatctttacattcttgtttagttatttgcttcaccaaagaggtacttatctcatacatctggagtgaagaaaatgcaatgtgggaaagtaataaatttcactattttattgaagcattatggttgatctattacacacaaaaatcaaagaaaaaatggaaagaaatcttttcatggttttgggttatgatatatatgtctgtgtgcgtgtgttttacaaaacaagatatggctaattaataatctttgatcgagttagaagatttggatatttcttattcctgtaaatatatctcactaattttgacgatcttgtgatgattcttatcgtagagttgtaagatttctttttcttttcttttcttttttttcctctccttttttttttccttgtaattctttgatgcagcgcaattcttctattaacaaatttttgtcacgtgtgcattgactttgtggttctaatgaaatctttagatgtattactacaaaactgagactattgaaaattctctatttacatattgagctattaagtatctaataagttccttaattagattttaaattttattttcgccatttatcaatttctatccagaatctataaaatcgaaaactcaggttccttttcaggtgagtaattgttgtgtaatgtttataacgttttctctgtgacagc

SEQ ID NO: 9563 - DNA, 3084 bp, Citrus clementina
  Intron number 3 from transcript clementine0.9_024430m (loc us clementine0.9_017724m.g) derived from phytozome v7.0 (c hr-ID scaffold_7; pos 691080 to 694163)
gactgcttggcgtctctgtcgctgcaatcctcttggtaattcagttgctttattctcctttttgaaattcatttttggaacccttttgtccgttgtttacgttggttggtttagaataatagcttcttggattgaactttttgataacaaataagaaatagcaaaataggtcatattcaaaaccatctaactctttctttagtctaactcataagtactatcattttgtttgtgtttgtgcatttgtgtctctttatgtttggcctaggtttaaaattcagcagttccaagattctgtcaactttacacttggaattgcttattggattcataaaagagacaaattcatgatatagtctacatcaatgctctaaacacggtacaagagtgttgcttctaggggttttagcttgcttcttaatttcttgttaaatctatcatggaaaaaagcattaataacaaagtgaaaatacatgaggttacgagaatcactcctttcttcagctcaaccactgagttttctttccctctaactttatttgatacatattggttcaagtttcatcctatagaacgcctcttcttctgtcaggtcactaatttaacggctgattttttccactcaataattttccccaagcttaagcactttctttctattactcttcttcactgtcttcctcttgccgatagtctcatgtggcccttagatgccgcaaaaccagccatctactacttcccaaagacggtgtttcagtcactgttgctgagtctaacaccgacttcaattatctctgtggaaatgcaattcatgaagctgttgaatttcttcctttgacacccttgacatcccagttgtcaacctctgacgataaagcagcggtaattgctatccaaataacaatgtttccaaatgaagggttttgcattggcatttcaactcaccatattatattcgatggaagaagttcagtaatgtttatgaagtcttgggcttcttaatgcaaacaagatgaagaaaacccctctttatcaccagaacttactctatcgtttgactggactgtcatcagagatccaacggggattgacatggtgttcattaacaattggttagcttttactgtgtcagataccaatcccaacaaacgaagcttgaagagtttgccaagctttgtcgatttggacaatttggttcaagctacatttgtgttgacatgtgaagatattaaggaacttagggataacatattgtctgttttggataaggttaatggaaatgaagtgaaaaaattcgacaaactacatttatcaacttttgtgcttacaggtgcttatgtatactcttgcatggttaaagccaaaggagcagaaaacaatagagatgttttgtttgggttcacagcagattataggaagtgtttggatctcccaatcccaatgaattatttcggtaattgtgttgggactcgtgccatggttgcaaaaactagagatttcatggaggaaactggagttttatttgttgcagagaagttaagtgatatgatcaaagagttagaggatggattaactctagaaggatttgaggaaaagcttgtgaagttaatgcccatgatgaaatcagtagcacaaggagcacaggggcttggggttattggctccaaccgctttgatgcttacaaatctgattttgggtgaggaaggccagagaaggtggaaattttgacagtattcagcgcaggatctatctctttggtggagagtagagatggtcctggggttgtcgagattgatttggtcttagagaagcaagagttggatatttttgcttctttatttgagcaggagctaaaagagcttatttaagttagaaagctatttttagtagccagattgcgagtctataaacatttgaactactggttggtatttttggcgtgagttttgtatgttataaaagacctactttctttgatgatgtaagacaccccttcagatacacataattaggctcccaatgtcagagttattaagcatataatgtcattttgaagctttcgacaagatccaaaaaactcttattttctcatcatacttattaagtttcatctagaacttttgttctcaatctcttttgctttcattttgccattcaattaaaaccaaagacatcaagttttgtgcttctagttcttaatggtccataattaatatcctccatatggttttttcaggtgctctttgttgacttgagtatttttctttttgtgtgtggttaggagatccatcagattttgaactgttcattcccttgaagcttaaaagtattcaactcccaataaaactcttaacatctgtcgttttttcattttttaattatttattaaacacagactactatcatataatgaatcacaccatgatctatagaactaaggacatttatgttcattcccaatggtttctctgaatgtgatgtatatctcctcttttaccttaacctggtattcctttctcttcccacattatttattccttttaccctaagaaaaaatttattttgtggtgagctaagagaatatttcaataaaatttcaaacttgtcccttttctaacttgttggctagagcaagccaataactagagggccatatgtcaataaagaagaaagaagtacaatttagtggtgtaatgaggttggatgttgcaaataatgaactaaatattgctctagattatgctagcgtgcgtttttttttttttttaatatgatatttttgaattagcctgagatcgcaatagacttgaatgtctaaatatggaaaaacatgtttttctttttaagatttaaatataagtgttaagttgtttgtctttctaaaattaaaaataaaaaggagaaatctagaaaccaattcttacacatctttgcccttatgaattttaacaattatactgaatggatagctctttctagccaaggttgacgtttttttccaattccttactatatgagcttttccagattacttctgaaataattcatttttctttaggtgggtccggatttgatcctcctcg

SEQ ID NO: 9564 - DNA, 744 bp, Citrus clementina; identical to SEQ ID NO: 9004
  Intron number 1 from transcript clementine0.9_030260m (loc us clementine0.9_030260m.g) derived from phytozome v7.0 (c hr-ID scaffold_65; pos 1366486 to 1367229 reverse strand)

SEQ ID NO: 9565 - DNA, 1151 bp, Citrus clementina
  Intron number 5 from transcript clementine0.9_003525m (loc us clementine0.9_003525m.g) derived from phytozome v7.0 (c hr-ID scaffold_36; pos 858860 to 860010)
agactcttcctgagtaagtagtttatgatcatgagtcatgaaattttaaatcaaagtattagattctgttcaaaaggtaccaaatctccaattccattgacttcggacatatatctctgcactccttttagctggctgattctaatattttatgtcgggcaatgtctatcgcctagacaacctcaaagagtgaaatcatcagaattctttcaagggtgttgtatgaaggcctgaagcaatttggttgatcgtcctatggcttcattagtagttgcatttggaacgcttatttgaagttagatctttctcaccgtgcatggagctgtctaagaataaataattgcaatgcatgttttgctgttggtactttaggattttagagagtatcaaaatgattagcttgaagataactaactgtagttttcactcatgataaaattgccaatatagtacttttaggattttagagacctaggctggttttctttgcatttgtgtatacatctgatagactcaaattgctctgcagattttttttgtagaataaatacacagatttcactacacaaacttttcacacacaacagaactcctacacaaccaggatattcaagagacctggaactctcctacattcacagaattattttcaccaaatctgacaaataacggactgcctaaaatactaacacaactgcttgatagtttattacaaaccacaaacacagcccaaactcctattaattgccgctggaaaccgttttccttctctggtatgtgatatggacagtggcctatcagcatctatggcacctatttgctgtttctgcatggtccgggtcttcatttgatgttcagtttgtagtttatgcctttagtctaagtttgacatttctttttctttatcatgatggctacacacaataagtctcctgcaaagctaatcaaaaggaagagttgttgtctaagtgcatgttgtatatacattctggttctcttaattgaatttagacagagtttcatggaaatgtactgggtagataactattccatgcatttcaagcatatgttcctcctggctgattttgagaacctcactaagttccttctttgcaggattgttccaaatttagccatcagtaagattttgt

SEQ ID NO: 9566 - DNA, 2413 bp, Citrus clementina
  Intron number 1 from transcript clementine0.9_001448m (loc us clementine0.9_001448m.g) derived from phytozome v7.0 (c hr-ID scaffold_13; pos 4681940 to 4684352 reverse strand)
acacacattgagatccctctctctgtgtctttaaggtaccctcttcatctctttgattatcatttccatctgatcaggtcgaatttttgttacgattcattggatctcccaccacccttttgttgtttgctgatctgggtattttttatattgtcttatttttagtgggttgtttttgtttttgctctatgatgttttgatctgctgatctgaagttttatttgtttgtttgtttgtttgtttttgtctgttgtcttttagctgctcggtgattttcattctttgttggtttgctgttgttcattaataaaacttttttatatctttgttttatatgtgtgttcattttcattgccacttggatgattctattctgcaatagctgtggaaatgatgtgatttgttacttcaatgagagcttaaggatcttagctttgagttgagttttgcaagaaaatcagttgattttttttttttttttgagtgtatcagaagggagaactatgaatgctgattgatgaggctagtgcttcaaaatgtattgctgttttcaattgtgaaaagttttaggacaagaagaatgctttgaatgctcttgaagagttggatttgaggatgcccatgaatgaatgaaatatagattgcggattgtcataagaatttgcattgattgccatgggactttgcaactttgggaatcctgcatgccaaattctgtttatacttgggaaattaggtgtcttggggttgtggacttgtagcataggtcttcctagtatgaactgtatagttgtttgaatagtatattcatggaaagttcacaagtctgggaatgtacatgtatataaacaaaaaggtgatcattttttgtgcatgagaattgatgatcctttatttatttgttatttttattcacttaattgaagcttggataaaatgccagatttctggtggaaagggataggttgtactggctgaaaagttggtatttgcatgactaattagagccttctgcttcaggctacatttttgcagaaatatgaaacttctttggaggtcaactcgctgaaacttctaacctaggtgatttgttggattaaacctggattagttaagtgatgaatttctggaatgattatatgatctctgcatctatactacgaggaattcaattttttttaaggatttctcaaacaagtgattctatttggtggaggattggtaatgtagctacggctatggaagttaagagcatcttaggacattgtgatattgtgatgattttatgggatttccctgaaatcattcatgtaccagaatatatgaaggaagaaataaagaaaagggaatgaataatattgtttttgttatggcgtcaaagttcttatgtgctttagggttcttatccacatgatgaaagttcatcctatttgttttctttttatggttatcaaagacttgatgcattttcctagcttttcaaaattgtccttgtaacttgacatgaattgatgatgacatttgattattttatcatctcaaggattgagtaagaaactagaattcagttggcttaaacttgaagggagggtcctgtaggttaggagggaggatagcaacgatgaccttaaaatacattgaaagagtatataacactttataaagtcctgcaaaaaataatgggatggaagcttggttcatctgttcaaatgctatctgtttgatgtaaaaatgagataagataaaatgaagagatgatggatgttgcaaaaatcagcttgactcgctattaaaagcgtggcatgctaagagttttggttgaatctcagatctttagctaatgaccccatgaaaaggaagagacccaatctttttgagaaaatgaagtgtgttaaatgttaattaagtaaacattactgtagctggtgtgtcaaagtgaagtgccttgcttttcttttctgttacatttatcattctgagcctttaataatgttttttgattggatagttagccttgaaattagataaattatgatcctatcaaaagtgaaataagaaaaaaaaaattagcttaagtctgaaattacagtaaatccattactcctgtatttgtctttaagtgatgattgccgcaaaataggcaagttcattttgtgtattttctgtttgtagcttttgcttatctattatacaggcaagaaacatatatggtccacgagtatgattattttaatgtggtaggttgttcatttaatcataaaacattacagattgtgccattttccatcttgcaattaaacgatgaacctatgttgtgatatttagttatttgcatattcttgatcctcttataatcttttgtagtttatctgttgcagtgaatattacagtttcgaggtagcaaaatcatcga

SEQ ID NO: 9567 - DNA, 1140 bp, Citrus clementina
  Intron number 1 from transcript clementine0.9_006617m (loc us clementine0.9_006617m.g) derived from phytozome v7.0 (c hr-ID scaffold_27; pos 2002097 to 2003236)
gaccgaaaatcgcgggtttctttaatttgtctcaggttcggtttcttacggttctctgcagtacattttttttttcactgagaaatgaaatcggtgtctctggaattaattgtctgatttgctttttgttgcgtgaaactgcctgaatttagggtttactaacacgtggcgctcattgaggattttaattttggttattttttggtaattttttgttgtgttgtagtgtgcgtttttttttttagttaacagaagattttgttttcgtctttggttttgagttttgagaagtcactgtctgtctgtttggctggtgagaaagtgtgggggaatgattctgagaaaattgaaattcaagtgaatttttcgtttgagaatttagaattgagcatgttagttattgaggtgctgtggtttgtttatgtatatcgaatttgatttgttgattgactgttaattttcgaattttgtaattttttcaaaagtaaaagttgaagctttgtctttgtagctaggttctgactctctgattgcttgaggagggagtgggtgtgggaaatagctaagagaattgaatgctggttttggagagtctttagctcaaagttttggccttagcagagtagcgctttagatcagtctttgcatattgaattgctttcgggtagcaaattagttgaattcagggtttgctgggttttgactcattgcttggttggtgatagaacgtaggagaagctatattaccaatcagttggtggttttgaatcatgaaagtgtccttatcagctgggtttttttttttcctgttgtgatgatgaatgttttgactgcttaagtttttatgttggtctggaaatgtaaaaataataaggaatggaagtttcgaaaaatggagacaatgctaagtttatttttaactaagaaaagaaaaaaaggtggtcattgctgtttactgattctcagctgccgaatgtcgctcagcagtcgactaattttgcacattacaattttcttcttagagttggctagacaaatatcaataagtaggcattttgaatcattttaagctaattggatttatttctcttatttctcaatacaggatagcagatctttgatactctgggaatccttgat

SEQ ID NO: 9568 - DNA, 469 bp, Citrus clementina; identical to SEQ ID NO: 9034
  Intron number 1 from transcript clementine0.9_005542m (loc us clementine0.9_005542m.g) derived from phytozome v7.0 (c hr-ID scaffold_31; pos 2049859 to 2050327 reverse strand)

SEQ ID NO: 9569 - DNA, 3113 bp, Citrus clementina
  Intron number 3 from transcript clementine0.9_000460m (loc us clementine0.9_000451m.g) derived from phytozome v7.0 (c hr-ID scaffold_98; pos 291180 to 294292 reverse strand)
tcaatacaaccatacaactgtcacattacaaaacggtgcgtattcatcaaccaaaccgttttttgtttttttcactggaggattgtttgttttgacaccatatttgagtggactacttgatttaaattttataattcaatttaaatcattcttttatcaaaattaaaattacatatataattgcatattattataattagataatataataacaaatagtacaaaattatttatatatcgtaaaaaaaatttcaaaaaaagtaacattgtgcatttaaatagttaaaagagactactaattttaattaattattaatccgattttcttgttttaacactataaatattatatttcatttgtttacacatttcgaggacaaatttttttttttgtaggaggggagaattgtaatgccacaaatttccataatattaaattatgaaaattgggctttcattgagaattatgggtggcctataacccttattaagaaaggaatactaattataaatagaggttatttatgagataattttggaaaagggttatttttcctaattaaatagggtttcttaagactccctataaatgcatactttttccccttccataaccctaagtccacgacgtttattcttcttctctgccgatctttacgcttctacccaaatcctaggattcaaacctttgtttaggagagaatcaaagcgatggataagttattctccatattctcaacagatttctaatcactctatctagggtttatattggcacgattctagatggttatagatcataatgcatgatttagaatgtatttaggctttgtttagggttttgatttattatgagtttagttaatcaatccttaacgtattaagcacaggataattctggacagcatgagtatctcgaatttaaacctatattttctgaacgatttttctcataaaaattatatttctggaaactagacatgtagggcttcttgagtaaattttatttcattaaattcgacttcgttttcaattttatatgtattttcgaaatagaaaccactgcactggaaaactgcgattccagcattgtgatcggattcacaagactatttgtaccaccaaataaactcggaaaattctgaaagtttatatgtaggttaatatatgtgtctaggattcccagttttaatttcataattttatgattagtattttattttataaaaatcacagaacccgttctgtttggtttagattatgtgaaaacagtttcgaatttgctgagaaataaatagttttgaaaatgtttttgatatcggatcctcttgcaaattttacatggggtactcatggatgtccagaatagttccatagaatattatatcattctgagtttagattaagagttaaatcctaagaatcagacctgtacaggtatgaatgagaaaatcagattcttagaataagttattaattgtcatatcttgtatttgtttaaagtgttgaaggtgattgaggctcttagaagcttagaggtgtgttaattcaaattcatttgttgaggtaagtaactccattcctagtatactggatatgtataagtattttgatattattattataagtataaatatttttatactacttaaaggattgattgattttgataacaaaattagtcttatgcaaatgttttcaaacctaaattctttttaacagagtattttataaatgctttttaatatgtaaatgattttatgacatgacaaccttttatgattttatcttgaaaatgttatgcaagcctaaattattgttatgaacttttataaatctgatacaaatgttttgtacccatgtatgatttcgattattgatgattgtatgagattcctaatgttttggctcattgtccatagttattctgattctgattctgatcgtaatatacgatatatctgtctggaccagtactgggtttctgtttgagtgtgcacacgatattctgattttgtttctggccgggtcatcgggactataggtgacactatgtgacatgagctaaccttctgttttctatatatgtattatatgatttgcttcgtaagtaaatatacttttagatattctgaactattaagaatttatgttatgttatcttgatatatcgttttatgaaatttatggattacaatatatgttttaaataaaagaaggcttgcaatatttttagtatcgataggtatagtgtgttaggaatggttttacttaccgagttgacggctcacccctcgtcattacttttttgtagattaagtttcttttgagaggtgcgcttagctttggaattagtaattttccgtttccgtttgccgtttgaataagaggaggaataaacttgtgtttctatttagttatttctattatgaacgtgtaatttggagtttgagacttttgttattatttttatgttctcgggagagattatttagtattagacatttgaatttgtgaatttatttgaataagaattggaggtatttcagtttgaaacttatgagtaaagattatgatttgtgagtaacctccttcttcacgtgctccgcatgtgttagatttggggtgttacaaaataatagaagattcttttttttttttttcacattgcctaatcctatttaaacccacatgaaaattgggattactaatcccatgaatttatgattaaagtttgaatttagtccattagtccaatgcaagtgagcatgacaaacataggattaatgatttatcccaaaaattaatccaatcttatacttaatcataactcccaagcatagcgttgaagagtaactagggtaatcaaattagctgccctaagaccttcatttggacgcaactgactacatagatactacgtagttgggaaataaaataatcaactcaattgtcgcagaagttagtttaagcaatttatatcagaagagaactaattgacatgtctttagggttcatcctttcaccttaaattaaaaatgttgctttctttattattattattattatttcagaatgctcagagttccacaaacgattcaggtcaatcttca

SEQ ID NO: 9570 - DNA, 3075 bp, Citrus clementina
  Intron number 3 from transcript clementine0.9_000451m (loc us clementine0.9_000451m.g) derived from phytozome v7.0 (c hr-ID scaffold_98; pos 291218 to 294292 reverse strand)
tcaatacaaccatacaactgtcacattacaaaacggtgcgtattcatcaaccaaaccgttttttgtttttttcactggaggattgtttgttttgacaccatatttgagtggactacttgatttaaattttataattcaatttaaatcattcttttatcaaaattaaaattacatatataattgcatattattataattagataatataataacaaatagtacaaaattatttatatatcgtaaaaaaaatttcaaaaaaagtaacattgtgcatttaaatagttaaaagagactactaattttaattaattattaatccgattttcttgttttaacactataaatattatatttcatttgtttacacatttcgaggacaaatttttttttttgtaggaggggagaattgtaatgccacaaatttccataatattaaattatgaaaattgggctttcattgagaattatgggtggcctataacccttattaagaaaggaatactaattataaatagaggttatttatgagataattttggaaaagggttatttttcctaattaaatagggtttcttaagactccctataaatgcatactttttccccttccataaccctaagtccacgacgtttattcttcttctctgccgatctttacgcttctacccaaatcctaggattcaaacctttgtttaggagagaatcaaagcgatggataagttattctccatattctcaacagatttctaatcactctatctagggtttatattggcacgattctagatggttatagatcataatgcatgatttagaatgtatttaggctttgtttagggttttgatttattatgagtttagttaatcaatccttaacgtattaagcacaggataattctggacagcatgagtatctcgaatttaaacctatattttctgaacgatttttctcataaaaattatatttctggaaactagacatgtagggcttcttgagtaaattttatttcattaaattcgacttcgttttcaattttatatgtattttcgaaatagaaaccactgcactggaaaactgcgattccagcattgtgatcggattcacaagactatttgtaccaccaaataaactcggaaaattctgaaagtttatatgtaggttaatatatgtgtctaggattcccagttttaatttcataattttatgattagtattttattttataaaaatcacagaacccgttctgtttggtttagattatgtgaaaacagtttcgaatttgctgagaaataaatagttttgaaaatgtttttgatatcggatcctcttgcaaattttacatggggtactcatggatgtccagaatagttccatagaatattatatcattctgagtttagattaagagttaaatcctaagaatcagacctgtacaggtatgaatgagaaaatcagattcttagaataagttattaattgtcatatcttgtatttgtttaaagtgttgaaggtgattgaggctcttagaagcttagaggtgtgttaattcaaattcatttgttgaggtaagtaactccattcctagtatactggatatgtataagtattttgatattattattataagtataaatatttttatactacttaaaggattgattgattttgataacaaaattagtcttatgcaaatgttttcaaacctaaattctttttaacagagtattttataaatgctttttaatatgtaaatgattttatgacatgacaaccttttatgattttatcttgaaaatgttatgcaagcctaaattattgttatgaacttttataaatctgatacaaatgttttgtacccatgtatgatttcgattattgatgattgtatgagattcctaatgttttggctcattgtccatagttattctgattctgattctgatcgtaatatacgatatatctgtctggaccagtactgggtttctgtttgagtgtgcacacgatattctgattttgtttctggccgggtcatcgggactataggtgacactatgtgacatgagctaaccttctgttttctatatatgtattatatgatttgcttcgtaagtaaatatacttttagatattctgaactattaagaatttatgttatgttatcttgatatatcgttttatgaaatttatggattacaatatatgttttaaataaaagaaggcttgcaatatttttagtatcgataggtatagtgtgttaggaatggttttacttaccgagttgacggctcacccctcgtcattacttttttgtagattaagtttcttttgagaggtgcgcttagctttggaattagtaattttccgtttccgtttgccgtttgaataagaggaggaataaacttgtgtttctatttagttatttctattatgaacgtgtaatttggagtttgagacttttgttattatttttatgttctcgggagagattatttagtattagacatttgaatttgtgaatttatttgaataagaattggaggtatttcagtttgaaacttatgagtaaagattatgatttgtgagtaacctccttcttcacgtgctccgcatgtgttagatttggggtgttacaaaataatagaagattcttttttttttttttcacattgcctaatcctatttaaacccacatgaaaattgggattactaatcccatgaatttatgattaaagtttgaatttagtccattagtccaatgcaagtgagcatgacaaacataggattaatgatttatcccaaaaattaatccaatcttatacttaatcataactcccaagcatagcgttgaagagtaactagggtaatcaaattagctgccctaagaccttcatttggacgcaactgactacatagatactacgtagttgggaaataaaataatcaactcaattgtcgcagaagttagtttaagcaatttatatcagaagagaactaattgacatgtctttagggttcatcctttcaccttaaattaaaaatgttgctttctttattattattattattatttcaga

SEQ ID NO: 9571 - DNA, 1121 bp, Citrus clementina
  Intron number 1 from transcript clementine0.9_027415m (loc us clementine0.9_027415m.g) derived from phytozome v7.0 (c hr-ID scaffold_113; pos 198057 to 199177)
attggcatcttaaaggagagaagacttcaattgaggtagatctttatgatgtctcattatttgtggactttcctttactaatttcacttttgtagcttttgttggttgtactgttgattctgttgttttgtcacttctcttattgagttgattttatttcttatgtacttaagcctgtgaatatcaatccctctatctggttagggtaatggttattgttgcattattccaaccaattgatgcttaagtgagatccataagtgaagatttatcttgccgaatttagtctcatgctcgtggttttctttttgccttgtttaaatgaagatttaaattaatctaaatttgtttgctcttagtagtgtttgagttttatttgttaagctagaaaacttgaatttgacttattaaattggtcattagacacaaacaaggttatcaattagcccatattgcttggttatttaaaggactagatgttgaaaaatctcaaaagtttctcaaaattcgtgatagcctcctgttttgtttatatgattagcatcaatagataattcttttaggttaaattgaatgcactagtattaaaaaagaagaagaaaaaaactgttgcataaggcgatatttaattggtacaaaggcatgagtaagttatcataattgctccttgcatttgtgtagttcgttcatattcttaaacttatgtctaacataggtacaaactcctatagaagattaattgggtagatggattgtgaagaaaaataaaatggctcccatgtgaattaaaaaatatagttatagaatttctttattgatgtttgagttgatttattgcaacatttgattttcatttcgtactagctattgctatttttatcctcttgctatatacttattatatccttaatgacctagcatttatggattacatgtcaaagttgaatggtttggatgaatgtaagcgtgacttgaagttaagtacactttaatttttctaatttacttatatgagaaaagtttgttaaggaggcattattttgtttcttttttattaacaaaataaaattcttatttatttttaaattcataatgcaggtgatcaaggatattgtgcaaaa

SEQ ID NO: 9572 - DNA, 1644 bp, Citrus clementina
  Intron number 2 from transcript clementine0.9_002685m (loc us clementine0.9_002685m.g) derived from phytozome v7.0 (c hr-ID scaffold_88; pos 72214 to 73857 reverse strand)
ttgaaagtggaggtggcggcaactttttcactaaggtgaattatatgatattgtagtttctctctctcttttgattgatctgtaatttttatttttatttttaatggtgatatgagtgttttctatttggatcttgatttctaacagttgcaaaaattttgtgagtgctaattttttttggggtgtctttcaggatttagtagacaagttgactgatctgtgcaattctattcttgcttttgtgtagtgatcagtggaacaaaaaaaggataaaatcgagtgaattagaaatgtagtttgtattttttgaagtgatctcagtgctatggagtgattcagaactgcttttagtagttgatttgtagtgcaattcaaaatataagtttgtttgaagtttatctgctattttccaagaaggaaaataatcaatccgaattgatggtttcattttcacttcctgaatatatagtgatctgggatcttcacttgtcacatttctctctcctttgatttgaactgtgcttatgttccctctaaatgcttatttctttacaattaaccacttccatgctattcacatgctgccggaaaatatcaattggaaacatttgttctgaatagcattttaacctcatcttgattcctatggtcaattattctacacatggaaactggatttcttttcttattcatgttctgtagctggatcttgcacttgcacaagttattccgctttcatgaaagtgtagcaatactctggttgatatatgaagagaattagccttcttaagctctttagaaacaatatgtggccagttttaaaagctttttcttttgtattctgtaaagtagaatcttaatgtcccgaagggacccaatctagccataggaaatgcaaaaatgcattctatggccagctttattcatgagaaaactcatttattttcaaatctggtgagagacaatgaacatgtctcagcaggacttaaagagccactgaaatagcttttatttatttgcttttcaagtaatttgcgagtttttctgcagtgcaatgctctcaaatatggacttgtgttttcttttctttctcttttgtatcatgttgatacctatctacttttaatatatggttttgacaaagtttgcatatttgttacagaatattttgtatttcaattgttctcatcttgtatgtctagggttgcggctacctgatgcctgtttatcaattctttccttttcttctcctttttttccccagttatttacattacaaaccattgtggatttgagctaaatttgatttcaagacttttgtgccacttttagagatcttaccagatgaacaagttctacacaattgcttttctgtgttccttttccattttaaattttaatctcaagagatatctccataattcaacagcagatttttggattaattctttctcatgggcttgaatttatatcccgaacgtgccccagaatttcctttttcattgtgatggatgtgctttataacgcaatctttgtttattttctaaattatccacgtatttaaccacatttacttaacttcagtttctaacttaaatatttcttgtagcttcttggtggtttaggcaaaggaggtagtgaact

SEQ ID NO: 9573 - DNA, 237 bp, Citrus clementina
  Intron number 4 from transcript clementine0.9_017633m (loc us clementine0.9_017633m.g) derived from phytozome v7.0 (c hr-ID scaffold_9; pos 1005426 to 1005662 reverse strand)
gaagttctcaagagcctagaggtgcttcttctcttaattcgattactgaaaccgcagaatattggattttttttttcatttttcatatttgtagtattttaatttttgaattgctcaatagctaactgctgaacacttgtaattgttacttgatttttttatttgggaatttatttcctgatcactagtaattaattaattatttttttttttcataaccaggagaaaaggttccag

SEQ ID NO: 9574 - DNA, 971 bp, Citrus clementina
  Intron number 1 from transcript clementine0.9_006624m (loc us clementine0.9_006617m.g) derived from phytozome v7.0 (c hr-ID scaffold_27; pos 2002266 to 2003236)
cgctcattgaggattttaattttggttattttttggtaattttttgttgtgttgtagtgtgcgtttttttttttagttaacagaagattttgttttcgtctttggttttgagttttgagaagtcactgtctgtctgtttggctggtgagaaagtgtgggggaatgattctgagaaaattgaaattcaagtgaatttttcgtttgagaatttagaattgagcatgttagttattgaggtgctgtggtttgtttatgtatatcgaatttgatttgttgattgactgttaattttcgaattttgtaattttttcaaaagtaaaagttgaagctttgtctttgtagctaggttctgactctctgattgcttgaggagggagtgggtgtgggaaatagctaagagaattgaatgctggttttggagagtctttagctcaaagttttggccttagcagagtagcgctttagatcagtctttgcatattgaattgctttcgggtagcaaattagttgaattcagggtttgctgggttttgactcattgcttggttggtgatagaacgtaggagaagctatattaccaatcagttggtggttttgaatcatgaaagtgtccttatcagctgggtttttttttttcctgttgtgatgatgaatgttttgactgcttaagtttttatgttggtctggaaatgtaaaaataataaggaatggaagtttcgaaaaatggagacaatgctaagtttatttttaactaagaaaagaaaaaaaggtggtcattgctgtttactgattctcagctgccgaatgtcgctcagcagtcgactaattttgcacattacaattttcttcttagagttggctagacaaatatcaataagtaggcattttgaatcattttaagctaattggatttatttctcttatttctcaatacaggatagcagatctttgatactctgggaatccttgat

SEQ ID NO: 9575 - DNA, 1083 bp, Citrus clementina
  Intron number 2 from transcript clementine0.9_021962m (loc us clementine0.9_021962m.g) derived from phytozome v7.0 (c hr-ID scaffold_63; pos 340854 to 341936)
ttccagggatcaacgttctactaaatcctgaaaaggtacataagttcttacaccttattggcaatggggcactcaggaagtgacaagttattttttgtgcttcctttaatttttccttttctcaagggagaagtagctgagttattttctggtctagttactacttcaacaaacagattgtttagatgtttttatttttatttatatatttatttttaggattttaaaaaaacagtgatggttgtttcattaatatgctttattttggggttctgttggcaagttccgagatttaaaagttatgtgttacaatattgtgtctcatggatcaggcaaatttagcattttttctttttgggccctctggagcttttttgtcataaggaaaatataattaccacacttatttgatctctcactaatattaaaggaatatcattttgtcccataacacaaacacaacttcatcagaacaattttcattgagaaattaattgggttcaattgttgccaatttcccagaaaaatattgaaactcttttgaccttgggagtttcctctaatattagttttgggaacctcaaactgtaccccaccaaggccctaccctacatactgactctgcatcatcgtagggatatcgtcttctggaatagaattgagaggaatcctgtcgttaatatttgcctacaaactactgaccgaatttacctggagattttgcttaatattattctgagagtttcagactgcaccttcaaggattttggcaatgatttgtagcaaaatagttaaatgctctagatgattgttaataacttgaaattgattgtgaattgaggaacagggttataggctgtccaagtgagtcagaaaacacaagttagggcattccaagtctctttaacatggctatttaagtgattcaacacaagttagggagtattttctttaacacacgtttggaaagtcttttattcttctttgcattgtactatattaagatgtttacttgttttatccaaatatattttaagaatgttgagatatttctgatttcttctttcaacagccaagaagggg

SEQ ID NO: 9576 - DNA, 470 bp, Citrus clementina; identical to SEQ ID NO: 9223
  Intron number 2 from transcript clementine0.9_033386m (loc us clementine0.9_033386m.g) derived from phytozome v7.0 (c hr-ID scaffold_81; pos 917547 to 918016 reverse strand)

SEQ ID NO: 9577 - DNA, 675 bp, Citrus clementina; identical to SEQ ID NO: 9227
  Intron number 1 from transcript clementine0.9_021582m (loc us clementine0.9_016623m.g) derived from phytozome v7.0 (c hr-ID scaffold_79; pos 1134262 to 1134936 reverse strand)

SEQ ID NO: 9578 - DNA, 2417 bp, Citrus clementina
  Intron number 4 from transcript clementine0.9_029312m (loc us clementine0.9_029312m.g) derived from phytozome v7.0 (c hr-ID scaffold_24; pos 182712 to 185128)
ctctccggttcaatcccttccttcatcttaagcaagtcttctttactagctaatattcgttttgaatataataatattatttggagaactcccaggtgaactcccaagaaaaatttgcaacaaccttcattttatggaaatccttgttctagacgaaaacaactttcacggcaaaatcccatcgactctatcaaggtgaaaacatttacaaagattatctttgtcgatcaatgatttctcgggggccctaccaaaagaaatcggcaacttgaccaagcttaagtttttatatcttgatcaaaacaaactccaaggtgcgtacaatcacggactttatatttatatgaattttttagtaatcactcgtagtattttaacttgagtacttgtgcttattcctagaataataggaaggttgatagaaaaatttgaaaatgtttatttgctcaaaaattagttgtgtttaagcatttcaaatggaaaccttgaaataaatgttgacaatagcttcgaatctccttattagtatttgagtggagcaatgtaatagataaagggctttgaatcctctccaaatctaatctttcataagttttgtacatgatcatgacatatctcatttaagtctttctaagattaagatttaatttattttagactttccttattaaaattagaacacatcgttttattgcctaattacaattctatttattcacttttttctttttttctctttctctatcctattgcattttcttctatatcgtgttcacccaacaaactttgatgaccaatcaagcaggttggatgatttcttttctttcttattttgttctttttcttttttagttgtctttctagggaccaaaattaaatggagaattcaaaagatggaacaatatttatatgtgtcaaataaagttaaattaattgcagacgattgcaaatagaaattgtctaccattgattttgtctacttcaagtgtcttaaattgttattgcaaaataccaataataatagtgcattcaattttaatctaattccatcacataaattcttaaaagaattaagaattaattggcaatgtttcttccttgctcaagtttataccaaaagtttaaagtttgtgatataagaattagtagagaagaagaacgaagaaagaagtagcagtctgttataacggcagttaagtttcaaaggttttttcaggcatgaaaacacatgttttgattttgaagaggaaagtataaaataaataaaaccctagccttagtgcatatctagtgtggcttatttaatggttgtaaatacttatttaattttataatctcttttcaaaatttttattattatttggttgcattttgagtagaacttttttgcctctacctgtaaaaggctcaaatatttgcaacaaccttcattaaattgtttaaagtaccctaaatttatttcacaatcttatattatttctttcatatcataactttaaaatacttttctattagactaattttacaatttcaaacaaaatctttaattgataaccaaataacacaaatatctttgataaaagctctatttgaataagttttatttgaaaaggtataccaaacagaacctaaaagacttaaatgacatgtgccatgatcttatacaaaaggttaggaaagattagattaagagaggatccaaatcgtagataaagattggaggagcacgttataaagttggggcacgcttaatggttctgagataattttgagggatcaaattattgaatagtgatcaaatgagcgatgtatcatatatgttcagctcttactgggagagctatgggtcccactttatctatctcctaatcatagctggacacatgcactgtcattctccatatggtgagcaacactactcactcgatcagaatccttaaattgttttgacaaattttaatccaattataattaaacttaaacttaaatattttaaatgattttaattacgaatattcttttcatgatataaaaatgtatatttatattaatttataattattaataaaatgttttgtgataataattgaatttatattagtattttcaattatctaattttattcataaattatcaattagtcccatccaatcctttataaatcattcagtctgatcctatctaattcagtgtaatacaatcttatctaatcatatattcagtttaatccatcatatcaaacgtggctcgcttgcattcttcctgtaatccagcataccacacatttgatcttttaattctctctctggaagactttcatcaagtccagatgtccaaattccaaatcttgagaatcttctcttatggggtaataattttagtggtgcaattcctcatttcatcttcaacgcttcta

SEQ ID NO: 9579 - DNA, 4101 bp, Citrus clementina
  Intron number 3 from transcript clementine0.9_034676m (loc us clementine0.9_034676m.g) derived from phytozome v7.0 (c hr-ID scaffold_31; pos 1133734 to 1137834 reverse strand)
ttcttactattgcggctgaacgatccgttgctttggtatgaatttcttttaccaactcctcttccttattaatattttatgcttagaagtaaattaatactagaaaatagaaccgtgcgtggctttgaaagacaaaatttaatattattcttttttcttactttgtacttgataaaactgataaaaaatatgaattgattttttttaaagacgaggcgaccttataaaactaatgttatttatgaaaattaattatttttttgttaactttaaaaatatatattaatgtgtatagtgtaagtgtatagaccttataacttttgtagttgttgggaaattccaaattatattcaacttgctaatctgttagaacttttatatctcttttttttttccaaccaactccaaaaaatctcaatatcacccacaccacataaacttctgacaacatctataatattatggaaaaataacataaacatgttaaaagataaggatcaataatttctaatatacacttaaagattaacaaacattaataatttaaaaaaatacctgagaggattgtgttatcattcacacgtatatcaatcaaattcgtagatatgaattggaatccattgattggaatcttaacggtttcttttataaccaataaaataatattatactgatttgaaagtgatttgtactcgcctatagttgaaacaactttcaaattcttgacattgtataaagaaccctcacttaacatgtgcctaaacattgtcgctaaatttttcctaattattgcatgcattagattttcctaaaaaaaaaatgctacattaagtgtaaaaaaattggaaaaaaatagagaaaacaatgggagaaggaaattttatacaacattttcatcaataaaaatcatgttcacactaatcaattctacattcttcttggtattaacatactcccacatcctacaaagcctaacacttatcatccaattatctttatcatttttcaactcatgaagaaaagagtgctccacgaagcacacaatactaaaaatttaaataagtcaaaaaataaaaacacatgaatatttctaaagaggatgttggttaaataataaaaaaaatctcaaacataataaatcttaaatacttaatgtttatagagtttgaagaagtcaaaaggcaccaaacaaaaggttgcataattaaatatgagattatgacattaaaattaagccctaaaatcattggtgaaggaagatgaatgaacattcattcctatattaattagttgatatattttaagccactaaagtttagttgttggcttaataaaataaatgaatgtttcgagacttataattaattattattaacagtaacatattgttgaatttaaataaaaagaggaagagacatgtaatcttttgtaatctaataattattttttatttttaatattttgtaatgtaattattttttaatctcaaccaatatattagataatgaaaatataaaaagatgagaaataacgatgccacaaatattaaatacttaatgtttataaagtttgaagaagtcaaaaaatactaaaccaaaagttgcataattaaatataggattatgacattaaaattaggctctaatgacattgctgagagaagataaagaaaccttccttcctatattaattaattaatgtattttaagccattaaagtttaattgttggtataataaaataaatgaatgtttcaagacttataattaattattattaatgggtacatattgttgaatttaaatagaaagaggaagagacatgtaatcttttgtaatctaataattattttctatttttaatattttgtaatgtaattatttttttaatttcaactagtatattagataatagagaatataagaagatgagaaatagtgatgtcacattacctgttgtagtctcagctttatatatatgttaggaaataaaaccgcacttcgcgcagttttgaaaaaaaatttaatattttctaattaatttttcttgtgaatgcgttgaataatctctaagtgctataccctttttcattgtacttttaactgtttttcttcaacaaatattggatgtattcattgaaaaagaaaattaaaacttagataataactaataagattagtgaagtcaaactgttaattaattcttatgataaaacaataactaaaaaaatgtatagtcatagttttcttgattatattcaacttactactttgttagaacttttatatctctttttctccaaccagctccaacgatctcatatcactcacaccacataaaatttcgacatctgtaatatcatagaaaaataacataaacatgtcaaaacataaggatcaataatttccaatatacacttaaagattaacaaacattgataattaaaagaaatacctaagaggattgtgttatcattcacacgtaaatcaatcaaattcggaaatacaaattgaaatccattgatcagaatcttgacagttcctctactaacctcctaagcaaagttataaccaagaaaataatcttatactaatttgaaagtagtctgtatccgcctgtagttgaaacaactttaaaattcttgacactgtacaaagaacccttactcaacatatgcctaaaccttgtcactaaatttttcctgattgttgcatgcattagattttcctataaaaaaaagttacaataagtgtaaaataattgggaaaaaaaaggaaaataataggagaatgaattttttatacaaccttttcatcaataaaaattatgtccacactaatcaattctccattcttcttagtagtaacagactcccacttcctacaaaggctaacccttatcattcaactaaaaattcaaataaatcaaacaataaaaacaaaagaatcttttctaaagaggatgttggttaaataataaaaaaaaaacttaaacataacaaatcttaaatacttagtctttagagagtttgaagaagctaaaagtcactaaataaaaggttgcataattaaatatatgattatgacattaaaattaggttctaatactggcattgttgatggaagatgaaagagacttcctatattaattagttgatgtaatttaagccatgaaagtttaattgctggcataataaaagaaatgaatgtttcaaggcttataattaattattttaatggttacatattgttgaatatattagataataaagaatataaaaagatgaggaatagtgatactacataagctcttctagtcttaactatatatatatatatatatatatagatgggtatcaaaataagtgaacagaataatggtaaatctttgcagtattaatgtaatttttaattattttttcaattaataataacccctataaattaaacatgtttttatattatttttcaattaattaaataacccgtaagttcaactttacccttagaagaatacattaattaaataattattcacatagaccaatgtgcaagatctgagtccacatgtttagcctttgatttaagtgaagggattcatagttggacccatcattattaaattgggacgacgcaatggactccattatttaaaaggcccggctacagtgcaactgtgataccgtgctacagttacattcagccgttggatccacttagatgagtggagtctattagaatttaatggctggatgcaacagtagcacggtaccatatttgcaccacaatttttcccttatttaaaaggggtgacttattgactatggtgcatcagctacactgtgtggtaccaaaattgctacacatatgtcaatatagtgattattaagggataaattgttactgacagtgagacactttttactgcgctggtgcatcgtagcaagtccttagttttaaacttaaaagttttcttcttttgttatacgacaaagttttgattcaacggctagcaaattaaatagtccgccccaaacgcacatctcttaagattattgttgattttgagtgaatggcttttggttacagtcagggggtccgtc

SEQ ID NO: 9580 - DNA, 609 bp, Citrus clementina
  Intron number 1 from transcript clementine0.9_004015m (loc us clementine0.9_004015m.g) derived from phytozome v7.0 (c hr-ID scaffold_117; pos 192228 to 192836)
ggtctagcttcacttccatttcagctcaaatctcagtaagtaatttttttttaattaatgttacagcatgtttttttaatttttatatttgtagtggaaagttaagatttgttttatcgattcctagggtttctatgattttgaaacttggatccatgtgcatttattttagtactgagcttagtgagatttggatttgatttgggatattttagtttaaaatttgtgatcttgggtggtaattatgaaatggggcttttgatttttgtgctggtgagtgtttggtagctgagaaaataggggaaaatgaaatttggatgcttatcgtttatgttgagttgaaaataagtcaactgtagcaaatgattttattatggcgacttcagttgatgaattcattttaactattcattagctgattgattgatatatttaagcttttaatcgaacagatctcaaattaaaaaccaaagaattagtgtcagtcatgttagtactgcttgttgaaagggctttgacctggtcaaattacagtctttatgaggaaaatgttgaagcttgatattaagaaagaattgtacttaacgttatctcactgaatatttgcag

SEQ ID NO: 9581 - DNA, 1644 bp, Citrus clementina
  Intron number 1 from transcript clementine0.9_002352m (loc us clementine0.9_002355m.g) derived from phytozome v7.0 (c hr-ID scaffold_4; pos 3861460 to 3863103 reverse strand)
gttttcttcgttctgcaaaccccaactcctcgcaggtaaaagcttctcttctctcgcgctactattacccactaggtttttaagttttaactcgttcttttttaaagaaaattctcgcttttttttttctcttgcaattactaattgcatgtaaaaaaaaaatcaaaatttttaccacttatgtaaactccccctctggtgactcgatactgtttaatgtactattaattcttgaaataatttaaccatgtaatgaattttattagtatactctcatgttcaatttgtagattggtgggtttttgctaaaatgtttcaaaagttaatggattttgtgattcaatgaatgtttgtttggttgactttgatagtgaactttttttggctgacctgctgtggggatctgctgacccttatggtgtttaccttcatctttatctggaaattgggtatagtgattgtatgcattctatttcgtcgctggatttggtaatctatgagttgtggttgattgaaattgttttttttttggtttgtatccttgtttgtatactgagttgtggcctttagttatgcccttggctagtgtgcatgtgcctgtctttttgataaacaggttcgttatgttttaacatgctaacattgatgatcttagagatggggaataatacagtaaaatcttgctaattgtggtccggggtttgattcttcagtgctgaaaacctgcaggaaaagccgtgtgtttcctgcctttcaaagatcataaggttcaaggagggccccagtttcaaactccagttcactaaggctccatttggcagctactctaaaataaaagctctagttttaaaataaaagttcaataataattttgagaatggtaataaatatattataggatttcattaaaaaaatgtgaaataaaatcactttagcttccaaaatgcagctgcaactgcaagcctgcaagtatttaccaaaagcattagagttgtagctttaaagccacaacaccccccttaactttaagttatttcgtttcttacactaaatttagtgatttattataatttaatttgatgtggtgtgacttcaagttttgtacaactgttggcatccttgcctgtggtattgttggttgtcaagctttatattgagaaacatagttactactataagctttgatttttatggtcgagcggctactaagattttacttttcagttcccagaaaaagtactcacgaccaacaataataaatgtgtcatcatttgcataatttagtagttccatctgtcctgagttttatgtttgaagtaattcaatattatttaatttgggtgttgatgtcctgctgaaattcgatcctttcatttatgaatgtcaacatcatttagaacttcctcgttggaatattcttcaatagtgatcataaaatgaaactgtgtttgtcttcacatgtctttacattgtaattattgtactcagcatgtcaattttgttgttagtattatggaatagcttagtccaagaatcagttttttatgatagaagtaaaatataactggataattgtagaacatctttttctatgtaacatgcatctcttctggttgttgatgtgaatttcagaagttgtttgca

SEQ ID NO: 9582 - DNA, 641 bp, Citrus clementina
  Intron number 2 from transcript clementine0.9_001636m (loc us clementine0.9_001636m.g) derived from phytozome v7.0 (c hr-ID scaffold_1; pos 11259510 to 11260150 reverse strand)
tttcaaaagtggaccactctttatatcatctaaaggtgtgtttttacttctttgggttgtagtttaaattagactgaatcatagaaaaattcatagtcaataagcgttgcactgttgtgatccatcttttcaaaattttgactatttttattttagtttgttttccggcaaagcagctatttgtctatttgcaaatgtttgtttgaaatgaaatagtttgttatttaactagcaaaaatgatctgacttttttttatggagtctttttctcctgcatttgttgagattttgttataattcagactagcaactccctgtctgaaaaacaaaaatttactcaactttatagacaaagagttgcatcgacaatgcattggagttgatagtttttctttgtcttgtagcgactctctgtatgctggtgctgattttcgaaaattgtaaatgtccagtcacgagaactcgctgtttctatttaataaaatattttctttttctaagtgatggtccaatgttattatgtttagaggaatcctgtgcttggggatagtatctgtgtggcacaatttttcaagggcttgatattaacatttcatttcaaaatcttcctttttatcatatttacttttaataggaattgg

SEQ ID NO: 9583 - DNA, 1946 bp, Citrus clementina
  Intron number 1 from transcript clementine0.9_025591m (loc us clementine0.9_025591m.g) derived from phytozome v7.0 (c hr-ID scaffold_60; pos 1030756 to 1032701 reverse strand)
catatcttcaagcgcgatccttctgccactgccaggtttgtccttaattattgtagattcttctgctacgatttcagaatcaatttttatatgatctgatctcagccgttgatcagtcatactttttttttacttaaaaaaaaaaaaacattgtttaggcttttgagaatcattcatcgctcactcatccaatttacgtctttagatagtagatattgctagtgtttgtggatggagttttggacggtagcccttctgccattgtgtatttttgtgccgtacgcaggttgctgctgctgttgttgttggtttgtaaaaacgacagactagcacacccaatagtaatatgacatttgtccattttgggtattttggtgatttactcattcgtttctctcttttgacaaactgaaaaaagcccaaatttaattttctgtttttataaagtaagcgaccaatatgctgggactattttttttttttataacttaccgagggtttcttgactttcttctagattttggactagaaatctttgatctagatgctacgtgatttttcagaaagatccaagttttgggtcaatttgaaaaaatctaagttttgaatcaattttctaatttatttttgtgctgactaattgtgatctcaccttccgactatacaatagactaaatgtaaaagatttagctactaatttttatgattacaataaatgaactcgtaaacttgattcaatgttaaattctcatgtaaatgagaaaaatatctgaattttatatcatttggaaagaaaagaatggaagatgatgtgtaataaaaaaactgttaattgataatcgggagatggaacaaagtatgtagggtcggttgtgagtccttatctggttcagtcatatgctgatcacgtgaaaaacacgcttattgggtttgggcattgagaattgagaattgagaattaagaaatgagaagaatttaccgaaacagatcagctcccaactcaattccacgtggtctgcacccaaaccgatgctactctttctaatttaatgtcagtgctctctggggaatttacaaagttgcccccgtaagtgtacaatcttctaggttatgacatgttaaggtgatatgttcgactaatcaaattctgcttagtggagtaggtaggctaggtaaatttttatttttttattttgtcgacctattgttttaatgtttatgggacctaagaaattaaaaatggaatttttttttataaagtctgcagctttgtcaattaatagagtttaattcacttgacataacaccttaacaagttcagtccacacaaatttttatcataaaatatgggtgtaaattattttcataaacttttattggtgtttaaagaattagaggtaagtttattttggtttgtataaaatttataatgtaatttgaaatgtgcttggtcataattaattttttatgcttttgtggaattagatgaattttttttgaagtctttccacttctaataaattctttgagtttaaatatttatacaaatatatttatgattatctctttttaaacataggtgagatactttctgaactacttagtatgcatcattattcataagcaaaaatattttcagatgctttcataaaatgtttgattgatttatagaaataactgtgactaattgatttcttagccatgtatccatagtaataggatttgtgggatatttatttagatttaatatttgactagttaaggtttcacactattaatgccccatttgccaaatatctaatctcaacttgtttgattgccaatgcttttaatcttgggcatcataatttattttgtgagaattattacaattgactataaaatctttttagacttgataatttatggtgatttttctgcaggagatttgggcacacatcagcat

SEQ ID NO: 9584 - DNA, 2060 bp, Citrus clementina
  Intron number 2 from transcript clementine0.9_017024m (loc us clementine0.9_017024m.g) derived from phytozome v7.0 (c hr-ID scaffold_2; pos 6723426 to 6725485)
ttgcggcagattgaggcaattgatactcacagcgggtatgcatgctgtccttttttctaaataaaaaaaaaagaaagaaattatcactgtccttttctgctttagtttattttttactaaatgatgtcaactttagaatttctttcactccatttatcctttctggtggaattcattgtaaaagtaggggggttcaaagatcttttacagtggcttacctttcgtttgtagactttgtgccttttccttttcaacattactgtcatcttcttgttattctcttaattgtattttgctttggcagtaagttaccattaattagtatacaaaattgctccaatctatcatttctatatgaccaaatcctgaaatttttgggaatctggtaactattgcaattctgctctgtctttttctatccctaagtcagtttccaagttcttaaattagcgaaacagatgtatgtctttttcctttttttctttttgtttggctcgggcatgcataccatttagtatcttctatttatgaatgtactttctaagatttccttctcatatatatataactcatggcttttatgcatcatcgacagtggcggatttagaaaaataatttaccgggggctagattacatattagtaaaattttaaaactagaactttgaatgtataaaatacttgttaatacatttatgactgttgtcgacgtattttcaagaatagaaaaatgtttgcggtgatgacctgtcattatttttaattatagtgtgggcttttataattctaaatgttaaagtttaaattttgtgaatttataaatttatagagtcaattttaatagatttaatgggggctaattagaaatcttaaatattttttcttttattcttagaattttttgtttttagctagtgggggttgtactggtcacatggtgcatccgccgcttattcatcgatatatgaattgttgcataagaattattttcaagacactgtaagctattactgtagtatgttgcttgttggatgcttttttctgttgaagtgcgttaacattttgattcttgggtatcatgtttagtttgatgccctttaataatagtcctctactgcattgttttctgctccatggctaagttgttccaatcaccaatgaatgggcaatgaccctataaatatggcaaaactattggccagaatgacttaataaaggaagttatttttaatagataatcagaggttacttaatagaggctaatggtgcatagtgaaatcttcagtaattacgtggcctttggtcgagcatagaataaaactgaaatgtataaaggtatctgagagattctaaccacgaagattgcattgcatggatggtatcttattttaatctggaattggtacgggtgaaagcaattagcctgggtagatataattctttttgaggattttttgtttttcatttaagactactattaaaataatttctttaaactttgatggcattgcttttatattttcacaacgaggacaaaactttgtagtatttatatatttgagtagatgagaagttgagattgcaactgttatggatggactctaagtttcaaccaccaaattttcaagttaaagaaatatagggaagagaatgacgaggaacaagattgctttaaattgtagttatgagcgtcatggagagggggaagttgagagttattattgatgataaactttcgaggatatggtaaaatgcctgaaggcacggtgttgcatgttcacagcaacattttctgcattcatattttttatatgaatgacctatttgtatttgataattgctctgagtcgttggattttattagtttgactgtatggttgagagtggaatcgcaatgagaaattatgtatttttttggaaattttctctgatttctgtttttatctttgatggcttctcacagctggcagttttagtattaaagagccatatttttttgtctttacgtgctgatttttgtagatgtaaagcatgtgctagttagtttctccttttgcaggt

SEQ ID NO: 9585 - DNA, 467 bp, Citrus clementina
  Intron number 5 from transcript clementine0.9_007772m (loc us clementine0.9_007772m.g) derived from phytozome v7.0 (c hr-ID scaffold_7; pos 4985153 to 4985619)
aggagtcacttgaggtcattcttaaaggtttgtagattaattctgctaagttcatgttgccataatgtttttttaatgcagataagcatgaaatatatagtttttatgctaataagatgactatatatcgtaggactgaatgcacagcatgtttaattctctatttctcttcattttaacatcttttctttttgtgaaaggttcattttaacatcttagtctgcaattacagagaaaaattaagtggacatatttagatatgacattgaaaacttataatttgtatatctgtaaacagtgcccattgacatggatgattcctgactcttacatggggtgttgtgctcatgaaaatttacatgtgattttgtagtttactataatgcatgtgctctttcttctctttctataaattcttgaaataattattgttgaatttgataggttcccacaatattggaattgca

SEQ ID NO: 9586 - DNA, 2846 bp, Citrus clementina
  Intron number 2 from transcript clementine0.9_021769m (loc us clementine0.9_019040m.g) derived from phytozome v7.0 (c hr-ID scaffold_67; pos 874231 to 877076)
atctggctgaagctttggagcaagtaagtcgctacattttcatttacttttgatgtttttcaatctgtaacccacaaaaacatttgaattgaaattatcttggaaatttctcctcaaggctaaaatatgatatgaggagttacttgaatttgtgaatattttgtaatttagagaatagtttacaaatgggaaagatgttgcaaaattcaatggggataaaggttgctgtagattattatatttgttaattgaaagatcatctaaagagttttaaagtccattgatctcgtctcatgatactaagtggtattttgcattgtacttattgaagcaatttaatgtctataggcttaatagaaatgcatttaaggagagttcttatgaaataatctttgccatctatctcccccaactctagtaaaggaaatgtatcaatcggcaaggtctgaatattggtctgaatattttttttcaattgttttgtgtggttcttgctgcataattaaggaaaaaagctgtttcagatcattgttaaaggagatgataagtgtgtcaaaagtttaggtgcagacagcaaaccacaagattttttgagctgataatagtatcttagtttgcaagagaaaacaacctgtatgtaataaaaatgcaccagggtacgtatagcaatacggctgttgtccagtttgacaggagaacctatataatgtggcataacaaatcattttctgaagcaggtgagggggaagccagactcttttcatttgttagaaaaagtagaaaataaaccttgggggccccagatactagagcttagttctatgaggccaactggactgacagttacctttgtcctccactaaatggtatttctaaagcagagtgaacacataatcccatcattgcagaagggtctctatctctatgtattgttaattcattctaccaacttaagtaaaattcttatgattcaggtaagagtttacctgggactgacccctaggtgtccaacacaggaaataagtttgaggaactcttctcaatgattcatacccctttttatgtcatctaaggtgcttattggtctactctgtctggggttatactaggccattctgtcccagatggatacattaaaaatcacaatctttgttaatgaagttcattcctcaaagacatggcaagccgtgtcttggcgcctgacgggcaaagcctcttgggaatttgacacatctattttctaaagaaattgtagtgtttattgtctcaaagaattgacatgtggcatttggtacaaacaatacataggtaaatagtcacaagcaagctagtgtatggatctaggtgaaccagcacagaggtgttggaagggaatgctcagggtaatttttttttattctgcactaggttttgtgttatattatctcctctcctatgttcagtaggagtatccaagcttttatatagcaatgcggtcaagtgttaaaagacactacagtctaatgtttgagccttaaagcttaaaagtctactgatagcctcaaatcacttgcaagattgatgatgatttaatcatttgtctaccaggtgaatgaaggaaaggtcccaaaaaatcgtgttgcgctgcgaatgctggccgaggaaatggtccaatggcctaatttagaggtataaacatactttgagagcattatacttgttcatgttgagatgtgtgatatttgcatgtgcacatacattgaaacagggcaactagtgttgattagtgtacacttttctctaggttgaatttaccgtttcggtctgaaatttcttcccatttatgcatggcttgaggcagaatggcctttccactgtcagctttgtacagattccctatcttttatatgatgtattgttgataatttctgagtggtttcatagattttactttgcagggtctattttgtaacattttatctattgtaaattgcttagtacacgatggaaacttaggaatgtctactggcttgtagtatttcctaaatattcttaatcttgtggtagatattaaactatacagcaaccagtttgcttttctttattttcaaattagtattaactgtttctttatagaagcaccttgaaaaagaaatgtgaggaccccattaaagacttctcatagatgaaaactttgcttgagcaacaaaacaagagtattttctgtattttgatggatctaaaagttgtatgctgaagaccagtaaagtctatatggattatgtttcctccatatcttgctcatactagaattttagatgcttctttccttggattttgggcatttcaaatgcaattttcgctctttcttcatcacattatacttaggaaactctcctttaaagatcatgttcagcttaccattttctagatttcatatggagttccttaatgaaaagggagcctctcattacatggtaggtcaaattaagctgaattttacagatggatccaaacattatagtgtctataagctgtaaacttttcatctcaatcaattttacctatctttttggtaaaaactttcctaagcttaatacaagcttcctgaacataatttgatgccgttttgaaagaaaatttcttaaaatttaatttaatagctttatgctacatttttcttttccaaatttcctttaacttctgtatctgtgtagctcttcttcaggacacgacactgttaagcatatgaattaccgatattagctaatttccatgctaatttattgatattagctctgtttttcttttttctttttattttttgaataggtggaagcaacaaagcagaagcctagcaaatcctt

SEQ ID NO: 9587 - DNA, 1724 bp, Citrus clementina
  Intron number 2 from transcript clementine0.9_005385m (loc us clementine0.9_005385m.g) derived from phytozome v7.0 (c hr-ID scaffold_78; pos 1041078 to 1042801 reverse strand)
tctggtgcagtacggataaacctatctggaattctgtgagtactctgtctcaaatcttaatttgcagtttatgcagtgacttgggtagaatagtttgactttgtctcatcttttgaagccaagtgaatgcatgatttaatttgaatgcaagtgtgcagctgttcttgtggttattttttcctatttggtatatagctatatctattaattacatctcgttaatattttggcatataattttgcatgtggtggatattttcatctaccaacaaacttctccaataagaacttttaaaaattttaatatcattgaggaaaacccttaactccaatttttatactgctaataaaatgtttggaaaatatgacacttttgtaaacttgttttattttatttttttaagtttttggtataagaaaggagtcttttcccttaagttatatggttttgtctagtttcttatcttgcaaatgcatgatttttctcttgccatactatcctcgacattgctaaacacagcacctttcgcagcattttggctttctttcctttaccaaaagtgtacaaattctgcttaagaaaatctttcgtaagatcttaaaacagcctagcaaattttggcttccttacaaatagtaactctcataaaaagattaaatatggcaatgcatgaaaatatgagccgtgtctcatcattttcctacaaattacatacaaacatggaaaaagactttatcttgggtggcgtggtaagtaggcttataagcactttggctccgtctccttacaagccagtttttaaagctgagttctaccttgtgtctgcgtaacaattggtataaaagcacgcaccaccttgagtgttggattggacatgccatgccaagttgggtgtggctttgtgactgttgttgtggataggctgacttggggagggctgctacctagaagaagacaaggtctgcaaagtcacccagctaggtatgcgtgatgggctgctgtgggcgtcggttgtgaaccgtggtggaattttaggatcctatctcctatattgctaagttaaggcttgggaattgagcttataagcacttggccttcctctccttacaagccagtttttaaggataagttttacgcaatgtgtttctttgcaattaattggctgtcttatccctgaataggatcttaaaacattgaagatttggagagcctttgggcttccatcacattgacttggtgttagatctcattggaattctcacaacttgcaaaataagaaataccagaattcttgaaacctcagtcctttaatcttttgtgctaatcatgtacatgggctaaacagctaccacatcaactcatttgttgcattgtgcttttggatctcttttttcaagttaatttatgttgcattcttgcagatgatggtcaaaacattattcttcttttattactttctttgtataaactgcattttaaatactgctcgagtatccctattgtatgcagctatactgcctgtactatgtcgttctgaagatgctatacttattaaatttgatttcatgttttctggattctttatgctaaattgaaagttgattttatcgacatgcacatgtactgtcaagttgcaggttctgtatcttactgattgaatgaacactatgtgaatctagaattatgctttaactacaggaaaagaaacttctcttggaaagga

SEQ ID NO: 9588 - DNA, 1554 bp, Citrus clementina
  Intron number 2 from transcript clementine0.9_008617m (loc us clementine0.9_004240m.g) derived from phytozome v7.0 (c hr-ID scaffold_20; pos 3746778 to 3748331)
tacaaaccaacaaaggtgttgatattcgtccagtggtagggttctctctctcccttctctctcctttttacagtcacacatacaatcaagaggccttggtttttgtgtaaattagtacacaacttttagcccattggattacactttatatggcttggttgtatcttatatgtgcattaaattacagatgttggattcaatcccaactgtcaaaactgcattgatccaagggtttagaagttgtgtaatattttgtttaaaagatgtgatgccgtgaatcccgtgtttgtgtctattctatatatgtataatgacttcatcaaagttaggctcatggcaatattgagatcaatttctaccaaaatgaatctataaattatatttaagatctgacttcatcatacttgcaggattttatatttgcacaaagataattgtcacacctaaaacatagttgtcttttgtagttatgctagttaaggttttttggcacttcatcaaagtcaagctcctagaaatattgagatctcttgcccatcaaatttatttatataattaaattcaagatttttctaatttttctataatcagcatatcatacttgcaacatgtttggtttgaagaaagataattttttgcacctaaaacatagaagttgaggtaggacaaaattctttcaatggtttactaaggattttgattgcactcactggacaaaatatcgaggaaatcctgacaaagtcttgaaaaagagtctagaagaacttctgtacaaccattcatactctttagacatttcttttacaggatttggtattctttgcctttagatcgattggaatctcattttaagatcattagtctacctagttcctgaaattgggtctattttaaggatttttgattagaaacttccctcactttagcccagaatatgcatagaaagacaattaatttaatatttttaactgacttggcagtagaaacacatagacgggggtgctcatctactagagttgagatagtacaccatacattaaaatgttatttggggtcttcttcctagatgcataagaaacctcaaatgtacgtctggatttactggagaaaaactacttctatggggcatgaaattaaaggacctgaattttattatttctttgttagtagtctatcttctaagtggtgcttaaatattacagggttttgcatcactgtgcctgtttcctccactagttaatgacccagccccttagttttattgctcaaggatttttcttttgactcttaaggcctacaaaatgcttctgacaaaaatctctgatgcaagaatatgctgtatagtgaccatcttctacggtaaaacaaaatgactactggattggataattcatctggatgtttagtctactgaatgatcaaataacactgtttctcagattttttatttaccatgtataattatgatttattgaggattcatattttccattcaagtatgcttttgtacttagtattttaaaatactaatatgagtatctgttttaaagggat

SEQ ID NO: 9589 - DNA, 672 bp, Citrus clementina
  Intron number 6 from transcript clementine0.9_001079m (loc us clementine0.9_001079m.g) derived from phytozome v7.0 (c hr-ID scaffold_7; pos 2480861 to 2481532)
aaggcttttatcaggttggttggttcttctttttcccttttcctaagtagtcccctcaaattattagttgtttttgttgtgcaacagtaatggacatatttattgatttgtggctgttatattctttgaaaaataatgttgaaataatgaaaataaccagattgttggagtaataaaaattcactttctctggaaagtaatgccgacatgatgttttctttttagaataaccaaatcagctctttaagcttggcagcaactaataattgatctaaagagtcatacactgaagaacgatacccaaaataccggtctttgaaacatttatgggtaaaagaagccaatctagtaaatactcagctgagtgaccccaatgagttatgatcaagatttggttagtttagctgactccaccaaataggtgactgatataatgactgcatcatttggatgatgacgtttacagagcccgactttgtagttctgtacaaacaacaccctagactgctaatatcatgttattccagtcatatataaccactttggaagagattgtcagccgagtttaactattaaaccttgattattacattttattactcctggaattccgtcctaggttcaaatgcatgagtttatgctaagtgagtttttaacacctatctcaggtac

SEQ ID NO: 9590 - DNA, 1100 bp, Citrus clementina
  Intron number 16 from transcript clementine0.9_027815m (lo cus clementine0.9_027815m.g) derived from phytozome v7.0 ( chr-ID scaffold_78; pos 518255 to 519354)
ccataccaggtaagacaagacgatgtaattgcatgtaaggttttttattcattgtttctcttttcttcttcttttctataaatatgaagtaaagtatactttcaaatcctggaactagagaatagctgtatttcatgggaaaggaattttggatctgttgagctaaagtttaaaaaagaaaaaggaaagaaaaaccagtagtggtaatatgctgtcccataacttgatgttatttgggcataaaggccatcacatctcgagtggcttgtttggaatacatatgtgtgtatggcataaaacaagatgcttaatgatttttcaatggtatgctttttactcttttcacagggttctgtgctgaatcttctagctttagattggaccaatctgcaccttggatcggtttgatttctaattatgactagaggacatggatcaaaccaatgcatgcatagtaaaattaaaaacggatttttttttcaccctttctgcatcgataccctcattaaaatttatagaatcatagcattgctagtatacctatggtagggaatgctgtagaccccaaaattctaatgataggcgaccacaataaatgctcatctctaggctgtttaccattgctagggaatgaatgctttatttgtagttatatcaaatgaatacatgttttaggggacctcctttgaatcttatggttcaatgttttctttggtatgctatggttggtgtagccaactctctcacaatttctgctttatctcaagataccatttttcaacatccaacttctcatttctatgtttttgttcgctaaatagaaattgtttcaacatcctagttttcatatttacgtaaatacaaaatattggatgtttttgtgataggaaagttctagttttttgcttggtggaaatctggtccacttcacattattgatcggtcatctttaataaaattttgagtttcttatcagaaaataatgatgatgatgatgatgataaaatccaatttatcttatttaggtttttcactaaattaacaagtcttttacattttgtcaagattgagtctatatctggaacattggtactgcgttg

SEQ ID NO: 9591 - DNA, 2594 bp, Citrus clementina
  Intron number 2 from transcript clementine0.9_002326m (loc us clementine0.9_002326m.g) derived from phytozome v7.0 (c hr-ID scaffold_7; pos 1687127 to 1689720 reverse strand)
agctcattgttcttaacattggcaaggagaaaaaggtcagtttcaattttttgcgttcgcatgaatttgtctgttctcttggaagcaattttttggcttatctcttttcttgttccttggaccttcattttagtatggagtagttgggtcaaaggtaatgaatgggttgatttgactatgattggaaagctaatcaagtgccaaacgaaagaaactacttaaatttctaaggtaactataggagataatagaccatctaatttaattataagttcttatacttttcgtcgagcaatgaactgcacgcaaaggttgtctcattttcgaaagaaattaaaataagaaaggtcgagtcgatcagttgagcaattgagtcggaggaaccgcttttcgccagacttgactttgtcaaattacaagtcatatttggctgtccggaattcatgcacgtgaaagacttaagtaggaggggtaagagggggtgtactgcgtacacctgtgacccacccgttgaataagcaaaatgttattcaaacactaagaaaacagtgtcataataaaaagttaaaaacgatagaattgtagtataaatagcatttgtcatttttgttatgttatattaatattgtaacatgaacagaatcacattttctgtcttggtggtgtcttagttgtgtttaaatattagtgatcattcaacaaaataaaaaaaaaaaacaattggaatacaagttgctaataaaaaaatattaaaacagattcattttaggaattgacttaataaaaaagacttgttttatgttttcttttttggtcaaacagtttgtctaaatttttggttgaatatcaccttttacgaaatcttaacatatatttattttaaaattcaataatagtgatgataattaaaaaaaactacatatggttaattttaaatgtacggttctattgagatagcttcacattcacatatatatagcaaatgagatattcacatacaaatattgattagtgatttaactttatactaattctttaggttcttcttcctctcgtaaacatctccaatttctatggcttgtgttgaaacaatgatgggtcattgattgtctaatatagcaagaggataaaagtatatgactgattgtagcttacgtttgtcttgttggggatcacttggaatgtcttgttttttaattaatattgtctctttgtgacaattgcttgaaaattaggaaaatcaataataaggtatcgaaattaacagacggtttagcgggaaaaaaaaataaaaagtgaaaatgaatggaaattttaaattttggataacttaagtcgtatacatataattaacttgtggatgagattattcttaatttacatatttataagtttatctatgaacttaattttatcgaaagtgaaaatttgaattttgaaagtaaaataatttggagtcggcttaattgtagctagtccataacttgtcattatatttaaaaattaagtctaacatcttgcaaattatagccacaaaattattgccatatgtaccaattttagcttttctttttactttctactagacagcactagctctagtttctctgctttttacacaccgacttggacacttacgaaatgtctgcatatatacccttttgattagaaaaaatgtcgagtattcccaaactattatttcttttccattcactcttttgcgactattatgtttcaactaactatgacagtatacatacattgacagacattacaagcaatgaatggaaagtctaagacctttgcctttgattttctttcaagacaaccccacgtgttgcaatcccaaagacccaggactctgtgacctgagtttatgttgtcctgtttgaccattattatcttaccgcccttcgttcttctttaaaaagtgtaccaataggaacaaaaagttggtttacgataacatataggaaattgtcagccggcttgactaatcaaaactttatttaaatatgtctagatagctcggtttctttcgaattgtaaaagcataatgctaaaattgcttctcactatgactttcgtatgatttatcgttggcttgatttaattatttcatacctcacctcaccagaaaccgtccagatccttcctttgaattaagtggcattgctacctttaaatttagctgatataagttaagaatatttctatgacttggatacataattaatcaacatggctcagtaagtgatgagaagcaccgaagcatccactagcaagtggaatagatagatactagtactcaaattaagggtaactacaccatagttttaattattgtgatataaaaattaaactaaaataatacaaggatctagaattttttatacaacctataattaaagattgttagataagaatataaaaataattcacttaaatttgatcatacattattgtatatgcacacgtaacaaagaataaaaaatgataataatacattaagattatgtgagtgaattttatggactgaagtaatatactgacatttcttttcctgcaaaatattgtgcgacaggtgctaaacg

SEQ ID NO: 9592 - DNA, 4143 bp, Citrus clementina
  Intron number 9 from transcript clementine0.9_002130m (loc us clementine0.9_002130m.g) derived from phytozome v7.0 (c hr-ID scaffold_30; pos 140710 to 144852 reverse strand)
ttagctgagcgcttgtatactcaaggattcatcaggttttccctatatcttctccctttactattttttttttttatctgtggtaaattgattagtatatttagtcaccactgagtgtagattctgtgtttataatcacaaggttcaactttattgaattgaaattgaagtgttgttaaatctggacattcggtgactgaaagcctctcttacttgtaaattcttatgctgtttttggggctagttaaaaaagaaagagatatcttcgaattcagcaattatagaagcccatagggaagccagaacttcactttgtcctataggtgccaggatcctcccccaacttcattatcaagattctctggcttctttcattccacaagaccgaaataatagccaagattgcacaatcccatagaacccttacctttcctctcccttgtaaagcaagaaaatcttgctaataagaggcaataacaagatatcttggtattatttgggaagcctctgtatcctaggagggaatgcattcttagtgagctgtgttggtcttggtttttgggctaatttttatctacttagttttttgagtgttttgtttatgatggcccatcattgatgggacttctcgtccttgtttttgtggatttgtagtcccaccaattcttgtacatatctcatattcctggtacatatctcaaatagttccgtttcttagcaaaaacgaggtaaagttgtttaccaaatgtaggtaatttttttttttcaagcaatgtgattaagtaggtagatatacgaccatgcttctatgccttctccttttttttttcctggtcatgtatccaacaccgtgtcttagaagaacaaggcttttaataattttgcatatgtatttgtttgttatagtttgtctgaccaaagtcacgcttggtcatggctattttaaactagaggggtactatgatgaaagactagtcatatcgttgctagtcccagattaaaatccacgtaaccggaattgctttttatgtatcatttgcttcaacaagaaatcataaataatttgtggctaacgatataatacttaaattcatgttaatgctttctaattataatttttttcccttaaaaaaaaagattattatttttctaattttcgccaaaggataacctagttggattaactcttgcaatggaagcaagaggtgatggtttaagtccatgagaataccttttttggggttagggagtagtgggatgctgtaagtacaaaaattaaaataaaattataattttaggttattattatttgactgctttaagaattacaagaaacatcaaatggctacaagaagtattaatatctaccattttacgattatatctttacaaaacctatcaatttactacattgctgttagcaccattagttgaccagttagttactagtaaaatactgaatttgccctttaatgaaatttttatcacaagaaggaataacatacaaagcaatacaatgttataaattcaaaatataaactaacggaaaaataatccttaacagtcttatggatttaatatttgacacctaatttttgtacttttctttcaaggataaaattggtatggttaattacctactcaactaatggaggtaacggagatttagtgaaatgaaagttttaaaaaaatatagtagtaaaataatagacgtcaataccttttgtagtcatttgatgttttgcaattcccgaagtagtcaaactataataacattataattgttgtaattatttttaatttgagctcttaaagccctgccattcaaggcattgggccatcagatgtcaataatttattggacaaaagctgcataatttttgtaattcctgaagtagtcaaactataataacattataatttttgtaattatttttaatttgagcacttgaaagcctgcaatccaaggcattgggccatcagatgtcaataatttgttatgaaagacattaaatgcagatgaatatgctgtttgaccttggattgagaagaattgccaatccctaagctgcctctgtttatgttctttctctttgttttctctcttttcaaaatttcgtttgaaattatggaaagaattgagaagatgatgagagactttctttggaaaaggttatgaaaatggcaatggatctcatcttatgaagtgggataaagttgcaaaggcctaaaactagaggcactttaggaactggcaatgcagaaaagaaaaatagagctttcttagcaaactggctttggaggtttcccttggagaggacctctctttcacactcggttatcgcagcaagtatggaattcatccaaatggacaggatgcaaacatggttagaaatgggtccaatagaatcccctcgaaagctatatctaaagagtaccccacttttcttagttttgttgcctatgaagtgggtaatgggaaggctattcgtttttgggaggataattggtgggatgatggtttgttgtgtgagaattcccccacttgtacaggttatgcctttctagaaatatctcaaatttctctagcatggctttctctccaccctttatgaattggaattggaagttcaattttaaaagaaatttgaatgatagagagggtaaagaacttgcaacgctaatgtcaagtattgaaaatctcaatattgatgaattggaggaagacaagaggaaatggaagtcggaagcctctggacaatatacttgcaatccctattttgagaagttgtgcaacgatgattctgctggagagtttctacccttcaaaatgatttggaaggctagcatcccacctaaaattcaagtcttcttgtgggccttggcacaaggaaaattaaattctggagaagtgatgcaagaaagcttcctaatttttgtctctctccttggtgtgtgatgtgtaagagaagtgcagaaacttcaaatcatctttttcttcaaagaagctaattttttgtcagtcattccgggttcttgcgattctcttcttatagagaatcttttgcttttggtagaggaaaaaaggcttaaaactctttggaaatgtacagaggcagcactgttttgggtattatgggagaaaagaaatgttcacatttttaggggaaaagtgtagataatgctgaaaaactatgggatagagttcgttttcttgctttactttgggcttcagtttctaaggggtttcaacattcatcatttttcttcataaatctaaactgggatggggttttgagatagggagttataactaattctaatatttagagaggtgatttggtatacttttgtataacacaaatagtgctagtctttgttttctgagtggacagctggtccactatctgtttttacatcttctttattaataaatttttcagtttcttataaaaaagaatatgctgtttgaccacccttggtgcttctcaaaaaaaaaaaaaaaaaagtgctcttagtgaaatttctgtactgaattattttcggtgctttattaacaattctgtttttggcactttgttcatttgataacttgcaactattaacacttgatattataaacttaaaaagattctgcaatgcgcaacttaacatgatatgtagaatacaatctactttttaatcttctttaaagtgtacaacataacagtctgtacattatcttaatttgcttaataaaaaataaaataaacctactgtatctactgtaaatactgctacagaatttagatatttttgcttaaaatataaggactgggttactggaggtttgattgtacgcgtcatgcatatgattttttccctgaacaagaatactatgacaattgtggaatccaataattttatgacaagttaatatgaagttatctgattgagctaaccttattttgtccgtcacttatcttgcaacttctataaccttgtatgttccttatgaatgaatcagtctcttgtttgattgatgaagatttcagttttaaccatctccttcttaacaaagaaaatggtggaatttaataactattggtattttgtgtgcctcttttagctatccacgtacagaaagcacggcatacccttctt

SEQ ID NO: 9593 - DNA, 1719 bp, Citrus clementina
  Intron number 2 from transcript clementine0.9_026513m (loc us clementine0.9_026513m.g) derived from phytozome v7.0 (c hr-ID scaffold_1; pos 12683249 to 12684967 reverse strand)
acagtgaagcaacttgaagattgctcagtttccaagtcagtgatatttcaagaaaccttttaatctgtctttctatttcaatggagtcgaatctgcaattgttcttctatatgttggtgaagactgaagctattttcttaattggattatagtatttgtgtatttgaaagttttgcttgaactgtatgcatttacagtaagttccatctttgtgattcttggagtcttatgctaccctctggttttgtgaaattcttgggggaaaaaaatacagacaaagggtatgtaacagtagcctgcttatttatatgttcatttggactgattggcaattcaaatgttctttaatgaattcttagtgccaccgtgttctttgttagagttgagttgttagaagtaattagttagtttttattgaaacaaggaactgacaataatatttttcattgtttttttgaattcttgatttatctaacttgtgtgatattcgactgacacaagacagtcctcaacgacgcagcgagtgctttttttttccattgtatgatattataatttggttggcataccaacaactctattttcctgatgctgtgttggttgccttttgtgttgtcaattagtagttagtgttatttattcaatttcttgataattctctacattccagaggtctcaaatgatgagttttctcttggaacttttaaaagtgcacacaatttgtttttcatattgataataggtaaactatgaatactttgcacgctttcatagtaactagcacccaaggatgagggtgcttgaatccacatcactgggtgagacaaggttgttggctttatctgtagaacccgtgctcgaacagtttactgcctttaagggatccaaaagtaaaccaggctaaggcttagctcaaagcagacaatatcatactacatgggagtgggccagcacatccattgccgattatgcattttggattctgatactaagtaaataactcagatatctaagatacgaccattatattggtatcttttgcaataacatggatagcgaatgatatgtaatattctaagctatgtgtggtagtatccagacaagtcaactaatatgagggttggatgtttttgactcagcattatttggagaatgttgatgcagtgctccacacatatcttgatcacttaacctcagtgatgtttaccgttactgaaatgtttcttcattttgatgattcaatgcgtgctagtgattatggtgatttttgtgctctgaaaatgtacttctcttttcaattgcttggcttgtattgttattgatccataatatccctagctggcacaagctgtaaaacagaaatgagaataattcaaatctttgctatgaaatactagaattgtatatgaattgaagttgctattgcaacattgaaagctagcatgattttcattttgagctcgtatgtcagagttagtaacgaagcatgtatatatacataaaataccaaagggtcacaagtttatgttgctcagcatacttcaatagagcgtcaacatgtctcatttttcattcatatctcgcaaaattctcttacccatggtagaattgatatccaagttattttaaagtttatggcctttttattgatccaaatttatgttgtgtttcacaatcgagtgttctttggatgttgaatgtctgcagtgcattggggac

SEQ ID NO: 9594 - DNA, 630 bp, Citrus clementina
  Intron number 5 from transcript clementine0.9_002354m (loc us clementine0.9_002354m.g) derived from phytozome v7.0 (c hr-ID scaffold_2; pos 5960515 to 5961144)
gcataacttatagagagtgggcgccaggagctaaggtttgttttgattttatgtttttaaggtcttaattgtttggcgtaattaactctcaacaagggtggtattctttagactgcatctctccatgcagttataggtttacattggattctgaccatctagatctcagtacatttattttgagaacatttttttttttcaccatgacattgtcctctaattaatgtagattactttgatatattgatacctgagaacgggagaacgaggtcaaggctctttaactttgtttttttgtagaaatgttggattataaatatgatgatttcagtattctgaccacaaaatgagatgacatgctgcaaatatgttttgtctttgtcacgttggaatttaaccaatttgatactttttctagcaaaagttagtgataagttgagcgttaatctggtcttgaataataaaaatgtcccttcccttacctttatgtttcccctaaaagttggtcatattgaatgaaacttttggtagatgtgtaaaacttctttgttttcgttttccttaatatatagtgatagcttactttatctttcagtcagcttctctgattggagacttcaataattggaa

SEQ ID NO: 9595 - DNA, 1205 bp, Citrus clementina
  Intron number 1 from transcript clementine0.9_010285m (loc us clementine0.9_010285m.g) derived from phytozome v7.0 (c hr-ID scaffold_15; pos 3450696 to 3451900 reverse strand)
tagaaaggaagctgagaattgtgattgcttgcagggtaaattaaacgaaacatacctccgcttttgatttttatttttgcttatggttttgattgattgatttgatttggagttgatttttcgttttaggttatttttgttcttcgattatagctttaaattctaatttgttatattatttaccgttctttcatttgatatatttactgttcttgcatttgactttccacaagtcgccattttgaagctatgtatgtatgtttaggctggactggaaattgtttgtcaaatgttttggtcgatgggcaaaggctagcctgagatggtttatactttataagtcttatgttcacagaatcagtttcttaaatcttgattatttatttttctggctttgtataaacaatgaaatcacaatcgtccacattctttctttttgcctgtttcgcgactttagaggttgtttgtttttatgtctgaagtcttaatttggcttaatttaagttctttagatattttaacttttgtttgtgtatctgaaagcttattgcaattttatttgaatggaaaaagttcaatttcctgactttttatctgaatagaaatttttttttctcacaaataccctcactaaatgtatttgtttcctgcacaactattaaatgttatattagaatttctcttgatctcaaattttactcggtattaactacttaacatacattcaatttgaattttaagcaaattcttttattattagataacaattcttttatatataaatattatggtaaactgtaaaatataatgttatcaaaattatttttggaaattatatatcaaatgtttaccttataaatatttataataaataaaaactattgtaccatataacatcttaaatatatacatattaacttcaagtatgtataacactttcaaggtcataagtgtacaattattagattcaagatgttttgagtttataaaaacaaacaacttatcctttacactaagacgataagatataaaaaacaaacacattattctgacatatgcatttttttttgctaagaaacaaagattaaatataactataagaaatatgcatttagacccattcagtaacatttagacccatttagattttagattaataaacaaccgctaccttactcgataaatttttttataggatttcaagt

SEQ ID NO: 9596 - DNA, 1126 bp, Citrus clementina
  Intron number 6 from transcript clementine0.9_011052m (loc us clementine0.9_011052m.g) derived from phytozome v7.0 (c hr-ID scaffold_23; pos 1586592 to 1587717 reverse strand)
atcagcttgtcaaaattgccaaggtaatgacaattctggatttttcaaattgatttaaaacttataggcgtaaaggttcacttgttcatggctgtgaaataatatagaccttcatcatttttatcttttatattgatgttaataccttaaaaactatttataatcatgtattcgtgttgtgagtagcaaatcattttctggtgctaatttttttttcttttgtttgttttgattatgttcatttggggaaaagaggcaaatcatacaaattttggtatttttcaaccaattctgcatactgatgcaattcataattgtaactccatcatgtgaatttattttttcttttttcttttttttacatcaactcaaaatccctatgcattcagtcttggactaattccattatcactctttacaatgcttttgatatgatctatcaaatggttaattgtcatgttttgcatctagattaattatctaattttagtacaaatttgtggtagattcaagtctggattgcttcaaatactgtaaacattttaaatatattgaagtacatgattcttgttttcaagaatgagacagatgtgagatgtgaactacaagaatgatgaccctgagcaaaaacaacagatatattaatatataacatgcattgatcacaagcaggatttctactaaagtttgattgctataaaagaacaagctcttaaagcttgacaggttctaatgatgttttggagatttactcctttaaaactcagctcttccaaggatattgcaagacattctgaattagcatgctgagatattaggcacccaagttactgcctagtactgcgggtattaattctgttattgcctatttggtttgggagccccaaatcccgatgccaacagtcgagtgagtactggcttgatgacagttatcagaatctattgctgtctcattacgttctaaattcacaaaagctgctcactcatcactttgactgtaggcatccatattgctcatgcatttcaaaggttcataattggtttgtgcgttgaagtttgactagtaaatttgatgccacaggactgctgtttgattatttggtgtaattccaggtactgggaactg

SEQ ID NO: 9597 - DNA, 2729 bp, Citrus clementina
  Intron number 7 from transcript clementine0.9_028767m (loc us clementine0.9_028767m.g) derived from phytozome v7.0 (c hr-ID scaffold_32; pos 2101933 to 2104661 reverse strand)
gatcctggtataattcatcacagaggcgtgccccatttaatcctatcaaatgtatgcgccgctcaagattgtaagattctactgactacttttacttgaggatagaatctactgaatcgtatcttgtacgaggctctttgcttaacacagtgctcgcctggcatcagcccaagggaacatgaatttccgcgaagaattaaaaaagaaaaaaggaaaaatggagacatgggcatttgaaatgttatgtaaacggagttgataatctggcgtttttgtaagacaataaggagaatgccatgttttgggcttgtggcctggcctctattctgagttctgacaaactgtacattgacggttacatgtatgaaaaggctctagcttaatgtagggtttgtcgggatgatttgtattgaaaataaggggaggatctggatgtaaatccacttaattttccaaaatgaagaacctcaatactttacgatattttcacattggcatttcaatgtttccgtcattttttaaaacgctttttgttgctcgtgcatgataattcaacatgcagcatcttctccattaacttgttaacgttaaaaaagggaaaaaaacccttctcatttttagggtttcatgcaataattcatttcatccttattttttaaacaatagctcaaaacatctttctgttaactcaccgttagttgaatgtcgtttgttaataattcattaagggtaaaaataaattttcatcaaagagaaaattagaaaaataaataaaagttgacatataactaaaaataattttatctaatccaactaaataggaaatactgaaaaagataaaaaatttatatttcaagcaattcttttttcacttctttctattttagcggcataaaactatataaaccctaaatctaagtaccaaaaatatcataattttcttattcatataagtatactctctaattacactgtaaaattgtttgaattgagttggagataaagaagatattcagcacatgcaagcacataaaaattggtggtattttgagtttttcttccaatatttaaagaataaagatattgtgttaattacaatttgttccttatagcaattaggctccgtttggtacaacttattaaatagagcttatagcagtagagcttataccaatagagcttttggacaaaaaaccattgggtgtttggttgtcaattaaaaaaatacttttgaaccattaaactgtttggttgtgtaaaactaaaagtgtttttgtgtaattaaattaccaaaaatgatatatattcataattatataacatgtaacaaaatgcatctaagctatcaattaaaaagaaaaaaatcagtttaatcatttttttaattttcaaaattaaaaattgcataattgatatattctcctaaacaaataatactatccaaattaaaatgataatcaataatataactgaaatgttaacggaacatgaagtgtcgcattacctagcatcctcctcactaaaaacgttggttatgactatgattgctctctcaagtattggttatgtatagggattgcaaaattaaagtgttggttatttaaaaaaaaaagagagataaagtgaagtggcggcaacaatatttttaaatggcggtaatagttttcgtaaggtatattttatacaaagggtattatgtaattaataaaatatgtcaaggatatttttaatattatataattttttggaaaagctctctaacctctactcccaaaaactcaaattttggacttttgctagtagaggtaaattagcttatttaagttaaaaaaaactctactaaaaaaataaccaaacaccataaaaatttttaaaaagtgctcatggaagtaaataagcacttatggcttttaaataagtcataccaaacatgcacttattcaatgactatatcaaactatattatcgtggattttatttaaaaaaagtttataaattttgcatactttgtagtgttatttaattatgtaaaaaatatattttaatatagtttgtatcactttaataaaaaaatcttattttgtccttaattaattattagttaacggctttttactaacggtgagttaacgaaaagatattttaagttattatttgaaaaatatggatgaaatgagctattacattaaactttaagggtgaaaataatttttcccgttaaaaaataccgagtttgttcattattgtaagatggaggaatttgaagtcatcttcgagggtaaacaaaagtgagggctgtgcaagtgtacacttgaaaataatatccatatcggcatccacatccacatcccatttaattaatgaatagagtttccaccgtttatttttcatagagagttgcaattattaaacatgaattgaacatatattctacagaatatcatacgatatatcctgcgcatggatggataatatagaaattcccaataaaatatgccatcattcatattgtattgtaatttttaagataaattctatgttatatgaaatgtaacatacacactttataacaatcatataaattatatggacttattatttatgtggttgttgtgaagtgtgtacgttacatttaatgtcagataagggctcccaatttctattctaattgtgttgacattttgttttagccgattgattcgactttgtgtttgggacagggagaaagt

SEQ ID NO: 9598 - DNA, 1023 bp, Citrus clementina
  Intron number 1 from transcript clementine0.9_033575m (loc us clementine0.9_033575m.g) derived from phytozome v7.0 (c hr-ID scaffold_5; pos 6939036 to 6940058 reverse strand)
ggaatattactaatcaagtggaggtatcgatctgcttaatttcttaagtcttattgagtggtctctctctctctctatatatatagatatatatgagtaattaaaccacgtaattttatatagcattgaaaactcatctatttatgaaactacatagtttagtaatgtgtctactaaaaataaaagaacgcacgcacctaaatttttgtattacaaaaatttaattttgaatgtttaatcctagattctgagtaaagtaatgttaatttaaaagggtagtataataattaggccggcaaattctgtttggcgccggcgacatcaagttttatccttttagtcttgtttgagcttaatgtagctccactgcagattaattaatttttttaaccaaaatagtattcagtttgacaagttgcctataaaatacattaacatgcccagataatcggcataaaagaacacattgaatgtatgcaatccatttttaacttagtgtagaagtagaaaatatactcaattttattacaatagccgcccacccattcatatcacgaatcttttagataaacttcttaaagaattagaaatcttagtatattgccatatgtgatttgatcgaaattttgatttgatttagtagatatatgaaactatcatattagacaatcgaattgggatgccctgcacatggcatatctcttgggaggtttgaagctcagactgatggatgtattcaatactcttccgcgaatttttcaggttgtgattaaaaattcacaataagtctctaaaatgaaaattaaaaaaaaaaaaaaaacacacacacacacacacaaattgaatcagatttagtagtttttgcatactgctaaaagaattagaatgagtttacattgttcataatcagataatcagtttacagtgttataaaactataatattattcgatttcttctatatgtaactctctgcaatgattttgcagaacattttgttgtgtgcccggggaagtctcaagaa

SEQ ID NO: 9599 - DNA, 4062 bp, Citrus clementina
  Intron number 1 from transcript clementine0.9_015521m (loc us clementine0.9_015521m.g) derived from phytozome v7.0 (c hr-ID scaffold_159; pos 31807 to 35868)
gacctcgttgtcccagctttgaagaagtctcttaggtagtactggtcctcattttttttaaataagttatatgatttaatagtttgtgccgacacattattaaattatataacgttataataaatgatttaattttttaactttatttacttaaaacattaataagactattcagcacactaattttaaatgatttaacatgtacttacaacaatataattaagttaagttgtaaaaacattatttaatatagttttaattattaattttttagtcatttatgttcaatattgaatttcacacctaaaataacttggaatgagaatataataaaaaaattatattccatagatactaccaaaaaaaaaaaaagaaaaagaaagaagtcatagagatgaagaagatgagaagaagggatgaagcagaaaaaagagaagaggaagacgtaaagacgaagaatatgaggagaatggcgaaagccaaaaagaaagtttgttcacagtacttttttattttattttttaaaaataaaatttattacacatactgtgcaattaatttttttaaaaaattggtttccttattattcatctaaatgttaattatgatatggaaaataaaagttttagggtttaaagtatgataattaaaaataaataatgagttatatgtatgttcaaaataattatataatattgacttataataaattgtccttaatagtaattcatagtatgggtatttttgtaatatatatttttattaaaattagagtgtccaaagtaattttttgagtgcaaataaccccactctatagtaaattaaacattgaataacatgtccgtataaaaaaaaataagaacacctgtacttaaaaatttatatacgactaaatgttcgtttagtctttatattttgatttaaatatccgtttagtctttatattttaaaaaatatctcaacatactcttgtaattaaatatgttatatttttattttttatttttcccctttaaatactatcttttgtatttttaaccgttatttttttcttttaaataatatccttgtaacaatattcttgacattaattaatttatctataacaaaattaatttacaaattaactaataattatttattagtaaattaattaataattatcattacaaaagaactattatttttgtacttgtgcaacaatcttactaataattatttataaattaattaatattagccaacttgaaaccatgcttaatatctttacaataatcttactaataattattttataaaaatttagtttaccaagttaagcctaaatgtaaaataataatataaaatttatgtaattttttatattcttttttaggttagtttgataaattatctttttcaattaatatcccctagagtgatattacaagggtatcattgtaaaatgaaaggaaaagcaagggtaggatgtaatatatttaataaatggagtgttgttttaatgcgaatacgctgttaagctatgtggattaatagaattgattttcaagatactataaaaccatgtagtttaatagtattaaaaaataactctattaagccgtatggtataatagcatgtccacgtgaaaaaaaaatgagggtacctgtattaaagaaggacaatttatatttattacttaaaaatcaaatcacataactatggctagaattatatcatggaacaaaaataacacaaattcaatgaaatgttggaaagaaagtacaattaataatgcattgggcatgctttttttttttggaggaaaataataacatgtattactgaggtcaagaaagacctataagacgtcattatataggtgcaaatacaaggtcaggcttaagtacaatatataagacaatacctaaaacttaaactaaagtaagggagtacctaactataaagtaattaagaactataaattctaaactaaaaagagactaatggtgtgtttacttcttggaataaagaatgagaatggaggaatgagaattaaagctatatttacttgacaaaattgaatttgagaatgggaataaattgtgtgggtcccacacaatttgggaataaaaaatgggaatctcatttctatggggggttggcaatgaaaatgtgggaatgaaaatgaaacataaatttacttttctatccttctaattttttcatatttcctaaattatccttgttcaaatcacaaataattttattattttaaatgtcattaataataataataataatgattattattaaattttattaactttattattttagttattattaattatttttatttttattaacttttaatttcattcgttatttaagtctttggctttgtaaatttaattgaaatcagtgctccaatgagttgaagaatttaacttgctttctctcatgaacataattgaaaatgtcttatatgttgaagttgtgactctttaaaaaaaaaaaaaaaatccttttcatccttagggtttggtataatatctcatttcatacttattttttaaacaatagcccgtttcatctttatttttcaaacaatagcccaaaatatccttttatgtatttacaattagtttactctataatctattgcgagcaaaatagaatttttagttaaataaatgcaaactattttaaaataaaaatctcaagaataattaaataacatctaacttttttgtataaatttaaaatttaaggataacttaataaaataaaaaatacatacacacacacacacacacacacaaacacatataatcattttcaagtgcgagtgccctcttttttttttagtgcggacatgatgttaaaccatatggattttaaataccctataaagtcgtggggtaacaggcttgaaaactaacgtattaaatctcgttgcttaaaaatgtgtctgcataaaaaaataaaatgaaggtgttcgtattaaagaaggaatatatatgtgtgtgtatgtgtgcgcgcgcgtatgtgtatatacgcatatgtgtgtgctcattaatttttttttttaatgaagtcaactaaattttttaatataacaacaacaacaaacaaaaataatgacaataattttccaagaatcactattcatattgaggtcaaatataagctaaaagattaaaaaaaatactctaatgcaatgtatcttattttgtagtatttttaaatatgtgttttcatgtctttagtgtgtatttttttaaataaataaagaagtttgtgcttacttttggtagaataacaatacttattgattatttatttatttgtttatttttttcatattaaaatcaaggataagctaaaggattaaaaaaaaaatactctaatgcttgtgaaatcttttttttttttggtcctaaatatatattttacatattgcttagtgttattattgtttatttattaagttatccttaaattttaaatttatgcagaaaagtagaatttttttttaaaattgtgtttgagagtttattttaaaataatttatcattatttggaaattctgttttgtctttaatgaattatatagttactggcagtaaattaagggaagaacgttttaggctattatttaaaaaatagagatgaaatgagttattatttaaataaaaatgatgaaatgacctattatatcaaatcttaaggatggagagggcatttttcttctttataatgaattcattcttaataattactcaagcaaactagatttatggttttgtccttcttggttcaattatgaagattgggaaagaaaattgattttttttcctcccgatatgtaggtctcaaaatgcttatcttgttttcttttttttcattcgaacatattaacgttcaagatggattaaaagagatgaacagaacaccaataatatatatatatatattttttccgttttgaatactatacatgagttctaattaattaagggtagcttattgatgtgtatatatttatattatacccacacgcatgcaggacccttcag

SEQ ID NO: 9600 - DNA, 4966 bp, Citrus clementina
  Intron number 3 from transcript clementine0.9_024623m (loc us clementine0.9_023912m.g) derived from phytozome v7.0 (c hr-ID scaffold_32; pos 81548 to 86513 reverse strand)
ggctggaagatcgtgggagtaagtttctgttgctgtactctgttttcatttgctaatacttcatttaccataccatgtaaattgaattgtttaactacaataagacaattgcagctgggtacctttgctcgacattattatttctctgtttggaagattaggtttcaaacacccttttgttaaagtggatttgttcatgatttgcaatagacttgttaggctattgtgatttgcagtcaagatttggaagtatgtctgtcatatgctttcgaagaaatcaatcactgtagcaattaattcttaccattttaggctattaagtgaatcctactatgctttttgttaactggaaattcaattgcatcttttcatattgccatattcattcagttaagatcattttcaggaaaacactttcaggagtgttaattaatcttgtggataatttatgagagaagctgacaaattctgaatacagcaaaagtaaaagagcactaaatctatgaatggcctttcaatttcaagataattcaaaagctaatttcaatggagtggtctatttctatttgatatataccttttgcagacaagtttctgtgtattacttactcatcaaaattaaaattgaaaatttttgggcataatatgcgtagattacaaataattatgtgttaatcatgcaagtaatctgggttatattaagttcctcatgtatatgtaaaacataagaaataaaatgcaaaaagttatataaatttcaaccatacgtctattcaatatacataattgggtaagtctcagattactccacccctatgaattgattatctttatattacctctttacatttgaaaatttcaaattaccttaaaataacttactttaacaattgaccgtagttgatttgctaaagaacaaaaatgtctcctttttaacaatttttttgttaattatcgatttttaagcagccatgggtttggtatccatggccacggctttgattgcctttgagttcttagaattttcttgaccatgacaatcaactataatcgataactattcagagcattttcaaatatggaattttgacttcaaaactaatcaagttattgcaaaacttgtttagattttaattagattttagttttactttagtttttatttacggattgttgatttaaaattatttatcaacaaaaattttgggagagagaatgttgcggttgtgctgtatttatatatagaagagagtgagttttattagatgaaggtgaatgaacattaacaaatgaattttgatttttttgaaattaactgaaaattaatttaatttatgttgaagtatctttgttctccaaaatataagtaaggagtattagtcattttgtctaataataaatataaaagagtgaaaaaaaaatagaaaagtttgttttctttcaattaattgaatgtttcaaattttttaaatactatttatccttttaatcattaaaattaatgggaaataataagatttagggagtaactttaagttttaaaaaataaagaaataatttgaagatagttaattcatgagtggaataatctaaaatttatcctaaataattcaaaattatggctaatatgcgaggaacgatcggtgtagcaagagtcaattagatagcaattctatatatacctttctcgaattatattactagtcattttcattccattaatttcatgattacatgatttgggatccccttttttcaatctcatttgtataactgtcttaagtggccagaactttaacaaggcaacaagcaaactaaaataataataaaataaaataaaataaaataaaataaaaaattgaagccatcttatatttgtaaattttcattcaatttcattcagcaacaaacaccttgaacattaattgctaaggctgaaaccagccggatgaaatgtgacattaacatcaattctacaacatcggctacattgataatatctgctacactcaatgggcagagactggaattttatgaagcttgtagtcaactgtaactagctgagtggaatcgccattgtcgtcgccgtcgtgttgttctttagaaataataacatttgagttaataagttagagcagtgcatgttgcagctcttgtccatcataccattcatgtatgtctgcctttatgagcttatgattttggcatatcaaatcccagactgggaaattctttcttggcatgatatagtcagtctgtttgagcttcaaactagggcaaaaatcgccggttccatctccaaaatcgcttatgattttggcaatagcaccactcattaaaaattattaataacatcaacaataaagttgccttgtataatatcagtaacttaatataactagtaaaaattattaataacatcaacatccccccaactaccattatctttcttctctctcacttccatcgtttgtctcacaaccgtcttcgttgcccattagcaactctttgccgtgttcttacaaccgttgtcgtgggccattagcaattccttccggttttctcacagcccgtcgccgtgcaacgtcatatctttgtcgtctcatcattctgtcgcagagttacttcttacttattgtacgcagaggttgaaggatttaagatgtgtttttgagtttttgagctctctctctctctctctctctctcaataggttttaaagttgattttttcacttatgtgatatctagtgatttaagttgaaggtatagctcttagggattgagattgttactttgtttaattttaaatgctttcaatgctgttgtttctgtttactgtagcttttttttttaattacactgtacgtgtagcctaatccaagagacatgagggaaaaaataatataaataatcttacctctactaatacttgggtttggtgtgtttccaggttacatttaatccacctgcaatgtgcttcattgcaatttattcttctcaaaacatgcaatgcatattaatgaaattcaaaatgtaatgttatatgtggaaactttgcttattcttcccaaatacaaaactattcctcgaagtttcaatggaagacttggtgatagtataattttctcttgttagacaatttgatttatatgtttctctattaaatatataaatgtaattataatgtctgtaaatgtaaagaataaaaacatggaataaatttatcttcattaatgctgcttgattaatcaattatctatttttttcagattaactcatccttgcagatatctaagtcttcaagcaagagttcaaatttaaaaaaaaaaacaaaattcaagatgagaatgagtctcttgtctatcatgaagttgaagatgattcatctaaattctaaaattcgttttaaaaaatatcgattattgtaattacaagaaaattttatttaaagttttgtgtggttatatttaatttgggatgtaaaaagaattaaatttaggctgaaaattttgagtaattaaaaaggggaaaaattgaaccgatatgaaccgaaccgtattaatttgattcggttcggtctccaactcggtttgtgtttggttttagttttaaaaaaccgattggttttcagaaccgactcgaaccgagttaggccctgccctataaaaatcaaagattcaaatgacattttcttctccaattctccatccagacaccgcgaaagccatgggagtcgagcgcttttctctgaaaatttccgctcaacttcgaagagttgcgagaatggaaccaggttttgaggatacggaattcccgtactggctgaaggtaataagtttactatcttccttagggatttcttttttttttaatttttttttcagttcaagtgcaccgcagaggctgccgtttggagcacagcaaatggatccctcttttcgttggatccaaggttgcacttcaggtataatagatatatttctttcggatgttatttttacgagttttgtgtacacacttcagatctggtgtctattatcatagaaactcgttgttgaaatgcacttcagatctgggcagtaccactgctagtcaattcaaattccattcacgtaatacttaatctttcttaaatgctactacgaaaaactaagccccgagaacaaaaactattagttgtagcaatctatacctaatcatgtttgtgcgcggcgtgcacatcagccactgtttgattgatttagatgcattaatagttctctaatgactggtttatggaaacacaattggcagcagcagcaatagctgatgctttaaaacaagtaattgagatcttctaggagcattattattagagcattgaattgtcatcgacaagaattccattcttaaagaaattgacacattcatgcatatcacacaagcaagcattttccgaccatattggttggtacaaattaacccaggtcttgggagtcaattatgcatccttcaattcaaatgtgaaattgagctagctaatttgtcaacaatttaggctgcaattaaggtaccaatttcaagtatctaatagcaattcctgcctatgcttttggttctgtttattgttgatggctgcttgtgtcttattaatgtatgtgcaatccttcttagtcataacatattttgttgtttgcttatgatatgattcaattttatgtacaatagtgtaatgactgctctcggagagggactctaggcctggcctctggatgctttggcgtgccttatgttggaggtgagtcaccactagctgttgtggtgtgctgtcgagccaatagcctatcagtttgacatgggctggaagatcgtgggagtaagtttctgttgctgtactctgttttcatttgctaatacttcatttaccataccatgtaaattgaattgtttaactagtgcccccccccccccccccccacagacca

SEQ ID NO: 9601 - DNA, 1421 bp, Citrus clementina
  Intron number 1 from transcript clementine0.9_015837m (loc us clementine0.9_015837m.g) derived from phytozome v7.0 (c hr-ID scaffold_19; pos 3132173 to 3133593 reverse strand)
gcgccggtaagcttattgctgtatgattcttttttattttgatcagatctgtttatgttggctaagctgtgatttagttgcattttaactctgttaaactgcttatgagctcaactaatgaagttttctttagcttttgtgtaattttctcggatctgttttttctactacgtttgtgcttagatctgaccctgcatttatttattggtgattcttatccttaataatgatggttaggttgattctgctttctaataatcaggaattgagttgattgatgtagattatagaattggagtcagcttatttaagcaattgaattggttgttgtttttgtccatttcttgtcgggcttagtttatttttatgtttgatcagatctaccattctgatttagatctttgccttgtttctagtttcatactgtcctaaatatgtttgctaagatgtaatttaaagaatttaatcagaatttgacttatgtactttatggaagtagtttaattttgttttgtttgatctctctagggttttgtgggtgactatagttagatgtattagacttctgttgaataattcaaatatggagtatgtattaacttttttattgcagttgctttgaagtatttatttcgtaatttgtaagttttggatttaatcaattgcttctatttatagaaatacataaatgggcttcattgactcatccaggttgttggttgttttattagaacatagatgactttcacctcttggtagattttaatgtttatttaatagggatcgacttattttactaggtttaatatagctgcagccactaatcaatcgtcatagttatgcttgctggggttatgataatggaaggtttgaacaaggagccctgtaaagctggtgttccaatctgataatggtcattatttcactcaattagaatggtccttgatatttatctttcaaggatgtcttgaattaaatgtatgcagcatgcaagggtagaatcacactggcaagaaaccaaatagtaaatatgaatagttttctcctctggagcttaattcattttcaaaagatgatggaaggcttcctccgcatggatttgttgtactgcctgtagggttttaaaggaaagtttggttttaaattttttattggagaccccaattttaatgaggactccaataaagacaattattctgtggaattgagagcccaaattctttatacctgtgcagtacataatggtttgtttagcatgaaatctctctttgttgtcctaatttgtctcgacgtggagattttttgttccttttggatttctttatacaaactgaaaactattgtttcttctagagagatattgagatttatctgctcatgatatttattttgtttactgtggcttactttgtgtagtcaaa

SEQ ID NO: 9602 - DNA, 2329 bp, Citrus clementina
  Intron number 2 from transcript clementine0.9_004048m (loc us clementine0.9_004048m.g) derived from phytozome v7.0 (c hr-ID scaffold_16; pos 3494071 to 3496399)
cccatctactgcaaggtaactggatttatagcgacatctatgtgtctatgtctctacttgcgtgtgatcacattaatgatgcatgattgttgaattgggttttgaatattttgataatttcctgtctagctttcggtgaaattcactagattatctttcttcccccccccccccccccccaaaaaaaaaaagagggtagagttgatgatatatttggtagtatgataatctttggaaagtttgttcttgtcaaacaaatcaaggaggggggaaaatatcatttcaagtgtatgtgagatcatttgatggaaatggttaacatctttggcttccctttacagatagtgagatatctggatgaggttgaaggttgattgtattatagtacttcgtattgtagcgttgtgccatttccatgagtcaaaccccttcccaaccccttttctaatttttaaattcttggtctgcttttcatttagttaactgatttagttatggtgcatgcaaatttgtctttatggatgtgctggtgccttttgcagctctgttgaaagttaatttgctctatattatgcagtaatgcttctatatctcatgcaggcagctggtttaaaatatgcattatttaaaatgttctgatgttttgtagttttgtagtttgtcaagagtgttagcatgcctgtaagtttgtatgttaatatataatatgagcatgtattcatttcttgagaccattatggctttttctgctggctattaaaattgtgtaattaacattttcttgttaaaacaattgtggggtcttttattctctttaatctttgacatgactttttaaagaaaatgtatgataaatatttaatatgactgtagtttctctttgacttgttgaattttttctagataagtaatttatttaatataactgtagttcattactgctcgcatttgatgggggaagaagttttggaggtttatttgatgttatggcatgttgacgtaacggtttaagtagaacttgcactagtataatatatagttccaattttctccttgtgtcccttagattcttaggagtgtatttattggtacaaatcctctagcattgacaactgtttttgtcttacaaatatcgtgaggtggtggattatggtagatataataggattctgtgtttagtttattgatggtgttcatccttccaaataaatatatcttttgacttgtaggtaaagtgggcgtgttctataatgatctctgaattaaggggaagtaaaggtagtttcatctcctatattatacgatttgctgctgctttttgtatatataggatcaatattttaattacggtaaaattgagcgtaatgtctttgactttaatatgattgtgatgctatgttcatgttaatattttctattttttgatgaataaatttgttgggctttgatatgttcagtttcttttacagatcttatttacatctttgcacttattctttgttattcaatattatttgtccgtttgaataagtttgcttttcaagctgaaaacctgattctttgttattcacacatcctgtggatgtgtaaatattgctattagatatatctgctaaatgaatgattgacctttttttttagttaaatgaaaaattaggttattgtaaccaacaatttgtgtagtatgtgtaataaagagttaataaacaaaaattagaactgcagctgccccataggagtttggatttcctcattttgaccttatctaaaactttaagccactactgttcgggcagatggtaatcaattaatcatgaatgagttggagggtacatatttgcatttccctcctgatgtcattttgtaggttattgagggatcacatgcctgtaactctgtcattatgttcaatgaagttagctttgtcttgggcagctgtaattgggttttttattgtgcctcctttggatttgtagttacaattaggtagtatagtgataacttttgtaaaccttacattaggctggaaaggaacgggggtctattatgttttagtggttaagatatctcaatccttcagatttgtataaacttaaatatgacttatgatatattaggtggagaagctcttttaagttttattagtatcctttctgcttttgataggctcttgaatttatatagggtgtaaccctgttagcagtttcctgcctttctttgttgtttgtgtttatattattttattttcctgtttacctctttctcaattctctctcttttgcattttggaacagagggaatttaagccttacaatcttgccaacatccg

SEQ ID NO: 9603 - DNA, 1240 bp, Citrus clementina
  Intron number 1 from transcript clementine0.9_018482m (loc us clementine0.9_018482m.g) derived from phytozome v7.0 (c hr-ID scaffold_22; pos 1982819 to 1984058)
tcaagagcctctgctttatcaaattttagttcaaggtaatttctttacacgatggcttgatctcgatttctttatataagtagtgttgttaagctggcttcggcatttcattcggtggatatgacaacaaaaattagcaaacccaggagctttttggctccctcgcctggttattgttgttgtagttttttttttggctctaaaatggtctttttcactaagcaatattgttattggtcaagaattctgaggttttcatcctactccatttactggaaaaatgttgtagcattttgcctctatttttgggactatttcttttatcaaaatttatcagtgtcttgcccaaaagagaaaaaaattatcagtatctattaccttcgattaagttcatgaataaacaattattgatttatggagtatgaccgatcactctggtgattaacttcttttttcttaatcaattgaaagatttgagaatttaagggccttgtaattgattttagctcaatcatgaattctgcggacaagattttttttttaagaaggaatgtagaggatcatctgtaagaagggagttccgagatatggtctatctttcaattttgtcacctttttttttctggtgctaaatttatttaatgctgttagctccgttgcttcgtgctagtatgtaggcagtttgttaaatcactgtacaatattaattttttctcagagtggagacccttctctcacactatccattgtggatacagcatgtttggttgctgaccttctcaactagcatgtgtaaaactgcttaatgaaacgttgggtgcattatctactaatcttatgtttatgttgtgttgaagcgcatccttgattgcatttactacttccacactttaggaccctagtgagtctaccatttacccatcatttttgcctccaaatgattggaaagttcatctcaacaagagcataggaactgttcccaattcgttattagtctatgttgaggtatgggacgaatataattatattcccttaaaaggaacaaaatttataaaaaaagggtttacatttggaatgtaaatatcataatgacagcattctaactgaagaaattttgcagggttgcttctgttatctaaatttttttttcttttgggggtgctctttccactttgcacttattatgctcacattttttcttgcgttctcctttcagtggtctttcatctaggtttaggca

SEQ ID NO: 9604 - DNA, 2119 bp, Citrus clementina
  Intron number 11 from transcript clementine0.9_009905m (lo cus clementine0.9_004323m.g) derived from phytozome v7.0 ( chr-ID scaffold_17; pos 2553754 to 2555872 reverse strand)
ttcttccagttttggtgagtaaacacgctcattatcttttgtgaacgttaatttatttcacttaattaagcataaattatcaaagttaattaatctaagtttaaccaaaacaatggtagttctcttttgaatattttgcttcaaaataaggttttagagtttgctaagggtatgtacaattattaagaattaattgatcttgtcgatttagcatatcctgatattctttgagtatcgcaattattgttttcctattaaggaaaaagataacaaacttatgagattacaagtatctgaaaaatgagtgatgattatgtaatttatggataaatgaaaaattgaaataaaaaaaaatcatcagaaatattgaggatgaacttgattcgctggtggttttcactttcttaaaggggtccgtcctccatacgcttggataaatcaaatttctagaattccgttcgcgaaaacgaaattgtcagtgggaccatttttgcataaattgaatttttgaaattgcatctcttaatttttaactaaaatttggcgaaattaattaaccacaaaatacccacctgttctgtttatgaaattttattttttatatttgtagctttgctcattttatacagatcaggacatacccctctttctttagtaaatttcaaatggaaatttatgaaaattatctaattaaataaatttaacccatctaaataaaccttaaaagaacaaaaaaaggtcactctatttcatatcctgccccttaacaagcaaatggggagctttattcataagagtaatgacatacaagatttcccgtaatattattcttattacattagagtcaatttggtaatactatagtttttaaaataatttttattagttgtgctataaaaataataactgtaaagagaatcagtcaaatgtttagtaaaatttattttaaaaaatataacgtttagtaaaatttatttttaaaaaataaaaatactttaaatttaaaaaattttaaatttaaaaactatcttatatttttggtaaattttattactaaattactatgaaaatataaataattgaatgtatataacattaagtaaaatttattaaacactgaaattaacattaagcaaactatgatatctattcaaactaggatatctattctttgtgtgggtttttatgagcgttataagttattgctattggttatgactgtataggtgattattatgaaatttaagtgggtgggttgttgtttaacatttgttttgtttcattatgcttactatttaataactgtaacatttgtaatggatgatttttgcttaatgaggttgtatatgcttgttttgtgggtataattttacatgtacatctataacttgttcacaaaatttattgtttttttttcttgtttgttataatgagagaaacagctagtctcttaagaggtttgttattgagattacatttctttggaatgaaaaaaaaaaaaaaaggcaatagagaatgacagtgaagtacatcaggtgtgacagtggtttaataagaagaagcacacataaattgacttctaatggagttgctaccactaaatttgatgaatatggtagaaagagattacttgatgatgacattcagattattaccatagaagcaccacaactatctgcactagcacctgcaaagaagagtggcagaaacattaattgtgttctaagagaggaaaaggcaagacacatacccctaccatagaacctgaacttgaacctgtcgttctgtaatcgcctgaatctgatcctatatataaaactggagctgaagttgtagctgatcttaaactattgacaacacatgatgtttaactactgataactctatgaaatgatagttatcatgacacttttaaatttaaatcaatattacgtagagagtaaatgatgtgtttttattctattttagttacatttagtatgaacattcattttaatttatttttaataaattgagtttgttttagattactttgtacttagatttgttttagattattttatacttagattatgtgcataattgtaggtgaccgaaaaactcaagttttaaagaagaa

SEQ ID NO: 9605 - DNA, 2703 bp, Citrus clementina
  Intron number 3 from transcript clementine0.9_030589m (loc us clementine0.9_030589m.g) derived from phytozome v7.0 (c hr-ID scaffold_8; pos 5814389 to 5817091 reverse strand)
tttgactagttgtggttttaagtccagtcttcgaggtaagaattttatgagcatcaccatttttgtttttgtctcttgactacgattggcatacaccttatcaccaaccaaaaaaatttactaaaaaagtttgttaaaagtttgttaaacatttgtaatctattagttttacagctatagagaagtcaatgcagaagagaaagatcttttagataatgtattagaacttaacaatcgttagtaacattgcatgttcttgacattcttgacttttttgacttgttcaaatgctgttacttgggattccggttctgttagatccgcagtcctgtgaatattggtagaactttgatgagtatctagaaaaatcgcttactaatagcatcttgcggcttttaattgttgtttatccatatgattcatgtagtagtccctagcagaggagaacagtccactggtggatattgtcactgtagacatgtttatggtccataaacttgcatgtgtgcatctttttgaacatatatgctgctgagctctaaaatgtctgcttccaaagtatggttctcaggatgctgtcttttaccttttaattctctggtgactattgtgtaaaacagttattttgagtttcattcgtcaaagtattggacttcatgttaatctttgttcatgttgtaaatgcgaggatagccaatttcaggaagtttaagtggtataggttatgaagcttccacttgtaggagatggaaaaatgataggcaaattgtcaattttttaatgtacaacagtacacaatttgtttgtcatatcatgtgtatatcagatcaaagaacaagtttgttgtttttttttttcctccaaatttttgggtatctttatcaacttatgcattagagcagctctatctgtgacttagagtagatgtaacatagttaaatatacagagggtttcatgtgacttatgtgaagcttggtcggtaactggcaggtgagggagctattgaatgagatatttcaccataataatgcaaaagataattttagggagaaatcatagttctttgtggtatgtctgtaatttattgagtttaattgcaaaagattgttgcaaatgtcattccagtatttgagatgtcgaaagataggctgcagagtcattattaattctacaatttctccctttaataggtgagttgcagcagctacttggggtggattgttggaatggaagtctggtgctaaggagccatttgctttctagaatttattctcctcaatccaagtttagcaaatttttaagtgattggcaggaactcaaattttttattcttgaaaagttgattgtagattatttttgagagttgatactactctcatcttgtatttttcattgggaaagttgatattggtttatatgaatatgatcatcataacatatctagtatattttcatccttttgaagtttgtgctctgcccttctccagaggttttgtataagcttttccgtttggtgaaaatcgtctttgtcattttatgcctgtgtagttcttttccttccgtaataattgtagaggtactaagtgttgtagtctttagaaaaccactaaaaatttgagctacgtgaaagctttctttcaactgaacatgctatcactattatagattggatgttcaggaaaagttttcctggttgaaatttattatgcaattgataattctaatctttcttcaattgtagatgtcataaagttgtctaatttttgaacttttgagcctggcttggaaattcatttattttcattatgatttggttataaatttcattgcatttctatgctcgcacttgtttccttttcaattctttattttttatttttttaactctcttccgccttttttttagatcataccttttaggataaatctgagaaatacgactttatgtatttcaaaaaattgttagtaagtctgatttctggccaaacaaattaatatattgaaaaatgaaagtaatataactgaaccttcagtagctaataaaattttattcttgtatattatcaaataaaataaagaaatatttcttgaatttgagagcacattcattgtaaatgttaatggtatttttgttggttacaggacattcattgtggcaagaaatgatttatgtctttgtggagctagaataggttttcattgtgggtgattttgcattagaagttctgttcacctcttgttaatcttggttatgcccatgttcatggctgtttctttgattatggcagggtgataaccaattcattcgatttcctgatgttttggattgtttgtctcctttctgttttggtgtaccctagtattaaagcagttgcgtgtaattcttagccagaatttggacattattgcaccttcctaatgccatacaatatccataaatgggttctggtacctgggtggaaagttttgcgttgaaccaaagtattatttattttattgtatgtttaatatcctgaactggttttaacttcactaatgtgtttcgaatttgaaagtgactgtattcttatatggatttataccgtaaaacctttttcttcttgtaataaccattgtagctgggtttagtttattaagtgtttgcacttctatttacccatctgagtaactgctcaattgcttctcttctcctttcgacagat

SEQ ID NO: 9606 - DNA, 2506 bp, Citrus clementina; identical to SEQ ID NO: 9481
  Intron number 1 from transcript clementine0.9_016608m (loc us clementine0.9_010469m.g) derived from phytozome v7.0 (c hr-ID scaffold_6; pos 3502833 to 3505338)

SEQ ID NO: 9607 - DNA, 752 bp, Citrus clementina
  Intron number 2 from transcript clementine0.9_029417m (loc us clementine0.9_029417m.g) derived from phytozome v7.0 (c hr-ID scaffold_25; pos 1230019 to 1230770)
cgctggggaattgcgtcttcacaaaggtttctttattgtgcttgatggttgcatttttccttttaatttggttgtttgttaaaagatattctggattcgaactttgtgtgtttgtgagttcagtccttgctaagcttgatctgcagttttagaaatcaatcttgtgatggcatttccatagaacaaggagcaatgtatatggtggaggatatggattgaaactctacaatgattttatattaacaaaaatcttcctctgattacttttcatgttaaaaggacttttaagtttggtctaggatcatattagaatatgtaaccaatacattatgaataggtttaaaagacctctaagagctcatagttttttttggtttcaaatctatatacaccataactgggtttcctaactgatagaccagatttattgcaagagcataaatattctgttggtagtgttgcatttttcaacctctctaaacttgtatagggatttaagtccaatgatgatatggtcataaacacagtcgtttttaattttttttttttttcagatacctatattcttcattttttaggctgggaactggatttatataataaattggaaagatggaaacgggtcaacaaattgtcttgattttgtctgccaatttttatcctttttcttgataaattataagtcttacatcaatcttggaatttcacttttcgcagatatcactgagctgaacctacccgaagcttgcaaa

SEQ ID NO: 9608 - DNA, 1863 bp, Citrus clementina
  Intron number 1 from transcript clementine0.9_024497m (loc us clementine0.9_024497m.g) derived from phytozome v7.0 (c hr-ID scaffold_27; pos 1629781 to 1631643)
tccacccactctttcttcaattttacagctttctggtatttttcttttgcctttgctctacatttttatgggcaatgttcttttattagattggttttgggatttagctgatttttattgatttgcaatgtccatagtcttgcaatgagctctgtttcttggaaaaagagaagctgaaagatcaatgtgttggtataattatttaattacttgcttatgttgatgctatttagtttgataatactcgttgagatagaaccttgtatatagctttttaaatggaccgtaaaccatttataacattactaaattgagtacagtttagtgtgaattgagctgaatatttcttagatttttttttttatttcttcgcttgcaaatgtgggggcttcttttttcctatcaaagaacttctccacattcacctttgcctccttcattgagtggttgaatcagttgtatagccatatatttttcctttcgtttgatttatggccatagggagtaagagtacgatttaattatgagaaaaagatcttttcatttttgcttcctttatgatgatgaatttaaatcaagcattaatttgcaattacaaaggatagaatgtcctgttttacattatttggcattcttatcatttgtcaagttgttccacattggctataaaaggatactcaggtttttacatttaggatgggttatatcatctaaaaggctagcctttttggttggatacctcgatatcctagacttgccccccagcgtcaatatcaaccatgggttggttcattgtgcttatagtgctgtgcaagaactgaaatgccttttgggtaaataaatatgcgttttggtattgattctgtttctatctcagagcaatgaaacatggaatctatttatgctataatttgttagttagaatttttgtcgttcaggttttgtgctgtatcaaaaagaaatatacctaagcctcttattatgcaaactttctagtgactcgagtatggcagagtttgcagtaagcaaggtattctcttgtgaacatactggcggcgtctgtgttaaatgaaatttccagtcctgagagactattttaggcatcgtagattgtaattatgagagcattgtcattcttgttacagtttttgagtttattagatgatcatacaactcagcatatattgtgatgatcctaggtggtactgtctggagctttgagcatgaggtttgagccatctgatagtgatctctgtgttaaatgtaaattgtggaaggtacaattaattagaatgctaggatttgaaagcatccaatttatgtggttgaaactttgctgggctgagttgatccatataaaagggctttttaatttgtgacttcacatcatctaggtgactcttattggacgtctattggatgatgtttcatggagcacttagagtaccttatcctgatttttagtggcccaatatctaggtcttgttgtggtgctctatcttgtgcttccggtgcttccagttgtatcttttgtagttactgttgttacctctgcttccttttttttttaaaacattttctttgccatgtgtttataaacttatcatcagctggaaaataggaaaattgaaaattataggcattcgagcttcttggttaagttggaccattgttttatggactcgatgttggtatcaatacatatttaggggaggtactttaaacacagagatgatgctcttcaggataactaatttaacattttttatagctctgtaaatcttgtgtgtgaacttctaaccttgcctgctacaaagtttatgctgagcaccttgtgccttctgcagctacctaattgctgct

SEQ ID NO: 9609 - DNA, 985 bp, Citrus clementina
  Intron number 8 from transcript clementine0.9_007750m (loc us clementine0.9_007750m.g) derived from phytozome v7.0 (c hr-ID scaffold_50; pos 778670 to 779654 reverse strand)
ttctgatcccaaaagatatcaggtttgaattctttttagcaagttcaattttttagtacagaaattctctgaaattatctaaatatattttactggatcacttgtcttatatttataaaaataaggatcgacaaaaatcattcctacaatcaatgattcatatacgtaagagcttataatgacattgaaaacattttttaggagtgggctttgtttcactgttggccagtttttggcttttctaaatttctaattaattttagattttttttaaaaaaagaaaagaataggatcctctccttgtgttttcttctctccttgccgcttgttgtcaatgaatggccaggattgagttttgtatttgattttgacaattaagctagcatttttcactttatttaccaatcaagccagcttttttcaccagattataaagataaggagaggcaaagagggggaaaaaaaaacaagaagaggttccttacctaaaacaattgggcccgttttactgtttcctatccaaaaacaattaaaaaaaaaagagtaaaaaattctgattaatttaaacttaaaattttattgatgtaggtttgtacatttcatgtcttgtttcacaatcttttacaagatgtcaagacgattctctaattttcacaacatttttccagtgtttgagaaacttttcatgatgcatattactgtcttcttcgtctgagacattaacattatgtttagggtgttggttcaagttgcatcagtaggttgctgttagtgagtatttggcttaaaaccttacggccaattttagattttttttttttaattttaatttagttctgtgtggttaagaaattctccttgccagctgaagtaaagaaggttgtttaccttgtgtggataatctggttatcatgacaagtttctcatcctctatgttgtcaacatggcagtgatccagaacgtgcacttgtagaggaaatagctt

SEQ ID NO: 9610 - DNA, 2115 bp, Citrus clementina
  Intron number 9 from transcript clementine0.9_032577m (loc us clementine0.9_032577m.g) derived from phytozome v7.0 (c hr-ID scaffold_104; pos 750400 to 752514 reverse strand)
gccaggtattacttgcttcttaatcatgatgtttggattctcatcattttaaatcagatccgcggtaatttgtttttatgcctgttttcttctgccatctatttcatataagggctttttttaaatttttttaacatatttccaaaagagattagaggttttgtgactgctattctttactgatccgcgtctcatgaggatattagatattggggggattaaaatattttttctgcattgtagacctaccaaatgccaaatcctagaaggcaaacttagctagagatgctaacaacaaatattttatttcataaatgggttagtttattatattaattttttatactcctattatttgacaaaaatttgctagaaattgtatatctgattcttttgggctgtagagagtattttgattgtataggagctcagtatacagatacattttgttcaccttaaattaagttggtcagcatcacactggttgggctagtcttttttaatttgttgccttattaaagattaaaaaaaaaaggtgttgtgctgtgtgtatacacacaacactgttaatggatgatagggcaatatgtaattgaataggaaatcagttgaaccaggggttgtatataaaatataaaaacaataaattaaaacaaaaatgacaaaatagacttatcgatgaattgaaactacatttcttggatttgttttatataaatgtgatactccacattaatcagttaatggataattaattttacaaccccatgattgaaaatgataaaagaaaagaaaaaagaaagtttaaaaagtcattgttttaaggtatgcatccaattttctttacacaatctgcaaccttatagtctgcagacatgtgtgaagggtatttcttgtttttctgttctttttccttttctggatgttgaaggcggaacttttgtataacttttgtccttctgaaaattcctttgatttatttatcatcatcaataaaaaaattctgcccttttcaaactctctagttgttatacttgttctaatttgcaaccttaaatctgccatgcgttttcttaaatatattgttggatcatcagtgatcatcatggcaagttagttgagcttcgatggtggttcttctcatggtcatatcttgtatcttagaactcatttttctcgcaggtccgtattaataattttccataatttatgttttttgtcaataaacaattacagcacctgtgtttttgtatcagagttaaatgttttcgtgtgtttttgtatcatagttgaatgtaaatatagtattttatattaaataccgactcatttctcatctttaacactcattcctctctctcatttccacttcaaaaatttcttcaagttttaaaagccccaactctctcttacatctctctttgagtcctcgatctcatctcacaggaaaattatttgtgagatttttctaccatttggctttgctggataatctgacttaacaattctgctattgagatgtataactggcaatgttgcagtttatatctattatataattttaaaaaagaaaaagaaaaatggaacagaaatctggacgatgcagcaccctgcctacagctcacactacaatcaaccagtaagttaatcccagtaatcgtgtttagtaatgtcttgaagagaagctgtgttttaatgggaagtggaagacattcttgtcaaagccatttactaacatgtgattgtggttttgagattatatttccaataaatacttgaattttcctggaaaacatatcagctgaacatgtatccttattttatatgttcggatattatatgaacgacgttctcacaaaatttaagcttaaaaataatttttgaatactacaccaaatagaattttaaatataaaaaacagaagctaagggtacaattcaaatatttggcttgtaatcacaaaccaaattggcctggatttacttgggttttgatgtagtatttattatatatgtgaaaggtttatcatgttgtcattctcttttatttgtttgttcatccatggccttcgtcattaaaatggaatttgaccttttgtctgccagcatagcacaa

SEQ ID NO: 9611 - DNA, 1850 bp, Citrus clementina
  Intron number 7 from transcript clementine0.9_007057m (loc us clementine0.9_007057m.g) derived from phytozome v7.0 (c hr-ID scaffold_28; pos 1545710 to 1547559)
tacttttgttttgaagccatcagaaaaggatccaggtaaatatgatattcttaaatttctggtatataatatcctctttaggttaatctacctcattgtagtgctgccatctataggacaacagcttgaatgggtatgtgaagccttcgtgattagaattaagggaatcaccagtattgtcaactttttcattgaagaaccgatatcatcatatcttatactaatttgctctttaactatctagagttgtgcaagtgagacatattctgttgtttctaagaatagtgtgtaattcattattgaaaataactcgtattcattggaagcagaaaacatgcttcgtggatttatgttttttcatctaaatggctcgtgtttactaattattcacacaaaatactaatgttcattttgcctaatggaattcttcataaatcaacagtgaaacatagattattgaagcatgtgctgattttaactcgtatccttggttccatccatgagttgtcaaatatcttgccttagcttcttctttctcacagtcaacatgaaccccaattattgaagggtcacctggagagtttatattcttgtagacaccctatgacggacattccataaaaccgaatcagtactggaaacaagtcattggttgattaatccttgctgtaaagaatgagaaaaggatggtccggctggccataattaattactgttttctttacataggccaatctatcacatgcaagcacatatgtaagattgtctaagcacaatcagtgactaaatttcattcatttagcattttataagaaatagaaattagaaacaaagaatttttcctgtacagtagttatctaaatcgaaggtcattttttctggtggttagtgttgatgatccgttctctataatcaagttaaatattgctcgacagattatcatcttggattttcacatgaaatttatgttcaatatgatttggtgaacttcagggcggtgcaactttttaattctcaagatatttgatcaaacctcaagtttgtaaagtgagcttatttcttaattttaccgactattgatatgtattttatcacaaaaatggttctttgtcaaaaatttgctgtatgtatcatgtgatgatttcatttggaacagttgatattttatgattaatgtcttcaatgtcacatcggtttcatctccatttgttgcatgatttcttgtttttggagagcgtttttgctgtcaggagaggaagaaaagcccacagactatgaagttttgcaatctcagctcttttctgagtgatttggagtgaaagaactatagaatctttaaggaatcaagagaggacaatattgattgcttgtgggatagagttcgcccatttgcttcactttggatcttcagtttccaaggagtactgttttttctctttcgtcttttttttttttttttgggggggggggggggtgtgtggctggggacctttttacatagatcttctcaattctgtaccagtacgaggattagtggttttctgggattcaaaacagaattttggtactgttggttggtctatagccttgcttcttctccctatagtttttcctttttgtagacaccagctcctttatacacttgtaatacttttctgatactttaatatattatttgtagtttcttatctaaagtataaataataatagtaaataatgtaaaattcccgttttactgcatttgcttgtttctgttacagtttggttgatttccaatttaccttttcttcaaatttcatatttttacttaaaaaagattttgcttggttgctcttgcaggggcttctata

SEQ ID NO: 9612 - DNA, 1176 bp, Citrus clementina
  Intron number 13 from transcript clementine0.9_002439m (lo cus clementine0.9_002426m.g) derived from phytozome v7.0 ( chr-ID scaffold_10; pos 4279400 to 4280575)
gatttcttggacagctccaagaaaagaagcttgtaagtgatctgaaggctccttcttttgaatttatttataaatttgtttcttgtatgaaggtttattctttggagtagtgtatcaattgatccagtattttgtcaaatttgatttttgattctgtaggtttctttctccattcagcagttaaagtcagttctagaatttttttcaaatgtttttaggtagtactagtatcattgtcaactaactggattactgccaaaaacttagttgtggtaatgtgggaatgaaggtgaaagatgatgtaatagccatggcttatttctcatcaacaaagttccccatattacaatttgtagaggaacaaacaaagccttttgtgagaagtggttggaatttgggaccaatttgcttgccacatgtttcaatgttgatcttttcgcctatttaactgacttgaatgagatgcctttaacctgattctgagtctgaggctgctttacctaattttatggatttagtttttttcaaagttaaaaattctcccataactgaattataggcttggtatgatatgagaacattttaaaaagttaaaatcacctgtgcagtactcctgcacatgaggaaaaagaaaaaatgctggattctttaattaactcaccactcacgagcaaatatgttaaatgcttcaatttatgcggatggagaatgtcttcagaattccatttataagacaacttctcgataaaatttttccatgtgggcaattaacgtgccattattagttgttttaaatatgcatgcaaacatggaaataatctattggaagggtgcattacactcaaagttctacttccttttgagaaatgacatttagattcttgtagacaaagatgttgcagttttcaagggagtgggttttacctgacaattaaagatcacatgcctaaattttccaggaacaaatgtttatttgctttggttttgttcctttaattatatttttggcctttgctaggaaactagaaaattgctttaggttatgctttattatgtgtttttcatttttaaatcagttgttggttggtttctgtctgatgcggtttttctgatgttgaatttgccatttctcattctttagtgtgcagttatccaattaccatcacagacactgct

SEQ ID NO: 9613 - DNA, 603 bp, Citrus clementina
  Intron number 2 from transcript clementine0.9_011523m (loc us clementine0.9_011523m.g) derived from phytozome v7.0 (c hr-ID scaffold_27; pos 1948973 to 1949575)
aaaacggcatcaatattcttgactcttcagaggctgtaagttcagacacacattacctatagatacatgcacgtatgcactaatggacaggtacctgcaaaccctcagaacctcaacccaaccggccactcaccacgaatagaatcttaaagtaaatgaacaatgttgttttgactcatctctttccttcagtttcaattttcaaaatcacctataacttagttgtcaacaatgcaaccgacgttttaatgtcaaaagcttcattgactcttcctctgcaatccggaggaattaaccaaaaaaaaaaaaaaaagaaggattgtttcccggcgttgtctctaaaaattctatctccttagctggttatgtctttatcatcttgaagatttctattcctgagttatttagtaggaagatcctttgtttcagtggtcttgtctttacagccttaaattcataatgcaaaatattgtaacttttggtttcatgaagattaatatgttccttgtaactagatgttggtagctgcaagttctcttttctcttgaattctgagtgagtttcgatgattctttgcattttgtcttacagtaccccattcca

SEQ ID NO: 9614 - DNA, 808 bp, Citrus clementina
  Intron number 4 from transcript clementine0.9_030112m (loc us clementine0.9_030112m.g) derived from phytozome v7.0 (c hr-ID scaffold_5; pos 4168120 to 4168927 reverse strand)
gctgggtatgttttcttcaagtccatattctggaaggctcaatatataaatttcaaatctgtacgcacctttcaaatgttcttttttaaatttcttgtagtagattttcttgttacaagctctttagcattgtacttgcccaacctgatttgtctgaatgttgatcatttctgtgtcaaggcatatatttttatcttctactttaaaccatattaccggctatgtaaattacacaggcatggttggtcggtctgtcaattaaacatgactagctccatattcaggtttttctattgattcccaaatgaatcaccaagagatagatatgtgcataaaattttgacaactgtagactagaatgagtattcctgttacaattgatttttccagaacaatatatattttccttgtaaagaagaagatgcggcataactaactctagaataacttagaaaatatatgcagtttgtaattcatcatgctgtatcagagattaacttgagaagaatgtaaacatctttaaatctgttaaagaattgtcctgatagcataaagagataacttcacctgggcctcttttatgtgcttatgcaaagtataatgtgcctcttatgagatcttctgttaataagatagatgttgtagcttcaatggttagtagaaagttcattttgattggattgtctaaataattctttttttattttttattttttgtctgtgcagagaaatctttcgctggaaattagtctatatgatctttactgaaatgttcttaaattacgtgacattgtgtaggtttggctgc

SEQ ID NO: 9615 - DNA, 965 bp, Citrus clementina
  Intron number 5 from transcript clementine0.9_001930m (loc us clementine0.9_001930m.g) derived from phytozome v7.0 (c hr-ID scaffold_64; pos 799881 to 800845)
atttgttcgacatttgtctgtcttggattcagcaggtatgaagcttttcttactattcagtttcttttaagctgctcattttggagatttttacatcttatacgcacttcgtgaccttccaaatcttaatcattggaatctggattaattgagcatgggcaggaatacgtaaattatggatgcaaggatttttataaaccaagattttgtaggggctttaggttctttttaaatattttagaatccacttgattctgttttggcaaagaggagagggtagcatttaaatggtatcactactgcacacatgttctctttcttggctagacactaaaaatggactgattacaatcacaaacgttgctcgcaatgagtgtcacctagatggcatgtgcatttgaagcaaaaaattgttgttagaaatcatggatatttcactttttgaatatgatctgtgacgtcccttctggtttcaattttataaatggaggctgcagttttaaaagtgttagtggactctgtggtgtcctttgacaaagccatagctattgtatgtacctcccattcatgtaaaatattttaaaatgaaaatagctcttgtatgtacctcccattcatgtaaaatattttaaaatgaaaaaatagagagatactcgtggttcaaatcacatgagcccgaccttaatagttaaatcagtaaccaggtttcaaatcagcttcagtttgcagttgattgttactcctccaataactttggtataggggctttactggctgactatgtaatataataggatactgtgacctcttcttattcactctcctttctggctgatttactgaacaggataccagatttcaaattattgtgttgtactcccacaatatttattgacagttttatttatttatttattttttttcctttggctgtgtacttcagttggttgaacttgtgctggaaa

SEQ ID NO: 9616 - DNA, 1163 bp, Citrus clementina
  Intron number 1 from transcript clementine0.9_000047m (loc us clementine0.9_000046m.g) derived from phytozome v7.0 (c hr-ID scaffold_3; pos 1473309 to 1474471 reverse strand)
tttacgattttgccatcaaaaccctagctttactggtatgtccaaaaaacctcaccttgagtatctgcaatagctcacttgaccctggaaattggagctatgcataaaccctaattttgatttatgttcagtttaggttgttttttggttatagattttgtgatttagtctttgaattcgtggttagcaagtcaaattctattgctgcagttcggaatttgtgtgattcactttgattattgtgctttttgtggacatggtgttgtttgttctgcttttgattgatttttctgtttcgctttggtttttaactgatcctggatttcggttcgtaattttaggagggaaaaaattcgaattttgaatattttttattgatttaggatttgtacttgcagatcaaagcgttttgattaatctgtttctgtttttctttctggctgatgattttgggcatgtatttgtaacttcttagtggttacatctttgaaatgctagcttttaattatttttcccatttgaaattctttttatttgaaattatagagtaagaatttattccaaatttttatatttatggcctcaccattttatttttgattggatatttcttgtagatgggcggcaactcctaattattggttatgttcaactcccattttagttagggcttgcaccctttacttggtgtgcattgttaatgctgctgctccaaacttttgggttgtgtcaattgaatggtgcaaagttccacaaatacctggttttgatgtgtctgcaatttagagttaacggttttgacctatcctccaaatatcctgtgaaattccatcttggatttagatttgacccatcctccgaatatccagtgaaattccatcttgaatttagatttgacctatcctccaaatattctgtgaaattacatcttggatttagaactattatgcagtatattatatcaatagggtgtatataagaacgtttttggtttcaatttgcaaatttggaatatgctctcttggttatttatgtaattgtctgtcgtttagttaagcttcccctgtttgactttttcttttaaaatatatgcacgtgcttaatacattgcaatacgctttttgacaggtcagatagcactttttgacggaagtctattgcat

SEQ ID NO: 9617 - DNA, 744 bp, Citrus clementina
  Intron number 2 from transcript clementine0.9_006211m (loc us clementine0.9_006211m.g) derived from phytozome v7.0 (c hr-ID scaffold_117; pos 136043 to 136786 reverse strand)
aggatcacagccaaaagtacgcaatactcttttcatatgtcaatttattaaatttttttgaagtaatttgctgagatttcgagctaattgatatctgagaatccacccccccccccccaaaaaaaaaaagcgattttgggttttttttctttggtttagtgcattctttaaatcgattttgtagatacagttttgaagattttatatgaggtcttaattccttttaatattttttaacaatttgataagtttagagtgtatgtgatatgcttgaggaacaaatagctttataaacatgaattttctctacaaagatgggtgagagtagtagatttaacattctagatgtcctatttctgtcatattgtggacgaccaatttgttgacatatatgtagatttgatattggttaagctcatgaatacccttttgtaggatgtagatattgttatccttgagtgcgcagaaaagatgacaagtttcggcttctgagaatatctgtagctatttgattcacaacttcacattctttttgtgtggtacagaagttgagaaatgctttggtgctgtggttttcaatcacaaatgaaagatataaaaagttgtgcaatggtgtattaaagtactaaattgggagtagattaattcattgttttacttgtgatgtttatctttgtggcagtcttacaaattctatttctattttcagtaggtccaaaaggaaaaggaccatatccagcttag

SEQ ID NO: 9618 - DNA, 1662 bp, Citrus clementina
  Intron number 5 from transcript clementine0.9_035456m (loc us clementine0.9_035456m.g) derived from phytozome v7.0 (c hr-ID scaffold_15; pos 3138768 to 3140429)
aaggtatgttatcattatgataatgactggcagagctttttgattatgatgatggttatgtgtgaggtttctcctctttcctttttctttttagtacttaaagtagcagatatttgtgcaagtatttctgtagcatccgaaatgtgatacactcataatctttaaatgcttcttccttgaatcaatagtttgataggctaagttagataatttaaacttgttcttatttcaaagagttgaactattggcaccccttcattaatcttataaactgcttttctattataattacatttaaggataaatacaagttgaattaaccccatttataatttctctctctttactttattctacttgcacatgtttccttctctctctctctcttttttcacacctcttttgtagtttcatctatacaattggtttgcacatacttaaaacattaatctttattctttttctttttttggattatttttattttttggaaactataatagagatatcaaaattgtaaaataattttatgagtgagaaagtcactctggaaattgaaagatttaaaagatttggagatgaaaatattttttgtttaagaataagttatataacagtatcaatggatgaaattggtcaaatcaatgtgaggattcaacccaaaaaaaaaaaaaaattatagatgcaaaagattgcaagaggcctgcagtataaacttaaatattttttattcatcatttgggaattttattgtgcctatggttccaactcaaaaaaaaaaaaaatacaagtatattctttgttctcaattttttttttaatacttgttatgtaaaattgaatgccatagaaaaaaagagtattttcgacattatgggtaacataattaaaaaatgtggtttcaagagaatcttgaaggggtgccaatagtttaactctattttaaatccttagggcatataaacaaatctccactacttttgggctaaccagtccatgtctaatattgtttgctatgtatattcttatagggagattttgaagatgaattcattggaccaaaataaatataaagtaaatcaagtgcatgttgatacttttatttgaatacattccaatctttgttaattgcaactgggaaagactggtggctattaggaaaagaatgtatagttgatttttattcttggaaattacatcaaattagtctttgtttattgaaaaaatagaaatagaatttaaataggattcaaagcttttcataacagtcacccttcatcaaggaaaaagagatttttaatgctgttttgatagcaaatgaagcggcagatataggaaatggtgattgaaattgacttagagattaaatttagatgttctgttattgtggtatggtttttaagtttggactgttcttcaaattggcacatgcatttctgctggtaatttgaactacagatgcttaatcgtgttgaatttatgtaatactttctttggcctaacttgggggtgtagatgactgttggtaatttacttgtgttcttttatatttcaaaactactctatattttattatgtcaatttggagtgacaactaagtgattctttctgagtgttttactttcagggtggaggaccatattatctcattggtcgtgccct

SEQ ID NO: 9619 - DNA, 2693 bp, Citrus clementina
  Intron number 1 from transcript clementine0.9_035791m (loc us clementine0.9_035791m.g) derived from phytozome v7.0 (c hr-ID scaffold_37; pos 2031220 to 2033912)
attggagtagcactgttcttaagcacggctttgaggtctctccgtctctcttttacgtatttgtctattgatcgacatctctaaatatacattgatagaccaaattactcttgttttaatgttttgtttgttgaactttgactgggttatttgtttatttgtctcatatgatgttaatgcggttcctatcaaagtggatatagatctatcacctcaaagtctgatttcaattttcctttacttaatcaactagcatcctttccaagtccagatacttaccaatagtgagactttgctacggaagtacaatttctcttgttttacagttaagtatgtaagaatagtttcaaatttacagaattctgatatagttctctaaggaaatgcgggtggtgaatatggttccaacttttaataggctttaataggcccatttgttcagccacagtgattgcggtctaaattcttctttgctgtctatatgtgttggagtttgtctattgtccaacttctccaatggattccatgcagggttttgatggtctaattaagagaaagatcaacggatgaccttttgaagaaggcttacacaacaggccatctcaggatgtcatggctcagctcaaaagtccccaggtggttgttaccaaagagtgccattgtttctgggcttgggctccttggcgtcaaacaagatagtccggaggaaggtgactgcataaatttcttggagttaatgtagtcaattgcccaattttgctgcctgtcgaagagacacagcatggaagtcgtcatcaaactctgagacacctaagaactagtaggaggtggtggtattcgcctggtgtttcctggcaagtatggttcactgatacagggaatcttttcttgatgtctaaatactatatgtgatacaacgttgtatatcccaattcttctccagttaaattctagtgagttaggaaatttaattttgttttagctatgaattatttcctagataataataattgccatgttcctttgtagtcttatttattccaactttaggaaattctaatgagttaggaaattatgcatcgtcaatatgtttttttcaacttttttaaaaatacacaatttttatttgactgacttgattttactgacataattttctcccatttctatattatcgacgttgagtgcatgtaatccacaagtctgattgagccaaaagtccaatgacactcacgtccaaagatgccgttatcacaaagccctggataattaaagaggtcattgttcgaaagaaaagaatgatttgttggtatgaaattatgttaaaatgaatatatcgctttttttttttgcgtgagtgatggcttcgtttaatgacagttggcagataatgagtcatcttttaattttagttttgatttattagaaaatattaatttttgtagtttcagtagatgaaatttcgaatcaaatattaatatcgttaaagtacgcaactcaatatttgcttaaatcaaaaaaaaaaaattgctttatattaaaaaataataataataagtgatcacttgatttaacttcctttactaaatttacgatttaaaatccaaaatagaaaaatgaaaacaatttttggaatcacactcatcaccaccatcaacatcaacattcatcctttaccgcacatcaacatcaacatcaccaccatcatcacctttcactaacattcactaacaatagtaaagaaaaacattcactaacaacccaaatcactgatatttacttaatttctcactcactctaataagggcattgggcgggggacaaaagaagtgttgaaattgaaaaggttaatggttgaagcatgcagtgttgcaattaagttattattgtcttgaaataacaggagatgatcagatgctggttaaagcatgttgtttctgttgcaattgtattggcctggttttagggaactgtcagaactttcagaaaaagatggagtttctcaaaccaaatctaagaagatatctcacattccccacgtggtctcaatgcacaggtaagttcttctctagctctgtttcttcattgtttgttatttttaatgtaactaagaagcagagttaatctcttatcttgtccttgctttgagaaaactgcttttacatctatttttaattcacatgtccacagcaatttcattttagtttgagctgagtgataactgttcaaggctcacttactcattgcgagaagctccatgtcgcaggctgcaaggattagcttgtgcaattcctgttcagaggcacattcattcggagtaattcaattttagattttcatagtgtgtacgtttggttgcgatcaaaattagtagtctcttgttcttaatcttttctgattttccagttctttaggggccataaacagttttccaagtaccgcatgtggctgcaaaagattgatgatgataattatatctcgaaggttttaaattaactgaactctgagatagttctctaaggaaattcaagtggtgagtattgttctaacttttaagtgccttaatctacccatttgttcagccctgtgcgtaaacaatcagtaattgccgtccaaattcttctttactgcctatatatgttggactttgtctattgttcaacttctcaaatggattccatgcagggttttta

SEQ ID NO: 9620 - DNA, 995 bp, Citrus clementina
  Intron number 6 from transcript clementine0.9_020913m (loc us clementine0.9_020913m.g) derived from phytozome v7.0 (c hr-ID scaffold_53; pos 28424 to 29418 reverse strand)
ctcgagagagagatcgaagaattcttctacgtgctgtaagctcctacactgctgttcttgatctaaatatatgtgtttctttttgccaagtgaagaaaaatttcaaatgctttttcattttgtttgcaattgatctttaccaactgcttttttaaggaggcaacttgtctgaatgacacaagtcaagccacattcatacttcaatcaaaaatataaatgggccctttctcagcgatggaatatcaaaatcatgtccaaaaaagtaaattaaccatattgttgatgctaagttaaattgttgagttttactgcatttgagatttgaactactagtaaaatcaaggttaagaagggatatcttggggtgttcaacttctattctaagtacttgaatttatataattgtctttctgacaatcatctgaaacaatgcaatagtaagacaagacagttttgagaatttctttctgaagttttatgttagatggactatgaagattggggcattatcttccatttcaactgctttctgtagttttgatttgcatggttgactatgaactattgattagacaccagtgtcttatcccgtcttcccttgatattagaggggtggtggcagtggggagggcatcttgtttgactgtctgactgagacatataacttgctacctcttacctagtaggccaaaatcacagtttgaatagattaagtttccgtaggcaagtcctgaaaaaattggttgaaatttcagaagttggattactatagcttcatgaaggtgtttgaatcatcatattaaccagtctgtgatcttgaacttttttaattctaggaataaattgccttttgtgctcatattgagttgtggctttttttttttttttaaaagtttaatttgcttagcattgaatgctatttattctaatagatggataaaggtaaatctgaaaattcagcaaaaaatccagccaacaaaaataaagttggggaa

SEQ ID NO: 9621 - DNA, 1314 bp, Citrus clementina
  Intron number 20 from transcript clementine0.9_032273m (lo cus clementine0.9_032273m.g) derived from phytozome v7.0 ( chr-ID scaffold_32; pos 1155075 to 1156388)
ggtttctgcatttgttcagtcagcagcaattgcaggtaaacttgttgtaaactttttgtttattattgttatttttttaaaaaaaaattttgggggtaggaactcaaaaaatgtatcaatgaagaagatttaaaagcagatagtggaccagctgtccactcagaaaacaaagactagcactatttgtgctatacaaaagtatatccaatcaccctatacaaggctagaatcagctacaaccccctagctcaaaaccccagcccagtttagatgtatgaagaagaaggatgaatcctgaaactccttagaaactgaggcccaaagtgaagcaagaagacgagctctatcctacagtttagcattatctgaactactcccctcaaaaaatacaaacatttcttccccctatattaccgaaaatagtgctgccactgtgcattcccaaagagttttagcctttttttcttctaccaaaagcaaaggaatactccataagaagagaatcactagaacccggaacgacccacaaaaaattagcttctttgttcaacttgtaccataactttgaagccacaaaacagtgaagaaaaagatgatttgaagtttctgcacttatcttacacatcacacaccaagaagaagagagacaaaaatttaggaaacttttgttgcatcacttctccagaatttaattttcctggtgccaagcccacaagaaggcttgaattttagaggggatactagccttccaaatcattttgaagggtaaaaactctccagcagaaatgcagaatcaccattgcactaaaatcatctttggaaggctagcatccaaatcatcattagtttcttcgttattatctgcacacccgggggggagtggaggagggaagacttcgtagcttgaaatttttgattttgactatcgtagaatttcctctccagatttccccttgttatcttccttatatttcacaactttgtttgataaaactgatttgctatcttcctgctttatgttggtgattctttggggaatagcaatgctgttgctccttacatcttgaaaaggaactcgaattgacttatgagataattccttcatttttatttacttatcatattttttatcctggtactgatgaatcttgaagccattaaaccaggataggagtatcatccttagggtagttcccctcttgcatgatcatttagatgcattattgacttttccttcactgaaagttagattcagctgacattgttctgttttctgtctcaattcttaggagttcttattgtttgagagagaat

SEQ ID NO: 9622 - DNA, 2771 bp, Citrus clementina
  Intron number 1 from transcript clementine0.9_012230m (loc us clementine0.9_012230m.g) derived from phytozome v7.0 (c hr-ID scaffold_57; pos 944631 to 947401)
gcttcaactcttcgttctaacaccaagtttgtgttcttgttcatttcatttctccctaatattttgtgtgttggcatatagattcttgtattaaagtaaaattctttgcaattttttctttcctttgagctgactttggatctgggtttttgtttttatgctttcgtttggcttatggctgcattacttcaaatgggttgcttattgatcttggtatctatgctttaaatgcattgatttcgcatgcttatttgttttctttttctttttttcttctttttgtttgaatttattgagacggcgttacatttatcttttgtcgattgctatgtacttcaaattgtgttcttgttaatgttctgttcttgtatctattttagtttgatggaatgggtataattactttaatatttgttatgaaatttcttttttctctcctacctctttgtttatcaaatttcgattttttcgaggtggggctctgtttttctggttacatttggtgacttgttatagcaatttaaatttcattactgggtttgattcaagttcatgtataatctttgagttatatgtggtctcatataagttgttggaaagtgattttctttatttttatattatatattgttttggaagtagtggttctgtggtatccgtttcaatctctaacatatgcctcttggtattatgtttggaactttatttataggattgactctatgaatttgattgtgatgtagatggccgatttccttgttttatttattttgtttttagcttggtcttttagttaaatggaagaataaagaatattgaagtgaggattattcctttgacgctctgctttcattagcactcttaggataccatttgagaagaatagtcaaattcttggttttgcagttaaatgcccttttcttgtttttaagtttaggaaagaagattagaaccggtttttcttgtaaagcaaaaggctttcaaaaccattttagcttactctgcattgtggaagattttgtcttactcctcaggactgaaataagagctcttttatttttagtatgaatatttaaaaaaaaaaaaagatttatatatctgaaatgtggtggttgaaatgattctgctgggttggctggttttaaatgcaatctgtggtttcagttgcatgcagggttttctgtttgttgttttcggttaggtggggttggggacggttacaacatttaatttatattttattattagaatcatctggaatgtctgctttatgaattgtttggttaatttgttgagatttatggtttttctatttcttcctccctttttcttattttgtgttggctatttggttttggctaggttctgtagcttttaattttggctgctccctataagttcatgtattatgcttatattttatgttttgacaagtgcatgcatgcttgcccagctgtcggtttcttatgatgtggcatataaatagtttttttgtctatatgtgtaagcttcttgaatgatgctttcttgttcctgcattatgtcagaccgtgtgcaggtggaatgaaggcctttttttgtctagttctaccacaataacatgtgttcaccatgttttctgtcactgcctattcttcttttgtattcacattagtgattttaaaaatatgatcaatgatccttgttgcaattcttttagcttgatttgtatagcataattatgtttattttgttttatttgatgtagtatttactgcttttcatcttttttttttgttttgttttctgaatgtgattgagtcttcatcttgataaagaatattcaatttggtgagagtaggttggatacctttgcatagattctttattttataatccctttctgcctgtgcttggttggtggtggatctttgacttatttcaccattctgtaagagatggtgggatctattacttatttgactgttgtttaataggtggtggatcttttacgtatttctaaattgcaacgtaggtcttcttttcaaggagctggagatcattggttgcggttctaaatgtttaaaacttctatcttttggaatttttagaaccttctgtgttttatcaatttgaaagttttcaaggttccaaagttttgaactttctaaatgttaatttttgcagctagtattatacaagtgtgttaatctatggttatacaggaaattttagctgctaatcatgtttataggatctgagataatctgtgttttctcctttaaaatatctgttcccatcttggttttagtagttattagcaaactactacttatggttctgcgttaattcatatattattttttttccctttcctttgttgtatttggtatgacttttttttttcccttaatatccattataacgtgtttgttatttaatgggagcttggttggtcaaatggttattactgccttagtttttaaccacaaacctgttttaatgtaaatttctggaaaaagcaagttgtctatttgttgttgccatgtggacgtcactcatttatgtactgctttccctttagttccagttccatagtattcatatgtcagatatgacgggccatagacaagtctctgctattgtcacatgctgattttctgtaccttttgataactatgagctttaactattttcttgtccttgctggaaatccaaactcagctgtcagtgtctgatcctcaattcttttgtttcattgaagggaggttgagaacctcaagaagcctttt

SEQ ID NO: 9623 - DNA, 3712 bp, Citrus clementina
  Intron number 1 from transcript clementine0.9_011424m (loc us clementine0.9_011412m.g) derived from phytozome v7.0 (c hr-ID scaffold_129; pos 378380 to 382091)
tcggattccgggtttatcaagtgatgcccaagaccgacccggcttcatacccgggccgggtattacgcccgggtacggtccgggtccagaccggacgggtatttttgccacctctatatagcgtgtacatatgtatgatgtgtaagaaaaataatggagcagatttttctttttatatttacttatttgcttactttggaaaaaaaaaaaaaaaaagtggggtaaagcttaaaacaattttttactctctcgcttccctcgtatttgaattcaatggccggataagaaagctgattgaaaactacacgaccaaatccttgagagcaaattatttatttgttttaatttagtttggtcagaaaaattcataataaaatttagaacgtatagaaaataatttatacaaatacattgacctactagattcaattatcaaaattattttcggagaaaaagtccaaaaaaattgaaatgtccaattaaatataactgaacctttcatcaatgtgtttgtatattattaatttcatgtatttagtaaaaaaaagttataataataatctgatctagtgagattagaattagaaggggcaatatgggacatgacatgaatgcaataatatcaaactcgtgttgatataaattgacgtgtttgataaatggattgacacgacatgagtaataatcatgctatacctgtattggaccatctcaatatattttttgtttattacacgaatataaatgaatatgtgataatattattttaaaaataactactaagttaactatttctgtcatttccatattgtgtcatcaatttattaatgtcataattagtttcatgttaacttatttatgagctatttaaaaaaatttgacatatttgttatattttacattaatttttaatttttaataaatgtgttaacaacaagaatagcatgattaacaaattggtcttatccgtgtgttttgatgttttgacatgatacaaaagacaacacaagagtacaaatttccacccctagttaaaatactagtattttgatacattatatcatattttattatatcaaattataatgcaatattatgattggtatagtatatgctgcattatatgaaataatatttttattttaatagttatattaaattaataatttaagattcattaatatcttttattattttattcaattgacaatttaaatttttataagtaaaataaataatctttactgctgaccaacacaccgcgcaatgttgtactttgatgtcatttgaactttattttgataccatttgaattatagattctagtcattgaaactacaaaacagtactgtaaatttacaataattgaaagctgctaggttaataatagttacaccattttatagttcggagaataaggattctaataatagtaattttagtacaaaatatgatgtaatacggaagccactggtggctagccgttgtcaaattgtcgaaggcagttcaccatcttcatttttggtttttattattttaattaaagaaattaaaaaaactaatgtgaatagcgctgattttaaaaaaaaaaattggagctcactcaagaccacttgttcagaaaaaaaaaaaaaaaccaagctcatcctcgaagttagcggaataacgcaacaactgcattgcaaccttaaagttttaccaaatataagattggtggatttcattaaagtctgataatacaatataatcccgagtaatgctacacatcttaaattttttatcttaaaaaattatctcaaataatgtgtcatttattaattaattagtgagataatacaattaattcacttaaatcttataaaaattattaactacttaattaatgacataatatttaaaataattttttaaaataaaaaatttaaaatgtgtccacataaagtaggtgccagacacgcccctattaaatataagtgtgggaagtaattaggggttcaaataaggccccacgcttttgctttgtgtcttttcaaataataatagtcacaagaagctcaagctctgcgacgtcgtttcttaaagtcaatatgagacgatggcattatacagcttgctaacgactccttccagcactttgcccggaaactcgcactgcatacacacaatttcttgtgctttaccttttttctttttcttttttttttaaatatttttttaagtaaaagaattcaaacgttatagaccacaagtattgaccagaatcaacggtgcagatcccttccccacagtaagaaaatttgataataacgtacgagccccacttttgcgttttcccatataaggatctagtttgggcatttataaccaaaaagtctgcaattgctattgaaatgatctagctagttagtaatcacccttgtaatgttacagtaaacatgaaagcgtatcgaatcttaggacttgaatagatctaaatgtaactcaaatataatacctctgaatgtatgtattatttctttttttatgctttaacaaaatatcctaaaaacattatttttccatacttataattttattactgaaaatggatatagttttagtgtggtaaaagaaataatggtttgccataaaagtaacgcttacataatttatgctaatagttgttttgtgttgtgctctataatactcaaggaatctattcattgtaagcaataagtcatttgacatgaagccctccacttgaagaatggtttaaagttaatttaaatgcagctattaaagcagatcagcagcttgtagttttggagatggccattaaagattcaaatgggaattttgtggaaggagaaaactaaaagatcaagttaatatgataatgctattatgtagaagtcgaaggagcagagctgagaattcaagttattgaaaatacagtgtgcctgttattgattatacaattagaaatggtggatcttttcttaaataaggagactgcaaaattgagattgttaggaaaaattaaagtatttgaacaatgcaaaaatttagaacactacgagagtttataatattattgtccattatttatctaaattaactttagaaaatgaacaacttattgtatggttggatgtaatgctagtacagatcatgtctctttttgcaattgaattaataaaaattttactttccctttttttaaaaaaaaaaataagaaaagctcttcgtttagattaaatggtaagtcaaattttttgtgttaagatgttgtgagtgatgatggacttatcccctaaaaatagaaaatatgtcaatatattataaaacctaaacagttagggactcagacgtcattacacatcacgaaaattcatagagagtttctagatccttccatctcctcattttactcgtcaaacactcaacatcaaaaaccaaaccaaaccacacacagctaactctctcatcaacaaatcctcaccgtccattctgtctgttataactcgagatccaacgtttcttcttcctctctctttctgttcgctcgctcgccgtctcgcgtctactctgaagatctggttggctctctgcctctctctctcttgtcttctctttgatcgatcttaaatttaacaatacgattataattataattataattataatttcttgttttaatttatgttattattcagaaattttttagtacaag

SEQ ID NO: 9624 - DNA, 1462 bp, Citrus clementina
  Intron number 2 from transcript clementine0.9_023905m (loc us clementine0.9_021830m.g) derived from phytozome v7.0 (c hr-ID scaffold_23; pos 2935462 to 2936923 reverse strand)
aacttttggacaaccttaaaataaaggtttgtttaaatctcaagagttcgtgttatggtatttagaagccttattatgtatatatatatgcttgtgagtaaggatattacacataacatctattttcgctacaaagtgatgaaagattttttgttctctaagcaatttccttctagccctcagataaatactttaaaactgcattattgggtgccctttaaggcatagttagctctcacctggttttattcgatctatcgatgtaatttttttagttactgcataaagaagcaaaagcttttgctgtgatgatgcagtcaactggttgaaagtatttttggaccattatgtccatcctgagtggttacccgagcaatggtagattttgaagcattggtatgcaatggtgccccctttatgttcgttgtatgttgcttttattctgatttcctgatgactacgcttatacctctctctctccctttgttatcctcctttttttttcgggggaaaaaatggtcatcaatggtgaagctgagacattttttgtttctattttttttttccctttggtggcttcatttttggggtttagatttttttatctctcatttaaatgcaaaatggttgctatgatgataactttattctttttgaaagtgttcttgatgaaacgtcgacaatcatgtcgatctgagcggttacctgagcaacatgttttaccagttgtttaatttgttccttcaataaaagtattaccttcctttcttttgtagttccatttttccgcttcttttttgtttctaatggcctctaatggtctctgttagttttatcctgttgagttttatttctgaaatgtctatgctggatcccttcttgaaatgcaaatcagttgctatgatgattactagaagttatagaaagtcttgttgaattcttaatgaaatgtcgacaaaaattgtcgatctgagcggttacctgagcaacgtattctgttaattttccccttatgccttcaaaaaggttactttcataaaaataaatgtttttttgataactgtgttgaagactttgttgatagcatgtttctctcatgccggtggctttaacttcactaggttagatgatatttttcctctgttttaagaggtgctgatgtcgtaaagattaagaaagtaaccacgtgacgccttgagtatctcaacttggatttacaacttgacaactttgttttgatgaatgtagtaagttaatttgcaaatacagaagggctggatggagcactttggtttatggttttgataggctgcattattctttccgttgtgtatctaccagtttgttgaattgcatttattttgttttaacatacttttggcttgatatattttttactgtattgaggacttcttgaatatttgcagtttgactctgaagataaatattcacttgttctata

SEQ ID NO: 9625 - DNA, 1489 bp, Citrus clementina
  Intron number 1 from transcript clementine0.9_004452m (loc us clementine0.9_003849m.g) derived from phytozome v7.0 (c hr-ID scaffold_8; pos 1522131 to 1523619 reverse strand)
aggcttcccgtttgaacgataaattgctttcagaggtgaggaatttgaactgctgtgagtttttttggctggatttttttttttgtaatttaaaataatgttgttgtttttgttttttttcgggtgacaattgtgtttgggtgccggaaaaattcaattaaaaggaaatttaaaccccgaaatgccctgcttccaactacttttggcaccaaaatgtttattcttattttatttttttattgtttttaatttttcatttcatcttcttttgcgaaattggttgatgttttgggattttattgttgattttgtttttagaccccaattgggactttttcatgggttcgatctgggatttgacggataattcaatatttcaccaaatattttatattaaatactcaacattttttaacaaatgactaagctttacactttttaaaactttttttttaatttgctgttgagttttggagatcgatctttgttcagggttttagatcactttccttttttcgtaatttgattgcaaactggccaaattatccctaatttttgtctttcaagtctggaataattctatggattctatgcttggatccttctctgtttcggggttttgttgtggtttaggttttatctttttgagaaaatttcatatatttgaaggagttttttttttaatagaatttttggtttttaatggtttttatgcacctctagttagttacccatatgtgcatctgcatataattttcactcaattttgtgtttttgaggtttatcttattgattattgtattgggttttagtgattttggttttagaaggtcagatcatgtggatctgatggtagttgcggaaataggtttctatgtgaaatttggtgtgtgtcgatgaatttgtcttggttgttttcttttaatcaaattaaggccctagaattggtagtaattatcaaattttgaaaccgttttctgtgcaaatggaaggattttgactgatttatgccgttctattttatttaccatttaggagattgaaatttggtctattgtatgatatggtacattgatgcttataatttaatatatagaagcagtttcgggtgtaaatatgttgtcacttctacattttctgtaaggcatgaaaacttttacgctaatatttccctgggtactatttcaggggtttgtgggtttaagatttccgtggtgcaccattattggaaaataaattaagaatgctgtttgctgaattgttcttggtgtgatctttgagatatggtgttgcagaaaaggttagattacggatttaatggctatcaggtgccttatacacctcgagccaccagatcagctagggtaatatattcaactatgcttgtctggcccaatttatttctgcacttctgtgttttccttctgctgatccatgacaatcattttttccagaagaggtgttcgttcaagaaaagagctgaagacaa

SEQ ID NO: 9626 - DNA, 3670 bp, Citrus clementina
  Intron number 2 from transcript clementine0.9_018094m (loc us clementine0.9_018094m.g) derived from phytozome v7.0 (c hr-ID scaffold_54; pos 265034 to 268703 reverse strand)
cgtttgatcgttttggaaaaataatcgagtgccaggtaccactttatcgttgttcatagtttttatttatttatttatttattttttacttatgcgccctttttttccccgctgtattattgtgctctgtttggattttgagaaactcgagcgggaacggagtatttttttttttttttggagaaagcggaatgtaaatgaatgacttgttctctttttactcacgtactaagctctcatgtttaacgaactaaaccctcatggctaacgtactaagctctcatggctaacgtactaagctctcatgtttcacgtactaagctctcatgtttgaacaataaaattaatataaatcagcaacttaaatagcctctaaggttttaagttttataagagtgttagagtccttttgagaatcacaacttgttcttaatgcattagatttacaacgtgatgtcattgaatcttagttttgatttttatcatttggcttggacctcaaatagtttggtattgacatctagttgagtttgagtattaacatcactgaaaattatgttgcttcgtcggtgtcttcttttctttcaggtcacgtgttgatcgatcaaacaattctacggtggtcttttttattgtcatctttacatgtttctggcagcttgcctgcacgcatgaaaaagtacaaaagaatttgagaaaatgtttcattatttatttgaaaattgaagcatagttgatttcaaattaatttataatctatgttgaggtaaaggtcccacagcttgtaattcatgataagcaacgtttgtacaggctatgtattttgatcgcatttgttatcattctcaattcttcatcttcactatattaattattctgcttattttgttgttttgcctggaatgctcgatatgatcttttgacatgctgtagatggggtttttagaggtccttttggtcagaatcttcttgctgaagctcagtgttatttatgtgattagattaagatggatggttatttttagtttttccagccagctagcattgacgtgaatggacggtcttttgtctatatggattattatggttcacaaaaggcagtcaaattcagatacctggatttggaacatttaatatctgcagaaagagttcttttatccatggaatgtaagttgattgagaaccatgaagattcctgctcagaggcttggaatggatgtaatttagtaaagtgatcaaccaatggtcaagtcatgtgaggtagcgactctgagatgcttgtgtcagaaaagtttctgtttttcacagctttcatccacctggtttctgtagcttggtaaactgaaggttctagagtgcttagtcctcaatgaccgatcactccactagttagctgaaggatagagttcaattaagcctgatgaaagaaaaattgcatgtttttccatgtggctttcggactagcgttgtagctggaaggaaaaaggccattctgcaagttctgtgagttgtttgatataaatttttaagctggacagagtgtgttagtgggtgttgatttcttcttatgtcgctcagagaaccagaggattatctggtgcagtcgaaagagtcatgtgatgtgtatgctttcaacaagggctgccacattgcgatgttatgttgatttacttgttttcactctagattatcagatttatcttgtgcctgatgcgttattttgtagtcttcgtgcatgcatatgaaccttgatttttacactattctgatagcattacatccaagaagcctgaggcttgattccagtttggattcatcaaacacaaagacgaattctatacaatgcagagatggtcatctgcttttgagggaacagcattctttcgttcgtttggtgtggcagactcgtgaaattctgatattccagcttttcagccttatttttggagctctttgaacttcttttattcctgctacagcatttagtctatgtttgattggactaaatggatcagaacagttttctgttttccagagcatggttatggttctgcgccattccataatttttaagcttctaatcaaatgacagtagttcagtagtttaagaagacttgtcattctgccaactctttttactttacagtcagtgaagggaaattatttaatttattcagctgcaaagtttaatctattgaatctggagtttgggtgcttatagttgctggctgctgtaattctctcatcttcctcttatcatctgagaagattcaattcaaggacagtgatgcatatttaatcacctgatatgaaagcactctataggctacgttttcagaggttgtaggttcatccccaagtccagtatatctttgctagaagttgtcttaacttttttatctcagcttttgcgatggacgtgtgggcaaagatgtcatttacggactgcttatctgaaggtttttttgataccctgctgactaggatgatgaattaataatgtacaaggaatgagaaccaagaagaatttgggaataacctgcacagtgaagaaattgtgtgatgatcggtggttgtttctattgatattagttcttctggacagagatcggtttttgaaaaatatgtttttttcatggtgacgtcttactgcctgtttttcacttgtttggattaaggaatggcagttgttgtcactgcaagatggaaatcaccccagtattcaaaacatgacagtttgtggttcgtttaattacctattggtgggaacccaaccattttttagaaactagcactgacgtctggttcaaaaggctgatatatctgactgtatgatcggctattatcagttgttctcttgaataggattctatagaacgggtatctgggattttgtcagatgacagatatacaattttgaagattcttcttctttgtttaagaatccttttcaataacaaaaaatgcagcaatgcctcacacataataacgatttgaaagtaagtcttttttcccccctttccccccgggataggaaagtaagtctttatttgcttgatacattctgattatgtaagactttactaccttatcatcttgatgtgtaatctctggaaccaactatttcctcatttttgaaagttatttcaatgctattctgctccttgttaatatctgtcatttcaatgctattctgctccttgttaatacctgaatgctatgcctgaatcgctatacctgaatcctattatatacatgttacgattcccaatatgctttgaggtaagtagtcattaatcatcaaactgcgactttttatgttttgtcaaacaatctggtttactgcatggctatggctttttaacctcttttttttgttaaataactagtcattgtcatctgatttacaaactgtcattagcttccgcggctggttttataatgttacatacttttgagattctttgttacaaatcactatttagctattgtggagcaagtttcaaaatgtttctgggttattcttatcatttattttggaaatgtcatcctacttatctcatctttacagtggtggcaatttcttagtgtcctattttgctatggtttggggtcatccatggtcgtcctgtttctttgaatcaacttctcttgtgtgtttgtgtagatc

SEQ ID NO: 9627 - DNA, 802 bp, Citrus clementina
  Intron number 5 from transcript clementine0.9_007075m (loc us clementine0.9_007075m.g) derived from phytozome v7.0 (c hr-ID scaffold_6; pos 1587677 to 1588478 reverse strand)
aaatacttggaattgaggtgagatcaatcgatgtttaacttccttcactcaagatctcttagttgttcttggtcagttcatcttcaatatatttttttaatactgaatttttgtctaaaccttctatccagtaccatggtaacttttacgttacttttttcattttgggtgaatgaatcaccataaagttgttgctttgtggttgttccttggagaatagttatgtttgatagaaaacagagataatattttcattctatttggtagttacttcttgactgtgtggcaaagaatttaaatttacagtaattggtgctattggtgttataatttcagtttctgtcctcagcactgtggcatgaaactcccgatgctatccatggcagtatattgtcttcatagtttggtaatgctttgatactgtaacaggtttattttactttggaaaaaatttgaaaagttaattgaggaaaaaatatatattctttgcaatttttcctgacattcaaaatgtagtctttgtgatgacctttcttatgtaaatccaatggttaatggaactatggctatttaaaaaaaaaaaatgtgctgtttggttttcgtttaggaggagagctaggaaaaatagagaagagtatgaaacaagcttctgttttttttttttttcagatttgtgcatgtacataatttcttctgtgatttgcttttgttattctctccctctctttgttaaacacttgcatcataatagcctaattgaattccagggaggataccgaggtttttactctaaaaacacctt

SEQ ID NO: 9628 - DNA, 4446 bp, Citrus clementina
  Intron number 2 from transcript clementine0.9_018289m (loc us clementine0.9_018289m.g) derived from phytozome v7.0 (c hr-ID scaffold_7; pos 4849191 to 4853636)
ataacttgccagatgtaaaccaagagttttatggatttccatatataattttttatcagtatatgtttgtttcctgtaaattttaaattgcatctgcaatatagtattttcctgtgttggccttcatctaatggaagcaataattcagttagaacatgttgagcagtatttgcatgcaaaacttgttttggtccataaatattattttggatttctgcttgacatttccttcgtggatgtaataatttacaatatcaatttaatttctttaactgattgaggatatgccagttggtacatcttgaatttttcatctttctttaacgaaagaaagttatgttttattgtgctcactgatagggtgagacactatggattatctatttaataatagttttcgatgattttagaatttatatagtccctattttctgcttgaatggttagatcaggggttgggatgagcaaatctcattgatttacaagtatattgatgtttttatgtagaaacaaattgatggctgaactaaaaaatgaccaaacctaggagcggtgcgctttattcaacagataaaacacgtgaagggaaaatgtttgaagttttccttgtcaatgtcattccagtctaaagatactattttttacttgatacacaaactgtcagtatacccggtgttacacttcatggcataatatatcttatacatgtatgttttacatgttgggtactacattgtgttggaaaagattatgcgatgtgatcataaatctagttgagttattcaaggttcataaacccaagcttactcttcgcctagctaacatgtgctggtatgccctttgcttggcttggtgattctgttactcaatccatctcatgcattatgtgatgcctgtttgggaacatggcagctataaagaatagcttttgatattatggaggatgcatgtttgggaacatggcaactataaagaatagctttagatattatgtaggattattagtaaaatcaagttatagaggtaagattatcagtggaagcatgatgaattaacaattggatcttttaagttgtaaatcaatttcatagactgtaagttgttcgcaaggttatatcatgatattgggagaatcaaataacatgtgtttgcacaatgataatatggtaggtgttttttacttgctccttaccttattgactaaagttcattataaggacattactcttctatagttgaagagcttagttgtcaatgctagagtttggatagtattaattggatttgatgattattttaaactatgcaaaattgatgacaagtcaagctgattatatcctgaagcaatgttaaggtgttgatttatttggcaagtccaattaacgaaatgattcccatggtgtgggccacacgttcaagtggattgaacagacagggaataggtagttgcttgttgttgtcaattccccccctttaagccttggattggctttctcaagataggtttgaaagagattaatcaagttgaaagagagaaaggaaatgaggttttgagtcaaccacttcttatcaatagtagggtagcccactgcaaaaaacctttcctaaccaagcagaagtgtgatagtgtgtcagaaataccttttcatccgtaggccaaaaggcatagagctggttgaattagagaatcaaaggttgtcctcgctctgcgtttcatctttctttttctttcaagtgactatcattgagtcaacccaacccttataccatatctcaacttgaagtaaaggaaaggccaagcacttattcatgaaatcactcgacttttcctatatttaatatttctattttatttattccacattaatattcaagagaattcttctatcattaagtcttaactttcatgtggccctacttttatcagcaaattcaaagctatggaacttggactcggattcatttcgcaagctgttaaatagatacaataatttaagaaattacttcaaatgttcttacccatattgaggaaacacaaatcaacaagtgatgcaatcacctttgttttattgaattgtgaaggatggaaatttagttagtattatcgaaaggagaaccacatacttaatatgatgaacgagaatctcgttcttaacatgagcttccattattaagattattcaagagattttgccatgattaagcattgatttcacttaccctagattatcagtagacagagaaccacggaacgtgagatctgattcatttggcaagcttttaaataggcatcataatttgagaaattacttcaagcacggccgttcttacctattttgaggaaacatagatagcacttttggtctattgaattatgaagtgtcaacaattttttttttttttttttctattgaatcttgtactcttctatgggtagtgttgaagagatttcttccactattaagcttggactttcagataccctagtttattagcatactcaaagctatggaacatagttgttgattcatttggcatgctcttcaatgaataccataaatacggccgcttttactcattttggcagaaacgtagatcaccaagtaactagcttcagttaatgtgaagcccaaagatcattattgttgaacaacaataaatcttttacttaatatgagctttcatcataatgttgaagagatttcttcaatcattgtgcctcgactccaaagagccttagtttgatagtaggcccaaagttttggaacttagttaaaggtcttttgtcgaaatggagcaggcttactgtatctttttacacctatgcctcgtaacttctgctcactttgacttctctttcatttcatatgtgtttatgaaagaaatctcataaatgataagagcttccattagtaatgtggaaagatttcttataacgttaaatcctgggcttcacatgctctactttttgtctttagcttgtatttatttgtattgataaaataacacaaatatagtgagtgatatttctgcattatggtgaacgaaaccataccatggcactgcattgtcaatccaatgcttaaacttcattcacgaggtgctagatggtcttgtcagatactcaagtatgtgccatatagtggccgatgatgctcacaagagcaatcttggttgttacgattataattatgacataaaaccaagttttaagcaatatgatttcttggaaaagcttcttagagaaagcttgactactagagccttcgacgtcaaaatgaatgtccatgcatatgggaaaaaattactttaatctagtcataaaatgcatgtatggggttccttcgacattccttaaatgtctctaggttcaactcatcttagtgaattcttattcgcaactaaacgcaatcatacttgaatttaacaaatacattcttttttactttttcactttttcttggtcgtgcatttttcttaacattggtgaaagatttatcttagatacattgttggattaatcattgttatcgatcaatgatattgattaagtatgttaggattatttgtatcattatgattaactttgtatatttacctttttggtttagctagaaaaagaagaagtatcatttgataatgttttgtaaggcttgatagattatctttttgatgcatattagtccaatttctttgtactaataaatactcttcctgattctctatctataattgagcgttatcattattattttcttcataaaagctactgtaggagatcaccatgaaacattactcatcgagattttgtgaggttttatttgagcaagaaactctgagcattgattagaaagtgacttgtctttagtagatccctttcagaccgtccccccttcagctcagttgcacctgatctgaacactataccttcattaagagataactgattctagccaaacctcttgatcatatccatacccttacctcattttattactgagtgatcatttagggcctcctatctccatcttgctacgtaattatttagggttgtctctggtgatcagactttatccctcttgatcatgaggttattctcttgatgtcaaaatttacccaaaaaaataaaaataaaacatttattatgtgattattgtggctttatatatttcctcattctgctataggtatcaaagtgctactatactactgtatgtcactttcacagatctactatatttatttgcaagactttctcccaagatatactgctgtttttagtaacatataagatatctctttccccctttctctttcttgatatatatctaattctttgtgtgcatgaatgaagaggtctatgtgtcattgtttgtgcctttgactgataattggtgtttgctttttgtttctcgtggtgtgattttgtttacagatacctcagca

SEQ ID NO: 9629 - DNA, 1161 bp, Citrus clementina
  Intron number 6 from transcript clementine0.9_010055m (loc us clementine0.9_009677m.g) derived from phytozome v7.0 (c hr-ID scaffold_53; pos 118976 to 120136)
ccattcaggtttgttcccttgttaattaattttttcattcatatccacccatctatttttaaatttatgttacatttgacaattctagatattggatatggagcaaccttttttctcctcatccattacaattcattgtatatcgtaatggttggtcaatccctcattttccacttcctccttactagcaatttgtttcatttactggccctgtgtttggtatctacattgttcctcattttgcatgattgtggtgatctgttgttcactgaatctaagttggtagcattttagtcttagcagttagtacattgttttaatccaataaactttctttcccgtctttatgttatcttctgtgactctgattaacttctgcagaattaagtggtatttcctggtttccagcctcgagaaagatgtttacttttctttgattgaacaattattgtgcaatcaagtccaatatgtgtgtttgtattcacaaccccaagttagaattgtatgattagtgccacttgtaatttatgtgttacaaatctacaatatctttattatttaaggtagccacaacggctattgatgttcaatggtctaaaattacgttcagctaagacaatggtttgtctgaaaaagtttgttctttgtggcgtatgttgaaatgattattatttttcgatgcacacaattgcaacatgctctagtattctacatagggattgcttaagtgactatatttatacagagatcattcgtttccaacttattggtcttaaaatctgaaagtggtgaaagaagtttgggatctccatctctaagctccataatcttgtggaaatgcttaaaggagaaattaaaaagataaggattttcaattcgtctttatatgttttgtagttatctttctattgtttcattcttatctaaaggcagcaaatcttattcatgttgggtttaggctgctgttttaacagatgtcatccctcctgtctgaaacctagatagcgtacaacatgttgcaagcaaataatatactcttcatgaaatttcatttcttgtctttttttttctttttcttttttttaataataatgatgatgatgatgatggaagtccaatatttcaggcttcaccaatcaccattggagggcaagaagcttt

SEQ ID NO: 9630 - DNA, 526 bp, Citrus clementina
  Intron number 4 from transcript clementine0.9_010502m (loc us clementine0.9_010502m.g) derived from phytozome v7.0 (c hr-ID scaffold_25; pos 3123316 to 3123841)
aggtgatgtggaagtagtttagccttagatcattatatttatgtagcagatctaatcctagacttgcgtttaatttcaaaaggccgtttgtaccgtttaatttcaaaaggccgttggtaccatctataatatgtcattcttgtttttgtagcttcctctgatttttatttatttttcttatttagatgcctgtttatgtaatggggacctggatcatcctttatctttaatatagttaatttttatgttggtggactttttcactcagcagactcaccttcttcatcattgttgttgtcattaatagccatcttcatttactggttcttgagattttgttcatgcattgcttttctattctgcatttctttacatgagcatgattaaggtttattgatgtttggtcatgatgctcaatgtaaaataaaagctcagcttatgatgtagtggtcttacatggtatattttggcattcagttgaataatgtgttgatatgtcattttgtttttcttgctcacttgcagg

SEQ ID NO: 9631 - DNA, 323 bp, Citrus clementina
  Intron number 4 from transcript clementine0.9_033630m (loc us clementine0.9_033630m.g) derived from phytozome v7.0 (c hr-ID scaffold_34; pos 1728457 to 1728779)
tgaaggattctttggtgtgcctttattctttttaacttaacttgattttacttcttctttttcttgactgacatggaaaattataatgtgctttatccgctgttattttgcatgggatcttaattatcatgtgctttatctgcagcttgggtgccacatttgactgctttcttgttctaaactgttatttacttgctagccacttctttgtagttccacagtcacaaatgattatttcatagactcctagattttgtgtccaaatgattatcttatcctggaatattctttggtctgtacaggctaggttgatcgtggaaaac

SEQ ID NO: 9632 - DNA, 2636 bp, Citrus clementina
  Intron number 1 from transcript clementine0.9_021395m (loc us clementine0.9_021395m.g) derived from phytozome v7.0 (c hr-ID scaffold_111; pos 225267 to 227902 reverse strand)
aaggctcaaatttgggacactgctggccaagaaaggtttttttttttttttttttttttgggttccttctctcacttttacttgcaacttttattgggtgttggttgcatgatcttaacgtttgtgggtttgtgagcctgtagctgaaacttggtgttcatgtatacttgatgggtttgtgagggcatgaggagtctgttatttcttatggaaattttgattttgtgctatgggttttgataacgttgttttcaatctgattcaatatgcaagttggggtactttatctggaattcacggctacttgtgatgatgggttttcttgttgatgtctgaacttgttatggactcttgaattttgaatttttattggaggttgtattgttctgtttttctttctgaaactattttggggcttttatttcgatggtttttttttggcttgtgcctccttcttttgttctttggaatacatatactttgttcatgtctgtgtgatcaaatgattgaagccataatcatttatcttgtagggttagtagatatcatctggaaagggtagcgataacaattgaaatcacttgataggtgtacaaataccaactaattgtcttattagtaatatgtatttgcaaggccttaacagtaatggaaactttatatttgtttgatattactcatacattggagctgataagagagtcagcatgtatacccttgcaatatatatgagcaatgagttgggtaacgcataaggtctgatattgtgatttgtagatgcatacttgtggcatttcttaaggtttttgaaatcagtaattgccttcatctgtcttcctagagatgatatgtgacaacatttgtctgttagtgtgaggaatccactcatcacataaactttgcctataatattttaaattgaggaaaaaaaggattttcataaagttgattaatgcagttacatttatggagggttgttaatattggtgacaaactcaaggaaggttagagatgtctcagtacttattggaatgagactgatgttgatatttaaagaattaacctcgtcaattatttggtgttttgtctatgttgtagcaccttcaagtatgttttctgttggtctcattttagaaattcaattgaaagatgcagtccatgtttttccaatcctgtatgaaacaaatagttaaatgtttacacgggatgagaattgctgttacacatagttggtggaattctgtcttcgcatactgtgttcatacacgtaggtgtccatgttgtttcagtcatgtatgaaacaaattgttaaaggagtcacggtcacatctgaagtatggatttctctctttgcatactgtgtacaaacatgttggctaattgacaatttgataaatttgtttggtctcaaaccttttcttggctagagtggttgactgaatctaatcatgtgattgctcatcttaagcccatcgatcttgagctgttctttcttctttgcatttaagatggtcgtattggtgtatcagatttagaatatagtaagaccattaccttctccgttttctttattatgcttataacgccaatttgtatctttactacagtgaaggagcagtttagggtatcaaaaggtttcctttgtgcttttaaggtctttctagactggagaaaaatgtgatcatcaaatagtgaattggtgatttcaggtggggttgatgatacatgtcttgctagcttatctgagtgtaaattatccaaagttacaaactgatggggttgataataaattatccagactggtttaggttctgatggagaagaattggagaatgggagttgacttgccaatctgggtctgcaaagtctactttagattataggactacaacactaattgttgtttacaggacatcgtgataactaatttaagctgtagaatgccttagccgaaggcaatacttgatacctggaaactttttttctttctttaagttatatagaaattaatgtctaactaattgcagaagaaggaacaaagagtcatttctttccccccttttttggataagaaactggacaaaaaaaaatcatatcaatcctaatttctagtgataaaacaagcatgcaatgtctggtaagtgaattaagcatcagtataccatccaaatggaaaacaagtacagggaatcgtttaaagacaatttggaatacctatgtttgttttacacttcaacaaaatgatatctatagcactcttcattacttaatatatatgggattatttttttttatttgttttgttatgaattttgttttattcaaattttataagctatatagtgtcatcataatgctccccttgatgagctaacttttatttgtttatggttcacagtgataattttattcacttgaccgttgtgatacagtggaaacatgaattcaatcatcttattttatcatcatatcaaatacttttattgaatatactacaaatgctgcaaactgatcaggttctataaattgctttgcttcaaaatgaaagaaatataacacacaagtttccgacatttgtaatttgcttctttgttctattaggtaccgtgcaattacaagtgcttactaccggggtg

SEQ ID NO: 9633 - DNA, 556 bp, Citrus clementina
  Intron number 9 from transcript clementine0.9_030507m (loc us clementine0.9_030507m.g) derived from phytozome v7.0 (c hr-ID scaffold_84; pos 366086 to 366641 reverse strand)
ctattttgggtcggtaaggattcattacctattttttccctccccattcaattcagtaaaagtagctctttcacgtcaaatatgttgaatttgatttgttaaactagatggcctgtcttatttttttgttcgcaattgaagcaacattcattgggaaagtccatgcttggtgaggatcgtggaaatattttggaaatagaacgaaacatcttttccatatatatttatatgtagttagataatagtaaggtatgaactgcatggggcaatttagttgtttgagataatttgaaaaatcttgtagaacattaagtattacaaaaatatttttgagataaataacaggtaattgttactctacaaatgagaaattgaaatattggggccttcaaaggtgatgtcatgattatgtttaatgtcatttcctaggtgcgacgtaaattaatagtcatttgcatccgtgtataagcctgtggttcgcatagaattcttttattccactgaattggtaatattctgtggtttctctcttggtgttatattgcaggagtcatcc

SEQ ID NO: 9634 - DNA, 1361 bp, Citrus clementina
  Intron number 6 from transcript clementine0.9_003460m (loc us clementine0.9_000838m.g) derived from phytozome v7.0 (c hr-ID scaffold_51; pos 1350561 to 1351921 reverse strand)
gttattcagtggtgagtgtagtgattataatgatgttatgattctgtaagtatgtgggggtgtttgtctgggttcattcacatccgtacgttcgtactaattaatataaaatttataaagtagtgatggacataaccacactttcggaaattggattctctgagtgatattagctcctgccagtactatgctgttcttgagcttggcttcctggatccatgtgtccctggttctgacaagtgaagtactgtccctagttggacttcaagggctcttgctctggatatggtccttatattgggttaatagaaacttatgaatcccttcctctttgaagccctaacattctgttgaaaaagagggggaaaattggtgaaagctgctcccccttactgatgcaaaacgtcactaataagttccttttgaatatggcatggggtggcattatttgctacgatcaaattccttaattatagagatgaaacaaaaaatagctatctctacataatggcaaagggatcaatagaaactcttgtaggcaaaatgtttgaattactttttctttttccatttaattgtcacaataatgtaacctggaaagatttcttatccaggaagaaatctgagtattaacgcctctactctattgttgttatgtagtgggttaaatgccatttcagatgtggctactattttggtacccaaaaaaagataaaatgtttgttgagatattttagtctcgtgatgcttcctaaaattccaaatgctgtcataatgacccttgtttggtatcgtgctaagcatctcattctagcatgtggcttctaggattgagtcttcagaaccgcatttgatgtaaaagtgcctaaggtcagaacatatctggattctgtgtcttaagaccttcattcggcaggacctgtgtctagtgatgattactttagaagtctggtgagtccctcatttgtttctatccatgaataaacgaagcagaaatgtaaacctttgaaagaaacttcctcataggtcaaatgttcgttgtatctatgtaggatttgggtctaagactcaaagtttttatctactgcaattttcccaatcttttgaaaatcatgctttcattctagagtgagttagtttttcaagttgtatttcacaaaaagtttcaaattattatccatgctttgtttatgctttcattggaaactaatttattcttcaaccattatttttctcttattgatagcttgccttttgtagatacatcaaagcattaattcttctatctgacatttttgttcaatggttgtatgttggtctttgcagtgcatagtggaggaagttcagggtccaacacaagc

SEQ ID NO: 9635 - DNA, 2949 bp, Citrus clementina
  Intron number 1 from transcript clementine0.9_005442m (loc us clementine0.9_005418m.g) derived from phytozome v7.0 (c hr-ID scaffold_2; pos 4244333 to 4247281)
gtcatttcttgagatacaagtggtaagtgcccgtgaattgagtcagtctttgattttttttgtttattcatttttttaggtttttattggtttttgctttttggttagttggggttggagtaaaaatgttatttatttatttttttttttgtgtttacgagtaaaaatgaatgcttgagggtgtgttgtaatcgatggttttttactctatatgtgtttacgttcgataattttctgattgatgggtttcatgaaatgtgtgaattttctgagttcttgtattaggaaacagtatttcaatatgtagtgctatccgttatagtagttatattttctttgaagaacagttgaggattttgtctgcagtgttaatggtggaattatcatttgtaacctttaaactttgcttgcatgtccaagttattatgagcaggcttctttgaatatataaatttcttatttatcatgaaaattgttattggaatccccttatattaatttaggaatagacccctttttcgcaagaaaattactctttagagtaaatgagtagtgaaaaattgcatacctatttttatcctgtatgcatgtggtctctgttctgcaaaggagcaatttgctgtcctgagacatattgtacataaatgataaaaggcagaccttattgagagcacaaactgtaaacatccagtcaagcagtaatatgactacagattatatttcaataagttttatgaaggaccttcagcaaaatgtgtggataatggtgatggctgtataactttgccctctgcagtcagagctgaacgctccaaaacagcattgggattgttccttgattatttttgggctttgacgacactttatgacagactcgaaacccttatcttctgaaggagtttatgaatttggaaattaggtatgaagtgttcttttagaatcccatgatgtatgtttcaaatttcgacgcctatggagtctcttacatggcaatgagggaacaatttaatgataaatctattttgctccttggcacaaaagatggcatctaaaatggaatgaaaacatattattgaaattggggtcaatgagagactgggtgccattggacaagatagaggtggatcatttttttgataaaaatgctaatggaaattaaaaagaactagagaaataaagacgaggatatgaatgaccatctcgacatttagattgtttggccccgtttgattttgaaaatggagtttcctcatccgttctttcaaggaaattattcatatcccttttacgcatgtttagtggagaagatgtgatggttaacttcattaattttattaattcctttgtcattttttatcctgttctttctctgaatgagaactcgaactttcaagcagtcagctgcggattgtttgacaccactttgtcgtgaagatggtccttgaggattcactcattattgttttattagcatgtggtttttgtcctgtgcacacgatgaggttctattgttttgattatggttgtaatgttggttttggttttgtgataagtacgttattgtcaagattgatataataaccacatgagtgcctacacatttaatggtttaaaaatcatttatggtgctagtgcctatcaatttctgttaagacttgttatgctactcagcccacttcctaactttgaaacaacgtcagacatacgtaagaccctgtacagacgtgtggaaactatgaaattagaatggaatatgcttaaactaaatattcatctttattctgctcttgctctagaagtgtgtaatatcttatattataaaattctttgtaatctaaaaacattctatggaaaaatgaaaacgcattacctagtagagattgaattgaggtttccaccttagaagccgatgaaagcatctttaagcattaggtttgattccaaatcttgcaaaagagcttgggaaagggatatagtagatttcagtgatttttggataatcatgcgggaagttgaagacattgtcaatgtgatgacacgttgagggatacgggttttgccaacatatctctatcgttgccacatattggtattgttgatacatgtcaattaaaacgtacatgacaactatgggactgcgtgaactattcacatgaacttgctttggggtctctctgcttgtattattagattttccaggtcttgattcgaactaggtagtgcgtttttttattttttagttgttgagacagcgatattcgcctttatcttcacaaattgaatttgctgataatctaaggaaataaaaaatgaaactccagttttacgactcacttagtggtaaaaaagcaggagtaattgtcccatatcttgtagggatagcataggaatggtaactgtgtaaaaatggatttggaatttgaagatctcattgtattatgaatacataaataattaatcgataccaatgaaaaatcagattcagtaattttgtatcggtggttttacattgtgtccttatatagaagtttggaagttattggtaataatgtgcaaaaatgactatgttgtgtcgttacttgctgctaggaaatttgcaagtttcaattttttggcaagatactggagcgtagttatagggttaccttttaatgtcttctctagcattttatttaaagttgacaattattctccccggacttaatgactaaagttaatagaatatacaccagatcgttttaaggcgtacgatatagcatcattagatttggaaaatttcatttattgcctaatgattgtcttgttccattttggcatctgtatatttattactgagtaatcaggaagttagtgcgtagactgcattacctggcccttttatgcttactctcttactctttggtttattttgcaggtatcgtatacaaagtgatagaaaagttgctgtat

SEQ ID NO: 9636 - DNA, 2117 bp, Citrus clementina
  Intron number 3 from transcript clementine0.9_011071m (loc us clementine0.9_011090m.g) derived from phytozome v7.0 (c hr-ID scaffold_67; pos 1075347 to 1077463 reverse strand)
ttcatagacatcttaccaggttcgtgatctgttgaatgtgttttgattagatttaagtttctaagtcaacttttctttgtgatgcaaacttagcaagatattatatgaatggttcttgcacttagttcatgatggaaggttttaattactggtcaaaggctacggaacttgactacatgcatgcaaatccagcttttatctttaatttagccttgaccatttggaattttttttagctgccattcaatcaatttcttatagaaatccactttctattgacagagaattaacgacttttccctgttatttttgtcatttcattctttcaagagaggttgctctcttttagatttgtttcctgttaccacgtcatattctgtttgaccagttaacatggcactctgagctgtcaacttcactcagggctatatcattctattctatgaaggaaggttgcatcttttgacatgtgttctatgcaatcacaccaaatcgagtttgatgacataactctcactctggtcaactcaactcagggcaatatactctttactcttctttcttgatcaaagttaaagatgaaataattattactttcagtctttgactgtgtcactaggcttattgtcccattgtcactacgtggagtaatttttgtttattttgccccattgctccaatcttctggaacccacaacacatagttgatagttgtcaatgtgcctgtgtctccctagagtttctttcgatatggaagttatttggcaaaagatgtttaaagatcaatgtttcctatccaaccccccccaggggactcttttttctttttctcttctgataatagtctctctttctctgtcctccttatcttcaggaaattcctgtcttgtgtgattctggatttttaattttcttgagctttaaatctttcaagagttgcactttcctggcataaatcctcataattggaatatctattcccattcatcaaggtagatggataagtatgtatgtatcatgatctatactattgatgaatatgtaatgcgatccacattaatttgtggaacagataatcatacatagtcatgtcttgttgctgctgcctgtgagtgatcagcaaatacatactgtcaatgtcaggatttttcattttaatgaaaataacatgcctagtggtaatcaattgtatacttttgttgtaatattccatggtttctcctatcatctaaggattaatcaagattccatgatatcacttatgatcaaaggattaatcaagtattttaatcaaatgtctagatgggtatagacgttgcataaatcccttcaggacgctctatttggagcaggagtgagctatctccatctttgagttgcaattatttaatcaaatttctgaaccgcacttcatatgtttgaaggttctatttgtctgcttattttttctgagacactaatatgctttgtgtgcttaaggacaatgtaacaccctacgcaaatcccacatcggcaaagcacgggagagatgttaggtttataaggggtgatccacaccttaattagcaagacgcgttttagggtgtatgggcgccccagaaacaaacctgtgcgggccttgttaaggcccaaagcggacaatttcttgctaggtctgagttgggtcatgacattatggtatcagagcagctccgcgtatcctcttgagcgatggtggggcaaacctcagcgaggacgctgagtccataagggggggtgtatgtaacaccctaagcaaatctcacatcggctaagcacgggaaagatgctaggtttataaggggtgatccacaccttaattggcaagacgcgttttagggtgtatgggcgccccaaaaacaaacccgtgcgggccttgttaaggcccaaagcggacaatatctagtaaggtctgggttgggtcatgacagacaatacataatttttggttcaacttcttgttttgagtaatgccattttacttcttgctttagtagttgtgaaacatttatgctcttcttttatactcttcactgacaatgtgatcttttttcatccggttagtcctgattcaagggttataagattgattgaacgta

SEQ ID NO: 9637 - DNA, 2495 bp, Citrus clementina
  Intron number 1 from transcript clementine0.9_001372m (loc us clementine0.9_001372m.g) derived from phytozome v7.0 (c hr-ID scaffold_67; pos 1171772 to 1174266 reverse strand)
tcgtttttgatccggatttggtcaaagtaagtcctcttttggttttgtgaacaatcacccaaaaaaaaaaaaaaatatagtctgtaatttgtgctttgattgattgtatgtgatgtgctgcgtgatgggttagctttaatttaataacaagtgtcttgattggatttgtttttgtttgactttagcttttatttttagaaaagttgaagtttttcgtattgttcaaggattatttgaatgatgttttagtgtctgttttgtaaaagatggagcataagctatgatcaaatgaatgtttgttttggttttggtgaaaagtactgcagacttaatgcagtttagtgtgctttgatttgctctagtgtttacgaactgcttcgtggtgatctgttggataatgaactcgtgttggcattaggaagaaaactatgtcaatgttttgaggtgtggccaagtttatttaatctggttatactgtgttttggattgattttggttggattaccatttgataatggcctagtgttagttttatttctatgctgcaatggtggtttcatttgagtgtcatcttccctgctatgaaaatgataattagctggatgttcatatctggtggacttggataatgatcagatttacattatgagtgttggagcttctggggtttatcgaatttggttaagactccttttcaagtattacgactttttttttctcttagtaggttaatttgttcttgtttttgttataggctggattgaaatatcgtaattaatctactaatagcaaagctaagctatttaagtcgcaacttcaagtatctggtaattactgttaaaagttgggttaaataggtggattctggtgttgtttaaatgtggtggatagtccctcatgagatgtttctgctttcctatgcttaggctagccttaacagcagttttttttgtgatgtatgtcttgtaatcatgttttaagttggtctaattctgtgcttactcaaatttttatggtacattggatcaatttaagatttaaactgtaaattgttggtaattggggtttcatttttttttaaaattttttgtttcgaactttatttatttaagttatgttttaactgtttatttatcttgcagtttctggtcaaggtttaatatgatctctatatcttaaagttgtatatgctgcttggatttttgatctgtttattggtcataattattctgaatttctagctaatgtatctgctctgaatgcctcaactcttgttttgttattttggaccattttgtggatcatagttcttggagtgggttcaataattgagtttccttggttcaaaatcctatttcttgtcttggtgcattagaatctttgggttaaagtctttttcttgtgatcatgtagttttaatcttaatcagagttgtgtgggatttcattgctggaagaacgattatgctctggaaatttttagaatcttattttggcatcctgcatccatttaaaagggtaaatgatagttgttgactttcaattgactggaaaggacttttgtatgattatagactgctcatttctgaatctctctctctttgcttttatgtgtgtgcttacctttcataaaagctgcaattatgattagtattgggattaaattttatttcaattatctacacttgcttttaagagttcattactgcacttgatggtgttttctctctgttgtgggtgtatgtctgtgctttaattttgggggtgcaataatgattagcattaggctaaaagtgatttatagaccctctactttccctttcctaaaagagtttattattgcacttgatggtgttttacttgagcaactaacccaaaacaaatgacataagatcctgattttctattgaatttagcaagttttgactgacctgttagtctttgtttaatatcttctgttcaaccaccttttcttttttttttttcttttttttttcttttttttataatttagtttaaattattctttatagttgttcctattgtatgcattgtctctactgcagtctttacctgcttttatacgaactcccttttagatacaaatttcagatcttaaatcataagaaagaatcttatagatattcttatcaaaaaagaaagaatctcatagatattaatttggaagcttttattttatactgtatttggtagtatttttctttggtcaaagaggacatgaatgaatctattaaattaccttgttgtaaggacaggagtgtgcgtcagtgtttttgaattttttattcatccttttagtaccccccgaggccctgagtaatctagtagtaatctagttagcatcccgggtcctgcccacactttctggccatgacaagattctttttatttttccgcttctcttctctcctatttggaaactatgaatctggctttctgtgcaaactcaattatttgtgactcatatgatttagg

SEQ ID NO: 9638 - DNA, 1316 bp, Citrus clementina; identical to SEQ ID NO: 9085
  Intron number 5 from transcript clementine0.9_003307m (loc us clementine0.9_003307m.g) derived from phytozome v7.0 (c hr-ID scaffold_26; pos 3177842 to 3179157 reverse strand)

SEQ ID NO: 9639 - DNA, 1799 bp, Citrus clementina
  Intron number 1 from transcript clementine0.9_014849m (loc us clementine0.9_008250m.g) derived from phytozome v7.0 (c hr-ID scaffold_58; pos 494449 to 496247)
tcgataatctccccactgggtgggtaccatacagaacaaatcaataatatcaaaataaaaccaaaaaaaaaaatctacttttgtttcgtttcctatattatcggatttatttttgttagaaaagtattttttttgggactatgattatcattattttcatttatcgattttttattttgtcttatttggtcttgtctaatttaatcatctcatatttaataagtgattggtagataaatttttctcttggtgtttaccacacgacaacggaaaaaaggaacaaggaaaaaataaaaatctattctttttcccaccgtgttggattcttttaattaataataacttttatatcgataattttgttggttggttgcgtaattgatcattattcaagaccctttttttttttaaaaaaaaaaattgggatattgattgtaagttgtaatttatcatttatggtattgtttttgtatgatttcaattggtatggttggaattagtcgtatttaatgtttgagctgatttatcagatttctgatttctatcaaattgatagattattattggaactgccaaaaatttatttttattcttgtttgagagctcttattatatgatggaaaaatgagaattctttgtatgttgttctgcaactcttctgtgtgaaagaatcttttttggattgaaagaaccactacccatgctgtggttcattcaaaacttgctgcaaatgggtccggttaattgttctaatggacatttctgatcggaaaagcatattccatttctttttcaaaacttacttttttgtttgcttgggatttgggcaatttctcttttgaaggttagtaaatgtagcatttgctttttcagctgcctaaacactgcccaattggtttccttttcttatcgttcatcaaataccaaccatcacttattttattttttaaattaagagatcttttactttctgaggtatagatcaccatccgattattcgtttccttttccattttaagcatataattggtaattgattgtaagattcttgtagttttcctacagctttggttctctcttttggctgtttatatgataacgtgatggtttggtatagaggtacttttaaaagaacacttaagtggaacgacacttcacactttgaaagataagcatcaattggcataatttgtgatgttctggtttttccttttttctgtatgtttatgttgtatttgttaaggactacctcgtcatttctctttataaaaaatggctctaattttcaaatttatttgtaccttatatactgaaatatgagattccgtcagtaatttctattacattggaacactttggctgagggtctttaactaatgatagtttttgcaattgactgggatgaaagaactgctatgccctagatgcgtttttctgttatttttacattgaatatatgtagtgtgagagggtaaacgtccttgatttgagcaattattgctctttgcagagaaacacgagtggtctcctagccttggtagtagggttcctcataattaccatatcaatggttgtggatgaaatatgttataacctctaaatgaaaagtaaggatggaaaaggatgggataaaattggaaattattaaagagaagtggcaagtgttttttaaataggacaattgttttcttacgcacagttttttcctgctgaaaatgtaattttagttagatgatttttatttttgctgatgatagctgttgaatatgcccatcactgccacccttaattttacaggg

SEQ ID NO: 9640 - DNA, 921 bp, Citrus clementina
  Intron number 1 from transcript clementine0.9_026196m (loc us clementine0.9_026196m.g) derived from phytozome v7.0 (c hr-ID scaffold_3; pos 8259767 to 8260687 reverse strand)
agtcggcgcacattaacctcaaagtcaagggccaggtatttacaccttaattttttgtttatattttttgtaattggccaaatttgaaatttctatttaattaaaaactgttttatttttgtaatttttttatatattgttttttaaaaggctttcaagtcatgtttgtgaacaaaatttgtgcgggaaattgaatcttggccgaataaatagacagtttctgggaaagggatagattcattaaaaaagaatgatgttggtttgaactttgaaagattgaaaggcactaatttacaattgttgccctgatttttttttatccccgtttttggtttttgatggtgaaacttttataggggaagtcgattctaatcaatatgattagtaataaattggttgatgcatgttgtttgataaagtgtttctgacattaaaaaaaaaaaaaaaaggtatcatatttttttggatatttaaataatggtctatcgtagttatgcatcctgttattgcttcttatgttaagaattgcatagtttttcttttttctttttgtgaaaaagaagaattgcatggttgaattcagtatagagtgaaattttttactttgtttttttttttgcatctcagtatctgctagtattgggggaaatttatcacatgaaggtctactgtaggagtttaaattaatatttaattagcatgttttagttgtgtctcctttttatatagttgatggtgcgactgctgaggctggttaattagagctcttgtttaaaattttcaataattttacagtagaaggctgagttttgaaccccctggagtctattgcagttgaattcacttatttaagattatctaatgggcacctctctttactttctctatttcattttaacatttaatgtttaattatgtagg

SEQ ID NO: 9641 - DNA, 2694 bp, Citrus clementina
  Intron number 1 from transcript clementine0.9_029752m (loc us clementine0.9_029752m.g) derived from phytozome v7.0 (c hr-ID scaffold_167; pos 29608 to 32301)
attggagtagcactgttcttaagcacggctttgaggtctctccgtctctcttttacgtatttgtctattgatcgacatctctaaatatacattgatagaccaaattactcttgttttaatgttttgtttgttgaactttgactgggttatttgtttatttgtctcatatgatgttaatgcggttcctatcaaagtggatatagatctatcacctcaaagtctgatttcaattttcctttacttaatcaactagcatcctttccaagtccagatacttaccaatagtgagactttgctacggaagtacaatttctcttgttttacagttaagtatgtaagaatagtttcaaatttacagaattctgatatagttctctaaggaaatgcgggtggtgaatatggttccaacttttaataggctttaataggcccatttgttcagccacagtgattgcggtctaaattcttctttgctgtctatatgtgttggagtttgtctattgtccaacttctccaatggattccatgcagggttttgatggtctaattaagagaaagatcaacggatgaccttttgaagaaggcttacacaacaggccatctcaggatgtcatggctcagctcaaaagtccccaggtggttgttaccaaagagtgccattgtttctgggcttgggctccttggcgtcaaacaagatagtccggaggaaggtgactgcataaatttcttggagttaatgtagtcaattgcccaattttgctgcctgtcgaagagacacagcatggaagtcgtcatcaaactctgagacacctaagaactagtaggaggtggtggtattcgcctggtgtttcctggcaagtatggttcactgatacagggaatcttttcttgatgtctaaatactatatgtgatacaacgttgtatatcccaattcttctccagttaaattctagtgagttaggaaatttaattttgttttagctatgaattatttcctagataataataattgccatgttcctttgtagtcttatttattccaactttaggaaattctaatgagttaggaaattatgcatcgtcaatatgtttttttcaacttttttaaaaatacacaatttttatttgactgacttgattttactgacataattttctcccatttctatattatcgacgttgagtgcatgtaatccacaagtctgattgagccaaaagtccaatgacactcacgtccaaagatgccgttatcacaaagccctggataattaaagaggtcattgttcgaaagaaaagaatgatttgttggtatgaaattatgttaaaatgaatatatcgctttttttttttgcgtgagtgatggcttcgtttaatgacagttggcagataatgagtcatcttttaattttagttttgatttattagaaaatattaatttttgtagtttcagtagatgaaatttcgaatcaaatattaatatcgttaaagtacgcaactcaatatttgcttaaatcaaaaaaaaaaaaattgctttatattaaaaaataataataataagtgatcacttgatttaacttcctttactaaatttacgatttaaaatccaaaatagaaaaatgaaaacaatttttggaatcacactcatcaccaccatcaacatcaacattcatcctttaccgcacatcaacatcaacatcaccaccatcatcacctttcactaacattcactaacaatagtaaagaaaaacattcactaacaacccaaatcactgatatttacttaatttctcactcactctaataagggcattgggcgggggacaaaagaagtgttgaaattgaaaaggttaatggttgaagcatgcagtgttgcaattaagttattattgtcttgaaataacaggagatgatcagatgctggttaaagcatgttgtttctgttgcaattgtattggcctggttttagggaactgtcagaactttcagaaaaagatggagtttctcaaaccaaatctaagaagatatctcacattccccacgtggtctcaatgcacaggtaagttcttctctagctctgtttcttcattgtttgttatttttaatgtaactaagaagcagagttaatctcttatcttgtccttgctttgagaaaactgcttttacatctatttttaattcacatgtccacagcaatttcattttagtttgagctgagtgataactgttcaaggctcacttactcattgcgagaagctccatgtcgcaggctgcaaggattagcttgtgcaattcctgttcagaggcacattcattcggagtaattcaattttagattttcatagtgtgtacgtttggttgcgatcaaaattagtagtctcttgttcttaatcttttctgattttccagttctttaggggccataaacagttttccaagtaccgcatgtggctgcaaaagattgatgatgataattatatctcgaaggttttaaattaactgaactctgagatagttctctaaggaaatacaagtggtgaatattgttctaacttttaagtgccttaatatacccatttgttcagccctgtgcgtaaacaatcagtaattgccgtccaaattcttctttactgcctatatatgttggactttgtctattgttcaacttctcaaatggattccatgcagggttttta

SEQ ID NO: 9642 - DNA, 2233 bp, Citrus clementina
  Intron number 3 from transcript clementine0.9_010008m (loc us clementine0.9_010003m.g) derived from phytozome v7.0 (c hr-ID scaffold_87; pos 255997 to 258229)
ttctttcctacctcgtaaatcttgcttttacggaggtcagatttacctagcttaactgtttgctttgctttcataaacttgcgatacttgtgtcctgtgtaacatggtagtaagtaataaaaacttttgtgagatttgggtctctggtttagctatagatcagaagatgaaaagatggatttaccttctattcttatacatatattggtcttgcttttaagaagttccattgaaaagctatagtgaattgcattttttcaaaagagaaggtcttataaaaataaacttaaaccggtatccaaggcatattgggtcaaatattcgtttaaatggtctattcatgggcccttcccactttcttgaaacctccttttgtagttctagatggaaattattttgtactctttagttaaacaatagaattgtgaaaggtgttaaatatctaatggtgaataaattagtttatgtggtgaataagagttttatcattttcttctttggagtttcttccttaaactcagtagttaaaggattacccttttcatgaagtaaattcagttggctttttaagtgatgaattgctatgacgattgtacttctattttaccaaaaaagttcttgcaggaaaaattgtcatatccttgctccttatacatctcagctggtgtgaaaggtttctcttctgcagttttgaagaggcaccaccatgttatatattggggtttgcattttaagaattccccttagacaaatcactaaatgaatctgtcatttgtttttggcataatttagatgataatggcagtatggttgtaaatagcatctgatgtattcattttttagtataattctcatattagagagaaataacatttgcttacttctgatttttgggaaaaagcagtagtgaaagggacttgcaaaataattctagaagcttttctctaaaaaactctttgtcagtaaaggtgcaatttagttagaattctgcaagcactgtgttttcttggaagcaaaagacaagagttacttgctttttgaatcatagtttaatttatttatttctttgatctgtttgtgataaaaatcctagtagcattattaacaagttttcaaacctcttctgttgagaagggttatattaaccttcatttaatacaaaattttcaagatttttggttccataagaacttttttgacccccccgaatacttttgtgaacttagaattagtactctctacatgggtcattgacggtaattgattgaccccgtggaagagtgcttttccttatttcacaatatattgctaatgtgctgtgtttgatgatgctataaatctggttccgactgcctcatgtttgggtaatggtatctaaggcttccactttaagtatttccttaactcttttgaattgtagcttggttgattcctttctttcaaatattttactgcctcgatatctcaaattttactttgctgcagtttctcatgttccggctttggcagcttttatctttctccgccaccatggaattttattctgtcctgagtcctgacaaaggtcacactttgttggtcttctgtatatgtgtctcaattcttaaaacttatttctggctattctgaaagaatatgcatggaattgctgctttcaagcattaatagggaatgcatttagtttggctggaagggagtgaattagttaaaatatgcttgtggtgttccaatttgttgtactaatctatttagagatttgatttaattatcttgtccctcttttattattatcacacttttttatgctatttgtctgcatatgcttcacaaaagagtttttgaggaatgacttgatccagtgccccattttggagttagtttttacaaattaatggatttggctcaacttaagatgtaatgtcggtaactctgagatctttcattgacaactaaattatagaaatatgttccaccaatcagtattacctggtcgggaagtttggccggtggtccaattcttaagatgtgtatctctaaggattttatgattctagggttgagagagcgagtagtgagatggagccttgttggacgattgttggctttgagaacactttagctttctgagcatcttttaggccattgtaggtcttagattttctgttttgagggtgttcacatccagttttgtgtagctttatgacatgtatttgcttgggcagctccctggaac

SEQ ID NO: 9643 - DNA, 663 bp, Citrus clementina
  Intron number 5 from transcript clementine0.9_007523m (loc us clementine0.9_006752m.g) derived from phytozome v7.0 (c hr-ID scaffold_3; pos 4638215 to 4638877 reverse strand)
cactgtggaaacagcaatttgtggattcaattgcggtaccataattttagctgtattttagatttcttcaaaatcatattttgagttcaagagtcactcctcaattctcaagagtcactcctcaattctcaagaatcactcctcaattctcattctttctctcaacgcaataccattaagaatggatcaaatatttttccttcaaaacaaaaaaatgaaatcttctcaattgactccgtactggaagcatcctaaaattgtagtttgttcaaaactatttccagttgtatttcagaaaacatcaaccattgcagtccctggaatgcaactttgactgtttaaaatgcaagagaaatatattctggttggggattttcgaaagtttagactcacgaggcggacatttgagttcacctcttcatgcttgttcatattgttaaattgaatttattgttgatatgaaaattttattagaataggattgttgggactcctttggtatgatttattaatgtctacattgtgtagttgcacactagtaagttttagtggtttttcagtattaaatggttcctctttttcatttttttccaagcatagtaatagatcctcacaaattatttctaatttcttaaacagttggaaagcccagaatctaggaaa

SEQ ID NO: 9644 - DNA, 1834 bp, Citrus clementina
  Intron number 2 from transcript clementine0.9_002039m (loc us clementine0.9_002039m.g) derived from phytozome v7.0 (c hr-ID scaffold_128; pos 137273 to 139106)
tggctgcaggctctcaagtcagtgtttcaattgtcatttggtaatgttgggatctttattgtgaatacatgcctatttgtgtgcgttctttgatgctaatgtttcttaatgatcaatattttcaatggtttgtctggtgcttgaaatttttctgatttgttaaggactatatttaactggaaattttacgtttttgaatttgtggtgatagatattttgactaggtgctggtaatttttaataaattaaacagctcgtttcaaaattcctatggtgctagattttttgtgatattggcaatggttgtttaaagtgcctgagacttctggctagtaaatggaaagaaattaaagcagaatattaaccagtgcatctactagcagaaagtgtttactttttggtgtgtgagttgtgcttcatactcatccattctctttagcatccgaacatgtatttctgcattttcgatgtttgctgttgcaccattgtggttgattcatgtgacaccaccagtgtgttaggaaatggatgcatgtaaatagaagagtttgattattgtgcctttttgccgaccatagaattgaacccacgattgccaacctctgtgatttctgagatggattaatttttcctgattttggtgattgacaaatatttgcccacaaattttgtgcttttagtagtccatttgatttgatttctttttagcacttctaaaaaacgggcgcacatcatatttagggagtctttaatagtgaaatgattatggatgcaaattactagttcttagtatcatttttacttgtgttgagaaattaattcttagaatgtaaatatgtgatattatatttaataactgagctcatccatgcagtttaatctataatatgctttaagcaaataaagctaattatttcatctctgagttggcattctgtgcatgatacataaataaattttctcactgaaggaatttattgattgcatttgaagttttgtttgttctaagtgaattttctttagcggtcatttgatggaggcttacatcctgagtaatctagtagacttttaagtcaaatccaatctagagggacctagatagtcttctcagttcagaaatcttcaccagacgctacaagttgtagctactgtggaatctgagaatgctgccaaatctatatcaattatttacttcccccctcatggctatcacatttttctggtatcaatacactgttgagcaaatagtaaaccttctgaaatgtgggaagtctatctgagttgtctgcattttattttgtttatcacaatttgttgcttaacatttcctaatgacccataaagatttataaaagaacagagataatttttcactagctcttgaaaatttttaacgagatatggcattagatgtgtgaaccatagaagcaatattctattggtccttatagaagatctacagtggataatttattttccattcatggggttggcaggtggatgggttgggggtgaggaaaggtactgaggataggtggagaagcagggtattggggtcaggtggggatggagcctttcacttttttatcatttcccgctcatgatatttttagcttatgattaaatttgtagaatgcaaatctattgattctattgcgagaattaaagcttaatgaaacgttgttttcagagttgtgtggtagtaatttatgaatcaatttgatatatttttatactaatgttatcatttttttggtaagctacaaaaggaagttgtttaataactgtatttcatttaggcacagtgatactaaagttgcagcaaagaatagaa

SEQ ID NO: 9645 - DNA, 893 bp, Citrus clementina
  Intron number 4 from transcript clementine0.9_027562m (loc us clementine0.9_027562m.g) derived from phytozome v7.0 (c hr-ID scaffold_34; pos 1745912 to 1746804)
tctggtttggttggaaatcttgctggtgtcttcccgtaagtgtttttatttgcaaattttctgttgcacagggatcattctgtggtttattaccttttcaatggaattgcatacattaagcagcaaggatgcagtgaggacaaatatattatgcatgcgttgtgaatttgtggtggcaactatgctatgactggcagtatttatccatgttgattttactgtttgtcaatctaaaatgatcttatttggtagtacatgaaggcaacacatacttgaattattatatcaatgtagcttttggttgaaggaatcaaatatgcttaattatggattgggctgaggatagtggcatgtggattgggtttgaatatgatcagctttggagatgttgttgctgagctgagttgttttgtcatcaaagtagttgaagacattggatgagtgaaactgattggcttgctcgctcagatctattgtctcttatatcttgctgcgtctttttcttcactcagatttgttttctcccattggacagaaaagaaaaattgatgtggatataacatccaatagaataggaaaaaaaaattaatcataaattttttattcttctttgctgaagcattcatagaatatctgaaaatgtcaaatctccttcgtagttaggcatttttctgtgatgggtgcaattcggattgtttaactgttttttggcttcttgatggttcaatgcaccagtttaggtcttaatttgttgatcattttgagtggaacttatgttataatgctttttctgttttctctctccctatttttcccccacagttttgtgcgatgcatctggttgatgaaattttttattctttgcagggcttctgccatatttcttggcatat

SEQ ID NO: 9646 - DNA, 3690 bp, Citrus clementina
  Intron number 2 from transcript clementine0.9_025702m (loc us clementine0.9_024061m.g) derived from phytozome v7.0 (c hr-ID scaffold_24; pos 2223229 to 2226918)
gcggttccatctgaaagcgacctgaagaaattaaggtagcgtttattattttgattgcattgtgaattctgaggagtgtaaattctaggattaggagtgtggagtgggagtgggagtaggttgtttatttacactgaaataaaagtatggaatggagatcagaatttaatttatgtgtttactttgttttgatcttgaattgagaataaatagttttaaattataattttatctttatttaaagaattatagtttttaatatcaaaactaataaaaaatatatttaatgaataatatttattttattatatttgtaaatttattataattattaatattcttaattatgaacaataaattattaattttaattttaatataaaatgaaatgttattttattttatttaatataattatattaaatttattattatataaaataataatataatattatttagtacaaaattaatattttattagaataaagtatttattattattaatattaaataaatatagtactattatttttaaaataaatataataatattatatttattaattctctattaatataataatattattttaaaataattttaacttaaaattaatgtaaattattatttagtcaaatataatattattatttaaataaatataatattattattcaaataaatataatattatttatttattttattaattataaaacataaaataaaaaaaatggtagaaatgggagagttgggagtggattcccactcccactccccactccaaaaatgggtggggcccacggagtgagactcccaatttctccccgttttaagtaagtaaacgctggagtgggaagaatccacactcctcactcccactccagcaagtaaacacaacataaattaaaaaggattcaaaattgaaggaatggattttgtcctcatatatatattttttaatatctttaagttcggcaagttatatgacgctcttataaaatacttttaaggcaatgtttgttgtttggtgccgtttgcgttttgctgttttaacctctagttgccgtttacgatgttgttaaaaaattgggtttcgaagtgcttttggtagaagctaagaaaacacttcgaaattgcttttggaaacgtacatttcagttggtttctgctttagacatatcacttcttagccttctacaggtgcttttggtaatttcaaaatgcattttgtttgattttttcttttaaaaaggtaagtgtgggttaaggctaaatttatttttttaacccgttattatcctctaatatcttaatttaataacctactaaataaaattatttgaaaatcactagctaatgcaaaatcaaatgactcagtaacgcggatgattgattcaattaaaacattagggaaaaaaaatgaaaaatggttctttcattactattaagtgcttctgatagtgccagctttgcttcctaaggacttgcaatttctttgtttaaagtgcttttaattattttaataaaatattatggataattgttgtcctgttttttggtaacaccgaagatagttaagaaaacatactgttaagtttaaaaatgatgatgtgaataagcgcttttaggagaagttagaatccaacacggctctgttttttttcaacttcaatcagagaaggaatttaagtatctttgtaaagtgttaaaaagtatattcttggaaagtggtttgatttaatggacagtgaagttgcttctattaccgctctttgaagctttattcttttatcttttacctttatctatttgtttacttttaaaatgaaattaaacaagaacaaccatcttatttgttttgttggtacaacaatatttatcctcaaaaataaaaattgttggtgggtttgattaatacctgcatttgttctcaatttgtctgtttgaataataataataataataatacttcaaaattaagccacagaatctgcctttttaccttgttaattaattatttgttatttatggattccattttcgatttttatcttaggagaaatatttgtgtatgactgttgaggtggtttgatcaatcaattaagttcttccattgacataataggtggactccatggtgtgatcagtaaagtcaattttaatgcggtttatagtgaaaaaaattcatgatcccactttggactctttgtgacagagctaagtaggtttagaactagattggttaggcataccacctcataagtatacgtaaatttttccttttcactataggtcaatttgttctgagtagagttactctctccaaaggggaaccctacctaaatcctaaagatagttcaaaccaaaaggaaaaaaaatggttaaactcctttcaaagttgaggtgggtctctcttcggagagagtattatttcttgcttattcaagttttggatcaattgaatatttaacaacttggtcaaaactttcaaaactttctttgattttcaattttctgagttttcactgcagttggtttaatggaggctaagctcttttcatttcatttatttattttatatatttgtcccttaattagttgttggttgtttaaaagaaattttaaaagttacagtaagttcacatttcaacatgtaattatccaggctggcatggacacggtgactgatagtatattgtcatttttccttgctttagatgcatggtataatctgagagattaaatatatatgtaaggattctcatgtgcagacgttcgcactttttaaaatgcagatttatgttagttcatgctaattagctcaaatttaacattcttattcatgttaattagctcaaagttaacattttcatatctgcattttaaaacgtgcggatgtctgcactaaagaatgattatatatatgtttctaagttttaacaaaatttaataagatttaaaatttgttcattaatatgaaatgggtgctttatctgagatgaaatgattatgctaacacaagaatgatatagtcatttcactcatggatcaagaacttggttattacaaatgaaagaaatagcctacagactctagtttgattttatttaaaactcaagatgaatgaacttgataaaaacccaattttgaaatttatacttttattgagtttagattcgtcaatatcgcgtgagatttttttttttttttaggtttattgagcaagtaaatacaaaatttgggaagaattaaggattttttttccttaaaagagcttaacaccattgttttgacttctacctattaacttaaaacttttttcactaacatttttcatttggaagacaaaatgaaggcaaatgctaagttacagttgctgtaacatgtacctgtccaattctaagtaattgaggtggggtcaccacatgatttgtagcaaacttcaagttatagctgctgtaaattagccatgtccttaaaattaaatgttaaaaaattctaaaatttatttaagaaaagagtaacatctaaaaagaagagtatttcctagtaagagtatttatataacatgaatcatgtctgttgaagtatgataaaaattgtagagaatgataatgcattgccatctaattttttaactgcatgcagaggggagaaaatcaaagtctgaaaggagaaataga

SEQ ID NO: 9647 - DNA, 3479 bp, Citrus clementina
  Intron number 1 from transcript clementine0.9_001130m (loc us clementine0.9_001130m.g) derived from phytozome v7.0 (c hr-ID scaffold_15; pos 4022788 to 4026266)
ctacgaccgaccctgctgaaggtatatatatccattttctttaacacatttaatttctcctcgttaattaattctcttgctagccagccaccgcccgccgttttcttttcttttctttttcttttttcttttctttgtttaatttgacataaattaattatgtgtatgtgtagtagcttggttcttttctgaaaacaattaactttatatgcacagtgagcttttatattaattaactttctaaaattttatatttatataattctgagtcctaaaattcctaaaaaaaaaatcgtggactttttctgtttccaaaaagtgaaagtagttgtgcaattccaatttattttcctaaatcatatatttcacattattatctctttagacttcaaacaaacgaggctacatatataaagacctttaactatttaacttcaataatttcttcatctaatgggaccacttttttttttcaatataataattataataattgaaattttcacattgagatatatcatagatacatacaataattaaggactatcttcgctgcctggtttcaagcccctattagtcaagcatgtggatccttcttaataaatgagttgaaacgttctgaaaaagagtgatcctaaaccttccaaattatatcccaaacagtacgatataaatgttcattccatacgccaccacccccaccgcaaaagggccaaaaaaaaaaaaaggcgataacttaattaatttagaggcaggactgaattttggcattctttgctagaaactcttaatttaatttttatcaaatttgttaactgtgtttatacttttacatcgtacacgagggaattcaaaatcttctaatttaaaatttgttgtacgtattcactctttaattaataataaaaaaaaaacagatattgattttatatataatcatatctaaagtgcattaactctaaagtgtacatatatagccattctctaatgtgtgagctctttttttttttcatacgaatgcattgttaaattgtgcaatttaatagagtcaatacaaacacgtttaggttggcaaaatatggacttatttaagttttttccaagcctgagcccatgtccatattgtagacaacaagcctagataagtccaagtttggatggacaggccttgagccagacttgggcttgttccattaaatataaaataattttttaataaaataaaaaatatttaaataaaaaataattatccaatagataatagaataatagtctaatacacaaaataacacaacataataaatcacaaatactaatatgaaaaaaatattaatttaatattttgagttttttatttaaatttaatttttttttgtataaattaaaaagctaggcccttatttagatccaatttgtgtcgactttatatttttcaacccatattcaggcccaactcatgtcgaccagacttcaaggccgtgtttttgtcaactctagacacgctactaaatcgcacggtttagcagtgtgttcacattaaaaaaaaaaaagtactcgaacctgaaaatgattctcaggtgcaagcgccctcttttttttttttttttaatgcatatcacgtttttaaaccgtatggcttaaaagagtaaaaaaaacataactctcttaaataccatggtttaaaagcatgccgcataaaaaaatggcacccacactaaagaacgactacatcacgttaaaatatataataacatctataccttattcaaaagcatatttgaaatttgcacacttcacatcttactatatatgcatatatcttaaatatatacatatgagcataaacgtgcttaaaatgcaagtcatgcagcactgcacgtcgtggtccaacctcaactaattggaaaatgaactgtatgaaaccctgcgaaaacctagaaaaatttggataaataagaaaatggtgaacttgcagttcaatgagtagatacaattatatatattaaaataaagtagtgcactaataattatacacaatcatatgacataattctacactgaacataatacataagaaaacataaaatcatacatgagaaaaatgcactaaataatacccaggggaaataattgtcgcactcgtcgggattatcattgcgtgaatatagtgaggaataacctcttaatatccaacggaatttaacttcatcacacaggtatagtactctaactctcaatatgtatacgcaaagtacttaacaagaagagtacacatatggtgcttggcaatcacatttagggattcaatcactcatataatgagcatacatataatcatgatatactactaaatcatactattaaatcatctcacaaatcctgactcaattactgttttgttttgtggggcttttgttaattcctaagaacttaaatttcttttaaacacaagattcaaaaattatagaaattttctaattttaaattttaaagtgcgagaaagtccaataaatcttttaaatcctacagtattaaagtgttaatttcataattctttaaagatgtgtaatttaaaaaaaatttcaaaccttttccacactttaaaattttagactaaaaaactactataaaaaattaacgactgatataaaaactcaaaagtatgctaaaaattataacataactgttcatactttctaaatccattatccactaattctcgaaatataaatctaactgttgaattccatgtcccctcaactttcccgtattagctttcattattacttgattttcactcttggcttcttaatttcttttctccttatattttcttctttctattttatctcttcttttcttttcttttctttctttctctcgttttctttcaatttcttctatcttccaattgttttttatggttcgattatgaaaatggtgagagctgcttcaattcttcactttatatgtgcccaccgtatataagcatgcacggcaagcacgcatgtgaagtatgcgtgtgctctaattaagagtctatttgggattgaggtgctgcagcttttaaacttcagttgttgtggaaaaaaaattataattataaaataaaaattaataatatataatgaatataatttttaaataataattttgataaaattattaagatataatatatttttcattatataagtgaaaaatcatatcaaaatagcttaaaagatacagcagttagtatttattaaacacttaaatactataacttttaagttacagctgtcgaatctcaatcccaaatgcactctaaaacaaacagcttgctgttgcttttgaaaatcagcggcgtttggcttacaagcatgcaggtgcatcacaatatgttaatgaatttatggaattaaatgatctcatttggtaacaaactagcatgcatgtgtttgatgagcagtgagggcactgaactcaatactgcagca

SEQ ID NO: 9648 - DNA, 625 bp, Citrus clementina
  Intron number 9 from transcript clementine0.9_031825m (loc us clementine0.9_031825m.g) derived from phytozome v7.0 (c hr-ID scaffold_117; pos 63456 to 64080)
atagcaggcaaagcgctccataccaaaccgtaggcagtatttcttcccttttcatgaggatctattctttcactatgttctctatattgtagaatatgcttgactggttgatgaagctatatacctgaagatcaacaacaaacttcctggtcttggaatgagattggatcgcagcgaccttaatttgctttatcgatcaaggtaagagactatttagacagttacctacaaatgatacttgcaatcttaactatgtaatatatgacctagaatactcaattatggagtgggactgtgagcatcaatttcataaaatcttctcaagcgataagccttgggacgtctttattcatgtttcgtaattattttgtagcacatgtaaccattgaattctttaatgttttattttaaaagaatatgtataaaatcctgattaatattaaaagtaaggggactctattaatctcatgtcctggccattttacccaagtaacatccatctgcagacctggccaaattgatggagcaattgtgcatctgtattatctttcgttcttcttctggttttggagtgcattactttaatctttagttttgatgtgaaggtatccaacagaaataccag

SEQ ID NO: 9649 - DNA, 888 bp, Citrus clementina; identical to SEQ ID NO: 9088
  Intron number 1 from transcript clementine0.9_032219m (loc us clementine0.9_032219m.g) derived from phytozome v7.0 (c hr-ID scaffold_35; pos 17831 to 18718)

SEQ ID NO: 9650 - DNA, 1181 bp, Citrus clementina
  Intron number 2 from transcript clementine0.9_031035m (loc us clementine0.9_031035m.g) derived from phytozome v7.0 (c hr-ID scaffold_4; pos 3962550 to 3963730)
ggatccatttacagaaacgcttacgctttccatcagttaaatatcaattaggtcgcagttatatagctagaataaagtttgctgttatttccttaattatatcattttttaattatatatttgttaattactaaatatgggtaaatactcatctagacactatatgatatatcatgaattaggattcaagactgagttgaatttttactcatcacttaattaataatcaggatttgtttagtttagtccatatatttttaataattactcaaaaaatcgctgttatacatttattcaatcatctcattattctttatttttgtaactgttacatgtttttttcttttaagtagaattttaaattgtattggacaaaactactatttgcacttgaaaaattaaattcaacatctatagaagtaacgataaaaacattttagttaatttcctaaaatgtaaagattaattggacgaaaggttatattgattctctttttcattttttattctttagctatgcccttacggcaaccgttaacatactttgaactatatcctcccttgaaaatgttaattctcaaagttcaaaagtgtatattaaaagggtctagctatgatgccacagttgtatggtaccacagctggatccagccattggatttagttctggtgacaactgtgggctagatccaatggttggatccagctgtggtaccatacaactgtggtaccataactttgcccatattaaaatttcaaaagacggttactggattacaattcaaacattttccctataagcctttctttaaagaaaggtgatattttttccataattagtgtaatttgtgaacacggggcacttagaacattcaccttattaaggagatattatagatatagtcaaaatactatttagtcatacaacaaataaataatattatatgttcaattgttttaaaaaattaatatataagtgatagttatatgaagttggactacatatatcacatatgcaataactaattatattaattctgacgtaccataaacttatgattttgaagttatggtggatacttacttgaatcaagattcacaaaaaattccacctaagtcacttcccttaaaattttaataatggctttttaccccctccattttataggagtcacgtagag

SEQ ID NO: 9651 - DNA, 4980 bp, Citrus clementina
  Intron number 6 from transcript clementine0.9_018058m (loc us clementine0.9_018058m.g) derived from phytozome v7.0 (c hr-ID scaffold_12; pos 2282862 to 2287841)
gtaggtctcaattattatcacattcacgtgagactcctttcctagaagactacgcacaaatataaatataaggctaatgctaagttgcatgcacgtaacttaagaaatcctaaatataatgcaaaaggttggctttatgatatttatcctataccagcactcaatcattttgtaccagcactcaattatttacattttgcacccgcactcaattatttattgtgttcgtttactaagggatgagtttattcattctcattaaatatctctcaacacttatttctaaaaataaatttattattaaaattttaaaattaccctttattaatctgcttctctctctatcttataattgcatattccctttctactctcatattcgataaactaagcacttaatttcacactcttttgagtttatatttttttgtctttcttggtatatcatgatctctattttttactttttgtatataagaattttttttcttgatattcattagcttttttgtttaataaaaattaattttttaatactcaataactttcatggttgataaaaatttgttgatattcacttttaaatgatgaattttgttctttttaattagtgatatcaattatttacagttaaaagaatatatccgaaatgaattgatgagaatttgtgaaattaagaagagaaagaaaggaaatggttaattaagaaatttttatcaaaaattattttgataataaaattcttgaataaaaagatggtataatgaggaaattagtggcaatagccctactctttactacgtttttaaaattaatttattttgtactcttaaaaattttaaagaaatccatttttaaatcatttaaatgaatcatttttattcactcaaaacaccaataaagttactcaacacacccaaagaaaattttaaagatatttagcatatatatgcttacaaggtcaaatcaagttgtaaacaaattctttaacacgattttaggacaattcgtttttgtttatgttgatgcgagattctggttatcctcgttctacgaccagggtctctgctcgatcaacttcaccacgaccaggatctctcctcgtaaagctttttctccagaggttcctgcgcacacagacaggtcagagcacgccggttgttttcccggcgcaaacccttcgacgctcaagtcagatatgaaggttcggggaacgcttgccacaaatcttatggctattaggttgttttctctcttttcttagttcaaatagcaaaaaatctaacccttttacctttgttggctacctttttataggcttcctctgagtcccgaccttccacagtttacgcctgttattctccccaccttcggatgtggattccccatttccgtagtcgtgggtggttgcgtggccttcgtgcctagattctcgggctggagagcgtgcctcgccaactgtcgttgaccgggtctcctcgaataaacccttagcaagaatacagcatgaatggatttatgcttcttacaggaaattggcctcacggatgacgtgctcgtggatgagcaggatattcctgcccctgttcccctactacttggctcttacaggacacacctgctcgcagacttctgccaccaaacatctgctcatcacgtctggtctcgtcggagtatttccctcaaacagtttaatttaacaaatatgttcaatattgaaacaatttgcaatccgtattgattttttccaaagaaaaaaaattcatgaatatgactccaagaagaagaaagatggagaagttgaatggatttaagatactagtttaatttttgttaaccaaagggcaaaaaatgtgtactatttttaattatttattatcgtcaatcaagaaaggtatgtttatagtacttttattatttttttttttttggaaaaatccaaagcatcacacgacaatagttaaaatcttttaaattttgtttaagataagaaagtttagagtttaaaacaagaggattacatttggaacaatgaatgtgttatataggagtgtttagagtaattatatattggattataatggataattatttatttaataagtttactaaaaaagggtgtttagagtgcaaatagtctcatcaatgcacaaaggtgacagaaagaatgaatattatatgcgctacataatctcttattttagtaaagcaatattgcatatataatttagagtcatgtctaatgcactaattaatttctggacaaaaatataattaagcaattaaaagtaagtttggaaacgagggatgccatcaataagactatttgggaattggattttgtggattagacatcaatccatatctgatccatgattttacgaatttttaatccaatccaatgtacgaattggtgaaattgaattcaaatctaatccatacgtttgcagatcggatgcggatttgattcaattcatatacaattcaccattttgcggattgattttacagactgaaattttttaattatgtcctatttacgaactaactaaataaaaaaattaatataaaaataattttactaccgatcaaattttaaattaaataaataaattttttaaataaagttagagaatacattcaaagtttcaaaatatgatacactaaaaagaaaaaaaaatctcatatgtttaaattagtacataaaaattaattgcttagaaagctatattttttaattatttttattttatattattatcgaataagatataatatggtgttaatgtaactatattttaacttatttatctattagtaagtataatgtcatatttacaagtttaattttttattaaataattttttttttttttgcgaattcacagatttttgtagatttatagaagtcaatccatatccaattcaccgactgcagatttttaaattttcaatccaatctaatccatcaatctatggatcggatttttacggatcggattagatagattgagcggatcagattggattaatatatatatatatatatatatatatatatatatatatatatatatatatatatatatatatatatatatataatgttgaaatgtaaggaggcctcctaaaatatacataaaagagttcaaaattcaattaattttaactatattttgaattttcaaccgtaatcaacaagatactaagaattttcaaaaaaggtaagtgtacatgcattgagtattaattttcaaaaattaatcaaaattcaattaattttaactatattttgaattttttattaaataaatatatattttttatttttttttgcgaattcacatatttttgtagatttatagaagtcaatccatatccaattcatcgactgcagatttttaaattttcaatccaatctaatctaccaatctatggatcggattagatagattgaggggatcagattggattatatatatatatatatatatatatataatgttgaagttattgaatgtaaggaggcttcctaaaatatacataaaagagttcaaaattcaattaattttaactatattttgaattttcaaccgtaatcaacaagatactaagaattttcaaaaaagaaaaatagccaaaaaaaatcttttttacttccattagaaccattatttcaaaaaactatatatatatatatatatatatatatatatatatatatatatatatatatatatatatatatatatatatatatattttagtattcttcttcttctgcatcttttttttttcttttgggcaaaatggccatcatcttttcaattgttaggatataaattggggtgtaaaaaccaataatgaacatattctttaataaataaaaactaataactaaaacttatgttaaagaatttatttagaataaaatttgattcaattgttgtaaatattatattgttagtaattcattttgtacgtgctaaataatttgattggttattaatttattttgaatctgctaaataatttgattagttttttgagtaaattaatttaactagtttaaggtcctttttgacattttaaagagtgtagaaagtaaaatttaattttttaaagttagcacgtaactgtatagagtactaaaggggtaaaatctcatttagttactgtgttttgaggttagtactcatttacttttaccttacttttataatattactctcttataataatatttcttttttaagacaataaaaaaaattaaattaacaatgtaaccccaaaaaaataaaatagaaataaaaagaatatatattttaaaattgaaataaaaataaatacaattttgttgttattattttacttttaggattgatttcataaattaattttttataaataattattagtaatattatttcaaagatattaaatattattttaagttataaaaagggttatattatacaataaagaaaaaataaaagtatgagtgtcacacatttaataaaaaaaagttttagaatattttttaaaatataaaaaataaataaatacttaatctaaaatatatatatactaaacaagcacatatcggcttaattgatattatagaattacattggtgctttcacagaagaccaaaaaaatgcggaaaattgcaccacaaccggatcttcctgataaaacaaccttagcccttaggtttcaatattttgtcacatataactcctgtttgtttttaactttttgacaaataaatccttgaccgttgttgaccgttaagttaagcaacggttcaaagatcgtaaaggtaatcttgcccgaaatgattccaaagtccaaacgcaatttcggtcgtggagaaaatccaatcgtgattgattgtagttggcttttatggggtgacgtatccaaaaaagaggaaaacggtccaagtcatccgtcacatgagagagtgactcctctcct

SEQ ID NO: 9652 - DNA, 2451 bp, Citrus clementina
  Intron number 6 from transcript clementine0.9_000707m (loc us clementine0.9_000707m.g) derived from phytozome v7.0 (c hr-ID scaffold_85; pos 69323 to 71773 reverse strand)
tattcataagctatctgttgagcatcggtggccaggtcagattttctccttttccttgtaatttcaatttgtatttagcaaaattaaattgtgatctgctacattttgacatctgcttgatgtctgtttgtatttctacttctagtatgcttcaaccagactatttttaccttttctcatgttggctattgtttagaaaaccatttaataatttttaggaaatcatcaaatgctaaatgatctactaagaattggtcaaaattatttagcattttatgttgctttcctttgtccaaatattgactcttgagaaagcaaggttaacatttgaagttataaattgataagggcctgttcagtattattttccatttgctgttttcatgaaacaaaaatgaaatgctatattgaaaatttaaatatgcatttggtatcattttcaaaaataatcttgagaacgacaaaaagtaaaacacgttcggtaggaatagttcaaagaattattattggaataatttcattaactgaatattaaataatagttagtcatttttattatttagttagtttgattattttaattttaagaataaatttggtgatcttattaattttatttgtctaaagtaaaattataaactatatacatatttgatttaattaatgcacaaaaacataagttttccattgtataaaagagcaaatattattgtgaaggaaattgattgtttagatgatataacaacagcagcagcagcagcaacaataacaataataattctttatgataatatgattattgatgatgctgttattgtaattattgttattttgagagttggtagaagaagttttcattttggagcataacattggaaaataaggaaaacaagaaaaagttattttcccgtttcctttgttaaaaatgtagaatgaattttgtttccaaaaatgttttcagaaatgatctatcaaacacatatttaatgtttcctgaatttaggaaacagaaaatagaaattggaaacaataccgaatgcaccctaatattttgttgatttgtcttttttttttgcttaacctacttcgtataatgatcattatgtttaacttaaatcttttttatgcttactccttagtaaatatacaagctatgtataagttaaagttgtttcctataaggaatttttctcttttattattgttattatttatttttttacttaatcatgcactgcatctttccccttccatttgcaaacataaatttaacagaatctaccttccaggttggtgtgaggcggcatttgattcctagtgtgctgccctactgaaataactctaaccaactatgatatccccttgggtttataggaaaaatatacctgttatggttatcaatcatgtttacacaagttccctttagtgcacattcatcatggccttaagaatttctatagccaataagacttcaaataactcctttttgtttgtttttactgatggaaggttaaaaaatgtcatgtttcatgttagtatcataagcaggattgctgtctattggtccttttatccttctgataaaattcctaaacccattttcctttctaccatctagaattcccattagaactcgggaaagaaaataactttctgttggttccaatttggttttttattgttaagaatgaccttcaaacacattgtctctgctcatggaggtcgaaaactatttattgcaacctttaagcttttgcctgagttctgatacttccctttatttttgctcctcctgtgtgagtcttaacatgatcacccgtgcgccctttgaaaagaaactagaattaatggttttgatggccaaggttccttctgtagtaaggaattgtaatagtccatgcagggtttgatattgttcaactgttatgtacaatctttcatttcttttattttttaactctttttaaaaaaaatattaattcaactgctagatctcttggtatctccatgcacgtatctcaggtgatttcacttacttggaagaggagttccgacatttcactctttacatgggtgaaatacttacattagacggatcatttagtattctagtttgatgatgttcgatcgcttcaatgtttacaatttccattttaccgttttgtatacctgacttccatgtgtgttatctagtgactattatgtattttcctttttgatgtcatagaatttgatgacgattgataactaatgattaaaatattaagatatttttatctttttttcccgtttttaataaaaatgatacttagtttttggcattttctaatctttttctatgttttcccatctgtgtttatcagtaattttttcctttagtgatatgtttaagtgcatctattaagttggcatgtaacttaactcagttttgcgtacagattggtatatcgc

SEQ ID NO: 9653 - DNA, 566 bp, Citrus clementina
  Intron number 7 from transcript clementine0.9_000358m (loc us clementine0.9_000358m.g) derived from phytozome v7.0 (c hr-ID scaffold_25; pos 1786192 to 1786757)
aatatatttgtgagaaagtgtttgatctccttaaggtatctcttttgctttcatgcagatatcattaataatgcatgagaagtgatggggctttatatttgcacataataattataatgatattctgaatcactggaaaatatctgctatgcacctgattttggtaacgcaatattgaaaatgttgtaacagagataaatattttacagaaaagtttcagtatatctagggaggttgtatctgtacaacctgttattctgacgattaggagctctcatttgcttcacatttgcccttaaggttacattcacctcattgtgatcaataatatggtcatctgtagtctgttgaaaatttttttggtagttatggatccattaactttaaccctgccttagaacatcctaatatcatctatccggtaggattttgacattcccctacttgtcttgttaattttctaggaacgaatgcttctattaatgtcatcttatgaacaatttgcttttaacagaaacattctgtcatcgactaaagtttctgttaattgatgattttcaggaagc

SEQ ID NO: 9654 - DNA, 1235 bp, Citrus clementina
  Intron number 2 from transcript clementine0.9_014580m (loc us clementine0.9_014580m.g) derived from phytozome v7.0 (c hr-ID scaffold_29; pos 1173262 to 1174496)
ctaagacgccttccagggaatccttattgaaaaaggtaagggttttatgtaaattatttatcatatataattaaatcgtgcaacaggcatcatcaattctgcgatattggtaatttatcttcttccatttacttcatttatttatttgtctaagattagaggcagaagtacagctggatttggatttttttttttgttgatatttagtgatttggttggttatgatttgtaaaacagtacaagttcatatcttttcagcaattggaatggcattttggttctgggttttaagtagggtttgaggtattatcttattgggagaatgtggtttgtagtgctatattggttacagtacaagttcgtatcttttcagcaattggaatggcattttggttctgggttttaagtagggtttgaggtattatcttattgggagaatgtggattgtagtgctatattggttaggggattaggagaatgttgtttttcgtgctatataattggttgggtcttgtaaggcattgttaaccctcgaagacaagtgtttggtgattttggtaattaggggacttatgggttggatttggagggaaaaactcgattaaaatagaagaattcattaacctcaccaaattccatgtgaaagaatcatgatttctctgatccactatactatatttttctggtcataagctacacttcctgagttcaaatgccaactaactgtagaattttgtaaggataaaccattgcgtttgcatgcaaaaccatcatatttttaagcttgataaagtctatttcaaccaagagagcttgatgttgatattctgttcatcttatttttatgaaatgtccattgcaaaactctaaactcatttgtttgctatgtaattagttgcatgtcactagactatccacttgagcatactcaccttagcccattacatacattgacatttgaattaacaggtccaaggtataagctaataaatactttatctttcaaatctcacttataataacattctgaattaatatttcccttttaagatctctcttttatatgactctgtcaacattcaagttttgctgtcgagagtattgtgttctttccaaaattttggttttggtgaggcatctctatttgctttacgtggtttgtcaaatgagaatttattatttttttctgttcatttgaagacaactgatccaaaaggtcggaacgcggctcaatc

SEQ ID NO: 9655 - DNA, 1177 bp, Citrus clementina
  Intron number 5 from transcript clementine0.9_003749m (loc us clementine0.9_003749m.g) derived from phytozome v7.0 (c hr-ID scaffold_11; pos 1263325 to 1264501)
acaatctgcggcaagttgaattggattcgattcaggtctgtgattacttctcagatatatttatgtgcaacatctttctaacttatattctacttggtttatgcttatgaagtttcctttttgacgtgagtagcataaaaacgctggctgttttcttttcataagttatttgtgatttgtttgaagtatataaattggaaagctcctactctgcttagtttgatttgaattttatcatttcttagtcctcttgcgcatgctatgcagagagcctgtaatgtctcttaagtcagaataaatagcatctggttagtgagaaaaggattggcaattaatcaaccgtttaatgaatggaggtttttctgtagatacataggtagctctgcctggacaagaacagacgtcagttggggttgttttcttccgtgattgttttgtggttgaggattgtcttattgtacagtgtgttcagaagtgtatctaaagtgggtgaactcttattcattaaagaaaaggtgctcatgatctgcggtcaattattaaagttcaagaaataacaatctataggtcctctttcatatttgcaatttttgaatccattttaattgcatctctctctgtcctatcaaaattttccttatagtatttgtgaatcttaaaattcaaaattttgcttatctgtcataccttttgtagctttaattatctgtcaaactttgtttgcatagtgttagtgttccgggtgtgtaaggtgttcaagcagatttagttaaataagtttcttgtttcctatccacagaatctcatagttctaggtcaattttacacttttaatgtataatacttccttttttgttaactgtgatgttaaaaaataagttcaactattgagtgtcttcatttcttttatagttttcattaaaccaatttattattttcttcagattttagcatgccatagtgttttggaagagtttcatgttagtcgagatgagatattgtccagtataattatgctggcagagctgttttcatcttcaagtatcttctttattgttacctcatttgtagtttatcattttattttatttatactccaagaataattattcattcgttttaaaactgtttcaaaactgtaggattatattaaagaaagtgataatttggtgtctct

SEQ ID NO: 9656 - DNA, 840 bp, Citrus clementina
  Intron number 5 from transcript clementine0.9_006861m (loc us clementine0.9_006861m.g) derived from phytozome v7.0 (c hr-ID scaffold_4; pos 2130261 to 2131100 reverse strand)
gagggctccaaagatctgcttacctaccctttaaggtctgtattacaggttttatattttcttctgctcttctaaagttttaatattctgagtaacatccttaaatattaaaatcacagaatgctcaaggtaaaataattgggattgcctgtcaggttattcatctgcaaacacttgttttaatcctttagcatgttacatgacttagataagggattcctgcgtttcaaaaaaaaaaaaaagataagggattcctgaacaccaaaattaattatcttgatctgaaacttgagtcccaaaaatgtggaaggaataacagctatttgttttttgggttctctttacaaggactaggggccgaatatgttgtctgcaattatccacaaagtaaaaagaggataaagctttggagatgatgttactgtcatctctatctcttgcttgcaatgcatgtgtgagcactctcacgcagatacatgatttaacagcatgctttgttgtgcatgggttaagtgagattgcaggtctaagagtagaaaatgcaagtgctaccactttcttggcccatctcaaatgatgttacccacaatgctagttacgttataactacaaaagcgcctctctattatatcataactatattctctagtaaccttaacttggatctctctctctctctcattatgaattatcagccaagatatgagagtgattgctctaatagttttgtttttatacacccaagggattatatgtcgtttgaagtatactatttagtcagatagtttattgttttcttatattattgttttaattaaacaggtgaatagttctggagtg

SEQ ID NO: 9657 - DNA, 1356 bp, Citrus clementina
  Intron number 7 from transcript clementine0.9_032768m (loc us clementine0.9_032768m.g) derived from phytozome v7.0 (c hr-ID scaffold_11; pos 4785502 to 4786857)
acgtctactttatagcgaaagtaaggcttctgctctcttgcataggtgaaagtccctctagtgccctcctcctggaaaatcttaagaaataagatgcgcaaaaaattgaatgctgtcttttaattattttttaaatttttttgaaaagaaatttgttgtattttaccatgaaagttgttaatttactgaattacaaacttatcaattaatttgatgttgcacagtcttttgcttaacatattgcattcttattttaattttggagcaataaaatttttttctaccatctagtcaagtatttgtattattgcaaaacatctacagaagtagtgattagtcttgaaagtggaagatgtctgtctgtatcctttcatcccagataaattgtcatataattgtgggacaaattgtaattattttttaaaatttattagttaacaccttgaaaattcttttcccccaaataaaattgctctaaaagtgtccaaatgtggtgctgaggaagtcattcttaggaagctttgtttaggagaataggacttttaagcatgaggtttagcaaacactaatgaattaaaaaagagatagttgtcggatgagctagatagaatgcatgggctagaagtatcatgtgtctttactatcaatatctcagcaacatcaaagctgagttaggcatgccaaagaaagacaaaccactgaaagttgtgtagccactcacgatgtagtaggtgatgtaaagtcttgatattgcttatagatacaagactgatagctcaacatccctctttttgagattttctcttaagttagatgggcctttttatgattatgtctgaattatgattctccttacttggtttacctagaaaaactatgtttatatggatgtgacttggggccaatctatgtatttgatgataaatctggccgagaaagcttatattgctaggcagaggaaattgactgaccataagctctcatgttaaatccatcactcaaaagatgtcagacacttgtaatcctcattatctatgactttcttgtgcataggccatgttttgtggagagcagtcaaaatttcggatttaaaatctgatccataatttgaataactacctaaagttatacagaatttattggactttgatagctcttggtaacccaatcgtcatgatatcatatagtacatattaatgtcgtagtaaaaatggaattttgtttctaatatatctttgttggccatgatcatagtggttacaatgaacgctgctgctactgttactgcttttgttatgctttttttaagattaagttctatttatcccattatcttgcaggttatacatccatttg

SEQ ID NO: 9658 - DNA, 2211 bp, Citrus clementina
  Intron number 1 from transcript clementine0.9_000729m (loc us clementine0.9_000729m.g) derived from phytozome v7.0 (c hr-ID scaffold_48; pos 1547280 to 1549490 reverse strand)
ctgaccgtgaatttgggtcaacacagcagcaagttagttttgatggataccctttttgttgaattagattatttcatttgatattttgagtttgacattgtttcattattgatttgaggtgtttttattacttttggaactgacagttgtgttgttttaaggtgacaaataaaatgaactgtagaaacgttaaatttgcacgtgttaatttgtgagagctcactgaattttagtgaaagttttcatcttttctgagttttaaattttaattcctaaacagctcaaattatttccctgttcctctttttgtttttcctagctctatttggcagttaagcaggtgatttatttctttattttttggccttaaaattgattctgtacgatacaatgaacttttagcgtcaacgtgaccactctcttagttcatgctttgttgcttgttgctcaataaaaagaaccttcgcagaaaaataatttttttgggatgggctacccttagtaaactggggttttaacaatggaaacaagagctttagagaaaattacgaattatgatgaataacagctcatgagagtaattagaaattgtcatgaataaatgtattggcttctaatgtccatgcaattgtgttaaggatcccaaaaatatagttcgtcatgattgaaggaatgaagtttgggttgagctaaactaggaatatggaaccaggtttagcaattcttacaagcaagctagaatttccaccagagagagcaagaagaattattttacaaagagattggttatcttgattttagctttgagctgttgaggtgataaacatatactggaagctaataattaactctaataaatgcataatatgggaacatgataacctcatattgcttttctatagtttctaataaacgctttacaatcacttcatatgagagatgatcatgattgggagtttttttttttttaaagatgatgcatgtcttctaagttacatgtaaaatcttggcatgttctccacaatgtaaaagcttgatgtagcggaagtttaatgttctaatattttgctgattcttgagaatactaaaataaaggaacaatctaatttcatgtcgcttcgaaagaatatcatgaacatagagggttaagactcgttgattctgcagaatattgaaaattaactatattcaaaaacacacgcagagctttgaaaactaaaaatgttgttgaattcaaatatgccttcaaaggctacaagagagtgttttttatactattagtaattatcctaaaccatgaagaaaaaggaaaacaaactcctaaactatttaagaaaaagaaacataaactttagataataaagggactaatttaaataggataaagattcttaatttgcatcaaagctccttcgaatcagctcatttggaaactgaaaatgtcagtgcaatgctcttgagaatatttggaagattaaagaacatgagataacatttaagtagcaagagtagatagctcacgctaatgaactctatgtctcgagaggttttggagcttaggatttgtaggccaaggatggaagttgctcttgaagtccatgagtgattattcataactttctttttgtaactcacttgtgtatcatcaactgattgatctttaacatcaatgacctttatactttttcttccatggaccatagttcagttgtaaatatataacttcaatctttatcaatttaaacatctgtactacccactagtttccaagcaacagttatgataattggttaataataattgccaatggttctgaaatattccctctctttgtcatgttacatcttcatgcctttcccatcatgtgtgttaatcttattttctgtatacttcctcaaagacacgtctttcagaattatttaaaattgtccaacaaatttatcagtctctagtttactctcaaagtgtctgatctgatttgcagtttgtcagatttaactgcttgaagtcctgatttccagttagtcattagtcagatcattatctgggctttcagtctattgcttggagcattgttggtttgttcttttgtaatttctggaggcataagtgctgtttttttataagaaagatttgattccggcacatataactctgttgcattcttgttgtttgatgattatcagtgtggttcaacccttgataatattg

SEQ ID NO: 9659 - DNA, 801 bp, Citrus clementina
  Intron number 1 from transcript clementine0.9_009623m (loc us clementine0.9_009623m.g) derived from phytozome v7.0 (c hr-ID scaffold_5; pos 1783916 to 1784716 reverse strand)
ggcgtgtgcttgaaagcaatccaaggctgacaaaggttagtatttacagcctcattaaagtgttcttattctaccgttttgattagatgtggatgtgtggtgaattgtgaattgtgatgttctggaaagtcgcgtggccgcattctgcttttaactcactttaactaaatttgtttttcatatttggatgaattattccagtataacgacaacctagttagaagccaatgaatttgtgatgattaatggtttgatgcgaatatcgctgtaacttattgcttagcatagggttttccttttgaactggtttttttaactttctggttggtaaagttgattttttttttattattttattgtaagagcatagtctgaagctactttatccaaggatttggactgatgccctgcagtttttcttaggcagaattgtggtgtctcttgatgtcctttgacagtgtaattctattctattgtgcacataacctgacatgtaaaacttgctctcggataagattgaagctatgatttgaactgttatcaattaaactataccctcttttctgatgttggtgttttgcatagtacaatgtagtgttggtttcaatacatgttcgttcttcacttgattgaagtttgaaagttgtcaggatttatagattttaaattttcaagcctttcagcggattttggttttgtagttccgtacttcctgagttatatgctctgtagtgtgatgagcttacaattcggattttgtgtgcagctttgcgtgcctggctgttctagactcaccgttga

SEQ ID NO: 9660 - DNA, 4952 bp, Citrus clementina
  Intron number 2 from transcript clementine0.9_016168m (loc us clementine0.9_016168m.g) derived from phytozome v7.0 (c hr-ID scaffold_55; pos 651959 to 656910 reverse strand)
gtgataaagattttagcgtccctcgttttacgcaggtaatgtgaataattttatttattaggtttttttttttttaatacctagaatgtgctttgatcactttttaagtaatcaatttttatttttgaaccattaaggaatctaattgcaacctttgatcttttgcccacagagaggaataacaaaactgaaacttggctactaataatctcattataactcttgcaagtattcagaactagcctacccaaatattgtttttggtattttttttcaaagggtattttttactttcttgttgaaaattgaaatggtgctttagatttgatatttttagatttgaaaatgcctatggtgggtatttttataggatttggtttcgttactgagatgattttttgttaaacactgaaaaatgatttttaggaaatagaaatggaaaaaataaaaataaaaaacaatcataacttttgatttcatattcagtaaaaatttaactcattacttgtccattttaaaaatgttattaggaaatgaaaaatagtataaatttatctcagacaatgtttgaaaatatgtaaagctaaataaacatttttaacaaataagaataaaaagttgggtgcgactatagtagggaaccatatcctattgcttgggcatattcaaatgattaaaaagtcaacaaaaaaatcagactaccgatctgacaatacctagaatatatatatatatatcataattttaaagtttttctcctatttttcccgcattttaaaattccaaaccaaaaaactactttgtgtgtgtgtgtaaaatagagtattcacctacttaagcaatttttcattaaaagtaggccaccgcacaagttttcttcacttgttgaataacaaaatagacacacagtattgatgggtaaatgctcatttagtctttatagtttaagttaagggacaatttagtctccatatttaaacaaaataccttaagactcccctcctagtaaatatgctacactcgtacccttatattttctttcttttcacattaatatacttgcaataacagtcttgaaaatattaataaaaagaaaaaagtatgacaatttatcaaattaatcttaaaagtaaataaaaatttacataatcttttatattattattttactttaggactaatctagtaaattattgttttataaaataattaatagtaaaattgtttcataggcacaaaaagtactagttctttcacattgatatttattggctaatttactaataaatagttattgattaatttgttaattaatttttatagaaaaactaattaatgtcaagaatattattggaaggatattactataaaaagaaagaaaatgttaaggtaagaatgtacctatttaactgtagcagcgttttaagttatttttgaaaatatagggctaattggacacttaactcaaattataaggactaaacaagcacttacctcggttttgatcatgttaaggtttgaatttttttttaaaggggaactacttctattcaatccctacaatttgaattaactacagttatttcatttatttttaaaagttatttaaaatgttcttattgtagatctgtttatttaaagtctacttaattatcattcattttttacttatttcatgtaagatttgtttaaatcttaagttaagtcaaaccacaaatgtaattattattgtacttaataagttagatcgaacaattatgaatgtaacgatagaggtactttaagttactttaaaaattacaaaacttactcgtactctaagtacatctattaattttttaaggtttgtttggtattgaaatgcttattataaaattaaaacaataaatattatattatgcttttatttagttgttaaagataaccgtatgtattgatagagcgaagccacaactgtttgctaaaactcgggcaataagttttagctgccaaacaactaaaataaatggggcctaagaaattttctacatttacctgctttaaactttattaactctcttttttcggttcattaatattagataaagagagtgcacttctaatacttgttttacttttagaagaccttgtgtaatactaccatatcttaattttttatatatgaatgtaactaatgtatctctttcataaaggattgctccatattgcccatgaacagtcactccaggagtagtcaaataaggtttagttaattgtattactacatagttatcttcagcaattaaaacttgaccagattttaggtgtagtccctttttggtaattgccattggtttatagccagacaatgggataatattctcaataatgttaaaggcaccagtttgagccctgatagaatttttttttttaatttctacaaaattataaaatatggaaaattactattcaatattattgttagtaggattagatttatgaacttctagattatactacaaatatatgtatttgttggtggataaatttggttaagccaagctaggagcaccacatgcactaaagggcaaaaaatagaaggaacgatatgcgtcctcatatagaataatctcctccacctcatttttataaaaagactaggggatattattgatggttaattttgggccaatggtcaaaggacgtgtgtcaatgatgagaagagtatatgaaacaagtatcaggaaggcaagatcctgtcgttaggctccacaaaggattgaacgcaattcaaatactaaagagtaagatacaaaggaattagagcaaagcgaggaacaccgaagcctgcctaggacgccctataattcaaaagctgcttgtccattgtttaaggccagctccccttagtcaaccaccgggaccccaaaggatacgatagagtcttcaataacaattgaccagttcaaaggaagcttaagagtcactaataaggacttacagactttaacttgtgcctcaagcttatcccaacattctctagtttctatcatatagaaaaatgttccctagggaacaaataggtgtgccgccatcaagaagcttagggggcacctgactcttttgccaaatgtcaggatagacctaaacacactatatagaggaaaatgatcttttaataagaaatcgtcatgtgtcatacaaaagaaatttaaatgactttaaatatttgaactctaattgaaaattatgcaaatgcctagtaaagaggaccactgccaatcgggttccatcatgtgtcttgagggacctaaggatgcccttagtagccctaatttataaaccatacttgaactaagaggttgttccttcccttttgattcttctgtttttatcttcttatccttcatcattcttagaaaaatggaggtcttttacttttcccacttcatcattcttagagctcttgcaacttaacaccatacaccacacaagtccccatctccactactcatctcttaatgaagagattttcttcgttactctatgtcttggaccttatctttctaatatgcaaccatggttgatacaacacactatcctccttgttgtccttcatacgtaagtaaactccttagaagtaccttcacaaaagaacatagaccttttattgctctttatcgttttcacgtaaaatacctattgtaatatgtggatgggctatccaaatgccaatcgtagacgtaggccataagatgaaccatataaatttggcgtgtcctttccatttatgcttgtgcttatgtataggccataagacataagatgaaccatataaatttcgtgtgtctgttacatttatgcttatgcttatgtatactgtttgctccctattaagcatccctggagcatcatcagagctccccagagcatccttagagctaccctgagaattctatgggccttctaaggctccctcaactccctaggccccacagagtccatcgggctcgcttagacaaggcttttttatcaatccaaggcaccaagtcacttcgccgtcactaaataaattctaatgttcctcggtccgcatcccaagctaggacgaatgaacaagtgaaaaacgggccaaaactatatccagagttccattagacctcaaattataatatgaatgtaaatcataacccattaaaaaatttgatcgatcaattaattatactgcaaacagtgcttattaaatgacattgatgataatgagtgacatgaattcatgacctgtatatccatatctttttccacttcagctgcatgatttatataagaatttggatatggtgttgagatgagccttttatgagctttgtcgtgtatatatttatagcaatgtacagttaacatataattacatatcatactaccatcacaatgttataagagactttaactcaatatctaatctaggttggcgctacgttacgtttaacgtaacgtaagccactcacagcaacagttgtgggctctatcacaaaaactgttgttgtgtgtgggacgtacgttacgttaaacgtaacgtagcgggaccctctaatctaactagatcctttatataagtcaaaggcaagttgcttataaattatttcgggtgctatatgatttcagacgcatgcacgttattgatatatatagattcttctgagtaatgttatagttatactcttgtacaaattatttttgtacgaactgatatattataatataattaattgaatgtaaatataaaataaaaaataaattatgtgggtcatgtgatgttttattttaaacacttgtgtgatggcatatcagtttgtataaaataggtataaaaaaatttgtaactgtatcactaatcatgcttcattgacccacttaattttacgtatgagattgaattaatctgcagaaaatatatctcttgtggggagaga

SEQ ID NO: 9661 - DNA, 2699 bp, Citrus clementina
  Intron number 2 from transcript clementine0.9_004337m (loc us clementine0.9_004337m.g) derived from phytozome v7.0 (c hr-ID scaffold_87; pos 542275 to 544973 reverse strand)
gattagaatatcttcggcgtgtcaggtaattgatacttaatttgtttcccacggtgatgataaagatgttttttttttcctccatatcatcaggttcaagcatgtttggtttttttattatcattttttcccattttcaaagagttagcctctgatagctatcgatcacttataattcttgtgatttagcatgcccctttaaagtttcatgggtttactagttacatgttccatcataggtgttgaggcttgttgtcttagacatcacagctgcatgcaagctgcatctcatacacgcacacacgcacacaaaagaaaaaaaaaattaaacgacatataagttacattttccatctggttctgaaggaaagcagggatctccttcggccaatagaattacttttaagttttttgttattgcaattttgcaagaactttggacctcaaaccgatttggttctgtgtaactgtagcaacagcttctgatgtcatggatgaggcaaataaaattgtcatgttttcacaactcatcaaattatttgtgagatggaatgagaggagatagcataaaaacggaatgtctttggttgtttaattccttacattttgaattgcggtatttaaatcaaagtgaaaaaagaataaaacacttctccaaagggagtaagctaatctggcaggtcgtccaggagctcaagctatttgtggcagaagacaattattatttgagatgttctcctttgcatgatgtccttgcatcatcggagattttatgtctgtattcaatttgaatttattctttgaaagggatgcagattatcaattcactctttgtctgctttatggaaaattggttgtctgatagacatgatgggattttgcatgattcattcactttatctcatgttcctggacaatcagtcatattctcttgtagttgtgtattatgtttctgcattcctgggaatgcaaggaatctagagataatagattttgtctaggcagcttccatatgggtatattcataggcttattttggtaagtaaatatggaaactggtagatgttgttcaacctcttggaagacttcaaataatgtttgaagggcatcaattgccaaactttattatacgtcatcccctttttaatattatcttaccctttgggaattcttttgcaatttgttggaaggattgaacacataagtttattggggaagacatatgctctgtagatgcttctttttattaccataatcttttgacttgctgtctaagttgatgcctttgatgctgtatgtatgtcataatccttggtagaaatggcagagaaaaagatgcacttctggacagttcccagagtatttttcaagtaaaggccatcttgatggtagaactctgctaataaagatcaggagttaaacatccatttccttctggcaaccaaatgaaaacaaatatcaaacttcaagttgatgacgtcatctgattaatttctcaggaatcaaatcacaggccttttgtactcttttcaatcatagaacattatcttctttatagacgatggaatagttgaacctgtaatggatggaagctattggctcattcaccaactcaaacagaaaatgcaaatattggaaaatggtggaaacacttttgcttttctgaagtagaccacctgaatggaccattcgttaggttattgatttttttaaaagccaaagtgttgataggactttttttgggagtcagttgatttatagctgacactattcggaggaacaacttgagcttagattgttaaagcagatgaccatcactttgtataatgctatgatcgtggtagaagatttagctactaataggtgattatcttcaagggctggtttttccgttgtttgccatacttaactgccacgtgtggttccaaattaatgttcctagtattcccatgtatagttgcatcttaaaagtgcttccttttttattttagttattttttttttcaatctttagcagtcaacatgtgagccatccaaagctttggagaaacttcgagatggattgacatcctaacagcccgagagcaatttgcaattatctcatttgtatacatacatgcatgctcatactaaagatcttaaataaattaaataaaagtagtcagtgattatttgaacacacgggcagccataccttaggtcttatttgtcagtttcagaatcagaagatcatgtattgacctggtatttttttcttatattaggatcatctgtgtcattgcaatggtggttgtctttgctatgatataaacaaaagggaagcattaaatgcaaataaaagagaaaaaaacatatagccaaatagacgctttttgcatgccacggctttgaattaaaccagtagctgaatttgctgatattgccacatatttaatcatccctggaactaataaatcattttgacaaactatattcctcctaaacacacctttaaaatcatattaaaagctttttagtgcattttaaggatcagaacaagtgtacaggcatagttcttctgtctttaggctttcttcatcaaagacgatgaatatggtattgcaattttttagcctttctgcatctatatatattttattcaattgaacacaaaactataatcattggatcaaattaaacaacttctttcttatgctcag

SEQ ID NO: 9662 - DNA, 736 bp, Citrus clementina
  Intron number 3 from transcript clementine0.9_022474m (loc us clementine0.9_022474m.g) derived from phytozome v7.0 (c hr-ID scaffold_11; pos 4015682 to 4016417 reverse strand)
ttccacacaagcttgttactcgtgcaggagtcgtaagtctcatgatttgatatggtttatactttctgttatctgtggttctgtctaattttattgtcatttgagaagcaatgcaacagttgttcatattaggttgatacctaagcagttattctaataataaatatgaccaaatagcttgatactaaatcttaaaccaaatgcttgagtcttcttaatttcctctggctatagaggctttttcttgaagcttaacattgcaaacaatctcctcttgcactgttcattaagaaaagtatgtcaactatgaatttcattggtatacgcagacaaaatgtgggacaggcttgaacagttcatgttagtcatgattagaacttaattgtcatcaaacaatggtggaagagttttcttgttatagtaacaactaacttttgtagttgtcaatgctggttgggtacatctgttagctcccctttttaccacttctatattaactaatctaataaaatatgcaatatatactaaacctttcaacatttatgatctaaatctgtaacatcactcatattcaataatgtcttagatactttcacatccattgttgtgcttttattggtgcatttacactgacgtttgagttcaagctatatatatatatctgcagaatggtgattgacacaatttttcctttttttgtgtctgcttgtgatggactccgaaatccatgcagaaa

SEQ ID NO: 9663 - DNA, 1133 bp, Citrus clementina
  Intron number 1 from transcript clementine0.9_018534m (loc us clementine0.9_018538m.g) derived from phytozome v7.0 (c hr-ID scaffold_46; pos 474058 to 475190)
catcaatctccgatattctgcggccaaactatccggtaattatcttttcatattgaaggtcctttctcagatccaaatcaatttctccttgcaaatatatattcttgatctgtttttgatattggttaatagtgaatatgtggatttaaacatgattctgaggctgtacagttaaatgggtttttgggaattaagttttcagtgatcagaatctgaaaattgttgtgttttgagctttcacggctgatttgtgaagtagggttttgttcttgtggcttgtagaggcctaaagtttgtatcttatttcttggggaattgagagtggatttcttttttggcaagttatgcatttttataattgaaatgtcgatcatgagaagaagttgaattgagtgatattaatgttaatgtaactgttgaatgtcttaggagacctactgaagtttaggatttggttttttcttgagaatgctcgacaatgacaacttcttgttcgagatggatttggattcttgacaatgacaacttcttgttagatatgagatgccatttgataatcgtagctggtttacgatttttcgtatgtgtttgcatatcagtttctttgtacaatttatgcttgtttttgtattttgaattcattgacaccaaagtatatacaatttggtattttttgaatttacttctaagaaactagcccaacattttcttagtgattttgctttgctttttcttttttgatttcgggtaactgtagtttgttacaccttctgcttcaatagtgaaatgttatcattattgagcagacacttgtgtctagttgtttcctacggaagggtattctggaccttttgcttctgttgagttcttaatgcatgttgaacacagaagtgtcttcagcagtctaatttgaataatagaaattgttgtttatggtttttggtagaagctgtagtgatgaaagttcaatagaggagtcaggtactgtaagttcttttagggatttgaattttcttttgatttgatccctttcttcttcttcttattcaaatcacaagttaatgattctttcctctttgttggtcctaaatgatgcaggagctagggcttctagaggaagagaaagttcagta

SEQ ID NO: 9664 - DNA, 4839 bp, Citrus clementina
  Intron number 1 from transcript clementine0.9_009970m (loc us clementine0.9_009970m.g) derived from phytozome v7.0 (c hr-ID scaffold_26; pos 563892 to 568730)
aaggcggtcaaaaaggctattgctggcgcggtaagcaagtaaataataatattactcctttaagaaaaattaaattctattattattactaatattcatttatttatgattcttagtccagtagattgagtttttttaaatactgatcacgcataaaattattatattatatagatgtttataattattattataataaatattatactgatatttataattaaacatatataattaaaatttataaaatatatatctaaataaataactctcaccgacgataaatgtccgtactctattcactttttgtaaaataaaaaattaagtagattgagtcgaatgttgatgattagcagttggtctattctgaaggctgcgagttcaaatctccctgacgacgtaaaactacaacgtctttttttatttatttattaaagtgttagtgatataatatacataaaatattattagttttgatgatatcgcattcgacaaactgcacgcgatcacgtgagtgtagttggacacttggaccgtgtactagtcaagattttaagaaatggtgcaaataaatatggccgttcaccttaggacacgtggctgagtttgtgcaccaagtcaacaggaggagcagaaagtcagtagaacaatactggaacagtcagttttcatttttgtggtccacttcattaattccggcgacttttcaatggatgtatttgagttattgtttggtaatattttaaaaaatcttctagaattttaaagtggggaacgttttgaaaatatatataaattttaagtctttaaaattttgtggttttatttatttttttgattttttctgtattttaaaattttggattaagaaagtactctatatttatgtatatttatttataaaagcacttaaaatgctttttttttaaaaaaaaaaggttaagagttcgtttggtattatttttactttattgtttttcgttttgtgaaaaggaaaatgcagaaaactagtatggtagaaaacatgaacgctatattagcattctcctttttgtttcacttcttgctctctgctaatagccctaccatcttgactatagattacgttagccttgtgaataaagaaataatggaagattcagtttttatttttgtggtccatttcattaattctgtcaacttttaaatggaagtatttgagttgttgtttggcaatatttttaaaacttttttcttttacatatatatgtgtgtatttataaaagcacttaaaatactctacaaaaactctaagagtgcatttggtattattttcactctgttgtttttcgttttgtgaaaaggaaaatgcagaaaactagtatggtagaaaacaaggacactatattagttagcgttctccattttgtttcacttcttacgctctgccaatagccgtcctgactttataacatagtgtagtagattatgttacccttatgaatgaagaaataatttaataaataaactattataacaaatatttaacataacaacaataacaagaatttattccataccttatagtctaatcacttaggtagtgtttactttctggagtgggagtgtggagtgtggattcctcccactccagtgtttacttaccttaaggtagcgtttattttttggattggattgggaatcctggggagtgggaatcctaggattgggagtgtggagtgggagtgggagtatgttgtttacttacactggaatggaagcatgaaatagagatcagaatccaatttatgtgtttactttgtcttggattgagagtaaatagtttcaaattacaattttatccttatttaaagaattataatttttaattacaaaattaataaaaatatatttaatgaataatatttattttattatatttgtaaatttattataattattaatattcttaattatgaacaataaattattaattgtaattttaatataaaatgaaatgttattttattttatttaatataattatattaaatttattattatataaaataataatataatattatttagtacaaaattaatattttcttagaataaagtatttattattattattaaataaatatagtactattatttttaaaataaatataataatattatatttattaattctctattaatgtaataatattattttaaaataattttaacttagaatcaatgtaaattattatttagttaaatataatattattatttaaataaatataatattatttattttattttattaattataaaacataaaataaaataaaaagggtagaaatgggagaggtgggagtgtattcccactctacactccaaaaatgggtgggactcacggagtgggattcccaatccctccccattttaagtaagtaaacactggagtaggaggaatccacactcctcactcccactccagcaagtaaacacaacataaaaaaggaggtagtgtgagtgagaatccgtgggtcccacctaattttggagtggggagtgggattcccactcccatggggggaggtgggagtgggaatccactcccccctcttcccattttaaataatatttaataaaataaataaataatatttattaaaaataataattatatcatatttattttattaaatttaataaaataaaaataaataaatattatatttaaattaataatattaaacattaattttaataaatattaattatttatttaattaataataataaatattttattctaaaaaaaattaattttgtactatattatcaataataatatttcatttgtgttgctattattaataatttttattcacataatttaaatttaaattaataaaaaattatgatttacataattaagaatattagtaattatcattaatttagaaatataataaaatatttattttattttccaaatattttttattaattttttaataacaaattataattctgtacataaggataaaattataatttaaaacaatttactcccaatccaagacaaagtaaacaaataattaggattttgattgacaatccatactttcatttagtctaaataaacaccctactcccactcccactcccactccacactcctaacccaaggattcccactcctcaggattcccactccaatccaaaaagtaaacgtagcattaatgtattacacaaactgttttaaataaaaagtaatatcacataattattatagcaaatcattatattgttcgaccaatatgtagctattcaaaaatgactataaacctttatatataccgatgaaaatatatcaataaaaaatttacatctttggaactaatataaacaaatatgtagacttggcaaaatccgggtccggtccgggttttggtgttgcccgggaccggaccggatgagagaaatgcaagcccggacccgggttaaaacccggtttttccgggtgcggtccgggcttgagcccggcaccttccgggtccgggttttgatccgggtttttaaaacccgcatgtgataacttcaattttttttcaatttttttctttaattttttttttcatttctctaacaatgtaaattttaaaaaagaaaataatcaaataaactcattcaatctcaaactttaaaaaagaaaatagtcaaatacaaatatataacacattaacaatgcaaattttgcacaaatgataaataaaaattatttcaatctactttctaatacctaaattcatctaatttctaacttaaactcattcaatctatatataaaataaataaattaaattcaacaacacaataaatttaaataacatctaacatatcataaattcataattatatatttatatataatatatttattttttaaatttattaaaaaaccgggtccggtccgggttccgggttttttgtgttgaacccggacccgggcccggaaatgtccgggtttgagaatttcaaacccggatccggtttttatatgcatgcggtccgggttttgcccggaccggattggccgggtccgggccgggtccggtccgggcgggcttttttgacacccctacaaatatgtgataattataaagaaatttaagattttcttaattaatattatcttataattacattttatttacataattaaaagtttttaagaaatcagtaaaataaccatgtacctatattcatctatagtaatatataatttatctaaatagataaattatttaatgataaaaaatatatagttatattcattgtattatattactcttttgtaaaggtttgattaaataatccatctactaagaaaatgtttcattaaataattctctactctcttttcctgtcttcattttttgagacaaacaactaaacacgtttttgcttttttttttaaataatttttaagtactgtacttcaaataagttaccaaatacatttttattttcaacaaaaactaatcattcttatttcataaaacaaattctataacaccatttgaaaaataataccgaacgcattaaattctttctttttttaaaaaaaaaaatcaaaatattctttgctatataaatatgtatagtcagaagaataaaaaagaaagacttttggttccatatacattttaattaaatatcaatctccttaattcataaaccttgattaattcggtagcatgcttttacttactaccattatttttaatacttaaattatagtttaattgtgttttgcctatattgatacttcaagttattcaacaatgcagaccatta

SEQ ID NO: 9665 - DNA, 831 bp, Citrus clementina
  Intron number 11 from transcript clementine0.9_008833m (lo cus clementine0.9_008870m.g) derived from phytozome v7.0 ( chr-ID scaffold_23; pos 3362388 to 3363218)
aaaactgaagataaacactgccatattgcggacaggtaggtttctaaatcactttttaccatcataaacttgcttcatgttctgatcccaaaaaatttttttttttacttttttggttatatattggtgtaagcattcataaaggttgtttgcattttcatatataacattgtgatggcttttaagaattagtgcttgatatgatgtaagacgttattttggattatagaattttgttattttagatctttcgatattttctcttttaattaaaatcagttatggtatgtgttttagtattttatttccattataattgcgatttagtttctctactaagttaacttatggaagtaggtttattctattataaatagaaaggtcttattattgttctcataatttcaacttcaattattcaataaaacccctcttcataattcctttgggattatttatcaaaatctctcttgtagagtcgtttagattataacgtcatctaatctcacttttaaacgttgtcaaaatctgattgagttgtttggattagaacgagatctaatcacacttcgattagagtgtaacctagtctggttggcttggtctggtgttagaacgatatttagtgtttttctaccctatcaatttgcttctgctaccccaccctgtcatgatagagcatgccttcacaacaatcaaatcttttttattggtagcatggaaattgaatgattcttggcaattgaatgattctggtggtgtacctaagaactgaatttggagttatccttgactttttgtattgggccaccgcaggcttatcggatattc

SEQ ID NO: 9666 - DNA, 4356 bp, Citrus clementina
  Intron number 1 from transcript clementine0.9_021903m (loc us clementine0.9_021903m.g) derived from phytozome v7.0 (c hr-ID scaffold_33; pos 1973463 to 1977818 reverse strand)
aaaccagcatcaaaccatcaccaactccaccttaagtaatctatgatttttttttaattgttgaggttattctgaaattctgagaaattttaaaattttaagatttttattctatgattaattattatctttatatgatattaggattttaaagttcaaaccctctactatcaacggcattcgaaaaacttctttgttatagataagggtgttcgcagatcggattttacggattggacatcaatccatatccgatccatgattttgcggattataatttttcaatccaatccaatccaaggattgataaaattcaatccatatccaatccatacatctgcgaatcggatgcggatttgactcaatccatatccaaatccatcattttacgaattgatttgcgaattaccaaatccatcattttacgaattgatttgcgaattaaaaattttagttctcttcaatctataaactaatgaaattaaaaaaaatctaatataaaataattttactaccaattaaatttaaaattaaataaaatttaaacaaattaattgtttgttttaataatacattcaaaatttcaaaatataacacattgtgattaattgtttaaataaaactataataatacgtttaaagttttaaaacataacataccaaaattaattgttcaaataaaattacaataatatattaatataatatcaaaattaattgctcaaataaagccacaataatacattgaaagactcaaaataaaacacaccaaaaggaaaaacttccacctccaatttgtgtttcgtattttagcctaaacaaaataaacataattgatataaataacaaataaaaaaatgttgtcttttaaaatcctcatataacccaaatcaaacatttgcctagcatcaacctcagtatcaacctctaaatctttttcatcattgacagcatccattacttccacatcatcaccataaagcaatttgtattcctcatataaactatgtaaattattccgcacgttaacaaccaactcattagctttaaattcaccaaacaacactacaaaacaatatctcaaaaaccgttctttatgtcgaggctcaagcaaaatagaaacaaacaagtaagggttgattgtttcataatttccccaatacttatcatacttctttttcatattttcagccattatcttcaaaaataaatccttactatccctccaagcttgcaattgtgtatgaatcaaacataattggcgcaaaaaattattggaggtcacatataaagaacccgaaaatgtcaaagtggcatcatgaaaaaccttcaagaatttaatgaaataacgagcatattcccaatcaattgacgaaggacacgtttttggctcgctcaaacaaaactcacgtatgtattgtgcatcatgaagctctaaccgatcaaatactttttcatacttttcagcagcctctaacatgaaaaaagtggaattccatctagttacgacatctaaacacaacaacttatttgaagaaattttctctcgctctgcatatgccttaaacttttgtgtcctagaaggcgaagatctaataaatcttacaacattgcgaattttagaaatcgactgatgatactcttttaacccttctgcaacaatgagatttaatatatgtgcactacacctcaaatgcatattttgaccccctaaaattgcactattccaattgttcacaacttttgacaaataaaagacaacaccatcattagaagaagcattatcaaccgttactgtaaaaactctctcaataccccaatctaataggcatgtttcaatttgcctatcaattgtttcacctttatggtcagtaacttgacaaaaattcaatatttttttgtgcaatgtccaattatcatcaataaagtgagctgtaagacacatataacaaagattttgagctgaagtccatgtgtctgtagtgaggcaaactctttgatgactactaacaaaaaaatcagtcaaatctttctttgtttttttgtaaagttgcaaaatatcacgagcaatagtagtgcgagatggtactttaaatctattttcaaaaactcccaacatttccctaaacccttcaccctctacaactctaaatgacatctcatcttttataacaaacttagcaattgcttccctacaagcctcaacattatatgtcgttgatacaaggctacatggctctccaattttcactggttggtaagacaaagtttttttttttttgtccactcgagctcgaccgggatattttagacatctctctcttatatgacccaataaattagatgttcctttatgaaaaccacatttatattcttttccacaatatcgacatttggatctaggatgcagtggatcagaacttaattggataaaatgctcccaagcttctgaagtagtggatttattgggcgtaccttcagcattactggatgatttagaacttgggggggggttgaatctacagctacgcgttttcctttatcaaattgagaagtcatctacaccaccaaaaagaaaaatcatgaaattcgcgtgttacatccagaaaaagtaatatgattgttagatccacagaagcaacatgattcaaacacccccaacaacaattctttaatcttcatttttaaaaaaaatagcccatcaaacaagaaattaacagattcaattttaccacagaataaaaagcaaaagcaaccgaattaggacatataatcaacaaataattctcttcctcaatccccaacaaccttattattaataaaagaatatcaaaatcattatctcaagtcaccattgataaaaaagaagatacataataataattaaaaaaaatcagaataaatgttatcgaagataaaatcaaaataataaattaggagaatatttacgagtactgtacctgaagaatgagatagacacaccgtgataagatttaataatactcgtcgatattgtgcatgtgactgtgatggcaaggaagcaggaagcagcttagggtttttttttcgtttgcagagtgaccactgatttgcgattttgggttatgctaaattgctaatgctagttgcttttggcgttatctactttatgtcattgttattttttttttttttgacaaaagctttaacttttgactttatttcaataatttttgaccgatttcatattttttattttttttattagataatgattgttatgttactttacttaataactttactttactttaatttttttaattattaatttaatattttttgttttataattttattaaataatgactaaattaaattatagtgtttatataattatgtaatattatatttataatattttttaaaataaataaataaatatatttttttgcgaattcacggatttttgcggattcacagaagtaaatccatatccaatccaccgactgtggatttttaaaatttcaatccaatccaatccaccaatccacggatcggatttatacggatcggatttttacggatcagacggattgaacggatcggatcggattctgaacaccccttatagatatgaaatcattcatgatggtgcaattggtgcttcggttcattatttatttccaaatgtttttgattaattttcttcctaatgcatatgcccttattccattcttttgactttggccgagtgttttattcaccgttttaataattttaagccatttcaaaaacaagttgcttatcttgaaattaaattcttttaatttagctttattaaaaatttatttagaaaaaaaataatggaagcccaggcccggatgcacttttagagggctaggatttgtttccatgggcttggatctggacttaaaaagcctaacccaagcccgcattttgccaaccctagatttaaaagacggtttgtttttcaaaatttctctcccatatgtcgtgttaatattttgaagaagatgacatgtcatcgatttcatgtttagactttagatgacctgtcactccgccagggacccctggaaaacgattggaacactgtatctattgttgtagttttacaagcccttagggacccaaatgttattactacatcaaccttaacatgattacatccatcactagttcactacaactgctgagcactgaatcgttctcgttctttcctctttctgttctgcccagttaaacctctaaacccttcttcatattcatttaaaaaaaaaattgttaatcatttaatttattgcttcttccgtaattttatttgtcttttattgtttatgtttttgtagataa

SEQ ID NO: 9667 - DNA, 1435 bp, Citrus clementina
  Intron number 1 from transcript clementine0.9_003845m (loc us clementine0.9_003849m.g) derived from phytozome v7.0 (c hr-ID scaffold_8; pos 1522397 to 1523831 reverse strand)
agaatttttgtttattgaagagaggaattgagaaggtaaattttgatgggttgagtttaaaacgtggatttgtttccttgttttgtttgtttgtttctcgggaaaatatgggttagaaaatgagggaaggttttggatttggaaagaaattgagcgaattgatttctctttttcaattatccgatcttttcatttctgccaatttcgcttaaaggcttcccgtttgaacgataaattgctttcagaggtgaggaatttgaactgctgtgagtttttttggctggatttttttttttgtaatttaaaataatgttgttgtttttgttttttttcgggtgacaattgtgtttgggtgccggaaaaattcaattaaaaggaaatttaaaccccgaaatgccctgcttccaactacttttggcaccaaaatgtttattcttattttatttttttattgtttttaatttttcatttcatcttcttttgcgaaattggttgatgttttgggattttattgttgattttgtttttagaccccaattgggactttttcatgggttcgatctgggatttgacggataattcaatatttcaccaaatattttatattaaatactcaacattttttaacaaatgactaagctttacactttttaaaactttttttttaatttgctgttgagttttggagatcgatctttgttcagggttttagatcactttccttttttcgtaatttgattgcaaactggccaaattatccctaatttttgtctttcaagtctggaataattctatggattctatgcttggatccttctctgtttcggggttttgttgtggtttaggttttatctttttgagaaaatttcatatatttgaaggagttttttttttaatagaatttttggtttttaatggtttttatgcacctctagttagttacccatatgtgcatctgcatataattttcactcaattttgtgtttttgaggtttatcttattgattattgtattgggttttagtgattttggttttagaaggtcagatcatgtggatctgatggtagttgcggaaataggtttctatgtgaaatttggtgtgtgtcgatgaatttgtcttggttgttttcttttaatcaaattaaggccctagaattggtagtaattatcaaattttgaaaccgttttctgtgcaaatggaaggattttgactgatttatgccgttctattttatttaccatttaggagattgaaatttggtctattgtatgatatggtacattgatgcttataatttaatatatagaagcagtttcgggtgtaaatatgttgtcacttctacattttctgtaaggcatgaaaacttttacgctaatatttccctgggtactatttcaggggtttgtgggtttaagatttccgtggtgcaccat

SEQ ID NO: 9668 - DNA, 3348 bp, Citrus clementina
  Intron number 1 from transcript clementine0.9_018168m (loc us clementine0.9_016735m.g) derived from phytozome v7.0 (c hr-ID scaffold_133; pos 420427 to 423774 reverse strand)
ctgtcacccagctcggtggccccgacagtaagtggtttctctttttcttttttctttttttggttttttctggtttatgatgttcttttttttttttttgaagtaaagattaaatttaccaacaaacacacacttcattctattttatatttgttttactagtttccctcctgtctatttctttatacagtgctttgttgatttaattatttatttaattaattcacgttgttaattaataaactgttatctcttgaatgattggatttatattaggtgggtggtcggttagcagttttgttcttcttccttatacaaattttacagatgcaatcattaaaaacttgaatttgttaaatttttttgggattttctatatatgatagtttcttgtactaattcttggtcctttatggaatattatggagtcttagaattcagcgattagggcaaaagggttcatgatagatgcagcatccatttgttgattcaattattgttaaagttgaattagaaaaaaatataaccatgggattgttactcttccctatttagtgggaaattaatttaacgccattacttgttgctctttgttctgtgaggatgatcacttaatttaattttttaaatccttttttacaaggtagaaaaatgtacgaccagggtaataatattgcaaagaactgctcttagaaatgcaattgatgttattgtcattatctttcttttgtggggtagtaacaaatgacctgccttgttgaacaacttggttcggttcgacatcaggactattgttcaatcctacggctttggtagttaggaaacttatgggatatagcatcccaaatatgtgcccccaagggattggacccctatatgttgactagaaaccgaacctctcaacaacctaacctggagtttaagtgccttttttgttcaaaaaatgtttttaagggaatgcacctaccattttatctccaaacacatttgtctatttgagccaaatgctaaaagacaaatataaaagcacttaatcatttgaaaggacctttgaaaatattaaaagcattatctaatccactaaaagctgaattagttccctaatccactatgagcattgcctaatcactttggtgttttgcgctttctattcttcgaatttaggtgttatttaattattcatggactcttgagttcattgtgtgattatgttgtactttgacctcggaaaaaatatggccaacgggacaaataattatttggaaccatatagttcaataatgtttgcgggcgtggtttagctgtaggacaaggcagagggatcatggcattttgtcttggtctgcgtaagaatattctgttattcctggtggatttggagaaaaaatctgtttcatcttctgcatgaaatatttttttgtggatctgcaagctttatgtttgaaatttatgtctagcttctaaatttggaataggaggacaaatgttgcaagctttcagtttcactgtttatttatttattattcctcaaagctttaatatgacgtaatataatttaattctttgaaattgctatcttaagtagtctgaaactccatgaccttgttggatgattgtccctgatgcggctgcatataatttaatggtgaatctgtgaaactttgttgagtgaaaatttgtcaaaacaccgagcgaatttgggtaacctaactttgcactaagctatcatcagcatcattgttagcaattgttcactgacgcgatccgtaatagaaaccatcattgctaccacgagcttaaacagtcaatggtaaggaattttcaagctttccaaacttaacttatcatctttagaaatgacacacaaggatagtggaataagggactgaaagatgggaagcaagaaatggtaagttgtagttgccaatggtggcggataagagatacatgtgaatttttgtccctttattttatctatctagatgataaaggacagtccctgtaaagttacagtactcaggggttattcttcgattgatgtttacctcccaagcttattggaaatctacttaagcagtaataaatgcaatttgcttcagcgaataacgtcaaaaaatctttgatcacatccttgttatttggaggatattgtcattttgaccaactgtgaagaaaataaagatgtataatgtggtgtctacttactaggcctgctgttatttagagggaattgcttcagaaactttaattttatacaagcataaagaccatgggagtttgctgaaatagaggaaagtttctctagttattcttagtgtggtgacacttccgtgtctagatcctgtcaaaaggcatggtaatagctgaatggttttaggcttatttacacaagtttcagagcttactgttccagaaaggagttgtttggatatgacacctgacttttttttggttgttgccaagggaagttaacctaaggggtatttaatgttgatggaatggtaataatgatcaattatgatgtgagtaattgattttcaaggctgcttttatgaggtccgcataaagcaccttcctaaatatggggtagtgaattatatgttcttaagattggatgactggaaaatttaattaatatttgctaacttttgctgaatgttgtgtcaaatgatgaattgacaagatcttctaagtaagcattaataacttgtctcaagattctctgccttcggtcaacctattgtagtgctggaagtcattgttcaatttacctagtaatcaattgtctcacaagttaggtgaagtgatagtcagttcccaattttatgagaagcctacaaaatatgatgcgctatccgcctcttctacttattgccctctgtcaacccattgtggtgccggaagtcattgttcaatttacctagtaatcaactgttaggtgaaatgatagtcggttcccaagtttacgagaagcctctacatatggtgcgctatctgcgcccttctaattatagattgtaggcaatcaaatagattggtcgaagcactatttgaatgcaaatggacaaagatgttaatggatttcaaatgaatatcttgtataaaatggcagctgtgaatagaaaggttctgacttttctattcatagaaaagcatgccctcagctttcaacataattgatgcactccttatagccttaatacttgcaagtattactggggcattttcaattggaagcataaagctgtaccagaaaattctctataaaagttaatgatgctgcttgagattggatgtaccattggactctttgtagttcacttctcatgctacaggtacctctatttc

SEQ ID NO: 9669 - DNA, 586 bp, Citrus clementina; identical to SEQ ID NO: 8928
  Intron number 1 from transcript clementine0.9_012199m (loc us clementine0.9_012199m.g) derived from phytozome v7.0 (c hr-ID scaffold_32; pos 438044 to 438629)

SEQ ID NO: 9670 - DNA, 1461 bp, Citrus clementina
  Intron number 6 from transcript clementine0.9_002414m (loc us clementine0.9_002414m.g) derived from phytozome v7.0 (c hr-ID scaffold_55; pos 796871 to 798331 reverse strand)
catcttcccgtattttcataaagattctcttccaggtatgtaaaaagattttgcgttctattaaattctgtctgtttcattttttgcattccctttgtttgttgtgattttgacaatcttttattcttcattgactaggtggtgtgaaaagtcatgttatgaatgagatgaagatgattgactttatagattgtaatgtaaaaattatttaaataatttatgaaatcaaaaaatattgcaagagatttaattctgaacaaattcagctatctacttcctcaagttcttggtaaactgattcgtattttgatttgttgaatgaaagaaaaaggataagtactactgttatttattagtaacatgatattttaaaagcttagaaatggtgacattttgctttcatcacatccttaagttcacaattactaaataaaggtgttttctttgtggtcgaataataggaaatctttggataagcaaatctaattgatatatgtagttaaggataattgtgatgcattattgggtggctcactacgtttgcaagtgcatagcctccctttgtctctgaggtgagggtttgagttcctgtttgatcccatgtaccaagagtatgtgatttctgctcgatataccaaattatcgttgcaaaccatgagatattattacagtaagggatgatcaaagttatcttgattcatcccgccatgaggaatcctcttaaattattaaattaaataaattcaaggaaagaagtgcctcggagttcattagggatttttttgtctatgtatcgctcgtttcgatcatttaggtcttgcttcacctcgatggttatgccacgtcatacttaaagcctttatgctatgtatagaccagtcattttttgatgttttgcaatgaattcatcaaaatcttttttatcaacatagccccattcttggtatcttattagtagttttgcatattcttattaaccaatgcaatacctacggttttgatatataaaaaattgcctgtcattttttacatacatccgttcgacaataagcattccccttttcatcaattctgtaagagtgaaattcttcttagtgatcgaaataggcagacctatttttgtttaaccattctgaaaattttgattgcttcgaatatttgaaggcatgatacccttgattatgcaggtttctggctttctgcacttggtttgtttctttcttttatcctgctttatcttgagttctaatattcttgctcttttcttgaccttaatgggatgatctttgaagtattaactctatggctctatccctaagcaaattgttcttatatcctatgttaatgtcacaaccttggccagttattaatgatattgtatctttgtttttcaagtccttattccaattgttaccttttcttgcaggaactgtcggagcatcttggtatccgtttgctcaa

SEQ ID NO: 9671 - DNA, 963 bp, Citrus clementina
  Intron number 2 from transcript clementine0.9_031285m (loc us clementine0.9_031285m.g) derived from phytozome v7.0 (c hr-ID scaffold_63; pos 44320 to 45282)
tgacaacgtaagaatggattttctcaaatgctactttttgctttttcttgtgatttttagattttgattctgggcattgtgttctatatttctttattaatattgatgctgcattagtactttgctcccacatttgtgcttgttcaggtggggaaagtgcaataataaggacttttatgcctcattttgttgatgagaagtaatacaacagcctatgccacatgaagaaacttgagaaagctagatactgaccaagataatggccatgataaatattattttttcaaaaacaaaaaaaaatttcatgccttttttccttagtttcatttattcaaaacacttgaaggttgattgacgtctgctgaaaggatttcagaagttggctgcttaataaatataattgacatgtcaattatattatcatccataatatcttttcccgctgtcaattatattatcatccataatatcttttcccgcttggttggttttgttttgctagagagtttataatctgacaaggtaaaaataaagtattcatgttttgctcctcatggatcgcttgatttgaagttaaatttcaatctcacttttttgttatcttttgttattaacctcacatctgtagttgcaaataccttaaatgataaactatgaataagtcaggagttatgcaagcatctggtagtaacgactgctgtctccctaaatattatttccttgtttgacattagatttttctcagttgtctgcatgctttctggtttgatttgcataggctggttcgccaaggtacatgatgactacatatggtcatccttttgggtatttaaatattttgatgtctcttgttaaatgaatccattgttttcaaatggagggggcatgttattataaatatatggtttcaactttcataattgtttagctcttacttctcttttctgtgtttaggtgctcaaa

SEQ ID NO: 9672 - DNA, 394 bp, Citrus clementina
  Intron number 4 from transcript clementine0.9_017640m (loc us clementine0.9_017640m.g) derived from phytozome v7.0 (c hr-ID scaffold_37; pos 726328 to 726721)
cttttagcgggtgtggttagcattttgtattggaggtgagtatactgtataccaacttcatttaggttctaaagtttcatcgtactttgtaatatgcgagtattgaactggatttttgttatgtaatcttagcaatgacttggtgcaatgaccaattcttacactaaaatgagttcagttttggtagctttgtcaaggtacagttctctgctatggttaaaaagtggatcgctatgttggttgcatattgattagcatcaaaaggaggaccttttgattctatgcttttatatatatttgaatgggaatgacattttaaatcaaatatttacgagaggtttattaggcagattattttttcttaatggtgcttttttcttttgtagtttttttg

SEQ ID NO: 9673 - DNA, 4731 bp, Citrus clementina
  Intron number 3 from transcript clementine0.9_020298m (loc us clementine0.9_020298m.g) derived from phytozome v7.0 (c hr-ID scaffold_2; pos 4740743 to 4745473)
ttgtaattctttttcttatgtattttaaatggatattgattctgcattgctttctgtccgtgagggattttcttgtttatgctctcctttgtgtaaatttagtgcttcacaattatttgaatgtcattacatttgcattcctctttaatatgtggatcttgttgaacctttgtgtccggtctgaaaacctttatagttggttgtagaaacttttcatttattgaatttaatttagatgcttgtttacatttccccttttagtgggactatagtgatggtaaaatggatatttattcctgcacgtttcaattcagtgatgagaaactgtaaaattgctttcagttgaaattttaggagggtattggagtatactacagaatctagaaggttgagtttaagaaagtcttttgaaaatgaataaggaagaactaattgctattactttttgaccaagttgaaaattgggcataaaaatagaagtttttaagttatttttttcccactaatcacttcatttttcaacaaaaaatagaaaaattcgctttcgtccttaccatgcatgctacaaaacaaaaaccaagtgcttaaacagcttgcattattagcctcattaagcactcacatgaactatcttaaaaaagattcaactcgcataatcattctttatatgttaatggtaaaacattatatatctcatttaatgataatagttaataacacttgaacatgcaccgtagacaaagttagttcattgacaatacttttgtcttatatagtcatcatctagctagaggtcctttactttaataaagtgaggaataaactaaaagataaaaaatacaaatttcaatacactacaagacaaaatgcattgcattggagtttgtgatttttttgtcttttaacttgtccttttattaaagcaagggatccgttattgaaatctctctctctctctcttggagatgcaaaaagaattgatgatcttttgaataaactagaaaggaaaatctagatttatacaattttaagtaaataaaaatgcaaatatcgagagatttaagtataatagtcctgagaaaagaaattcaattaaattggaattttttttcttttctatcaaaagaaaaaaaaaatttttacctttttttttttgcttttcttgattataagattacctaatgaattacgttgtaacatttgtcggaaggaacatgttaagaatgacttttcatgctcggcaatctacaaaagatatgaatctgactgcatgtgtgtcttgaaaagacacatcaatgcatcaaaaaattgatttgaagtgtctttttaagttcttatttgggcacatgttgggtatgacttttgatgtctgaaaatccacaaaaaactagagtttcattaacaatgtgtattgaaacacagatatcgaatctaaaaaattgaatgaatgagtcatttaagattctccacgcagagagtcttatttgacacgtgtctaaatggtacatattaagaggatcctttttattaattatttttaacatagtatcataagtgatcctgattcagttgtggaatataattcactctctcatgataacatttactctcatgattaatgtttcacttgtaaagaatttcttaatgtattcctatggtacaaacctaaacatctctgagtatttcacaaacaactagcagtatttgtggagtataaatttcaatgaatatttttattcaaagtataagaaggaaaccttgagaagagaggttgttttctttcatgccactatctcatgtgttctgtttttattttttccttttgaaataggttggatgttaagtttttagaaattatttctctttagttatatgattatcctatatatttgctcatagaaaggcaagacagacttttaatatagtcggacttaacattgacatgacccaagcagaacattataacagctgaataacttcagctacacaactgactcgattgaaggaaaacatgacagctgaaacacttcagcttacacaaacaactgaaatgaaggaaaacaccataacagctgaaaaacttcagctacacgaagcaactcaattgaaaaggaccacataaaacatactggatgaaaataaacaaacagaacctgcatgaactgcatgataaactctcataaattcaaggatagaaattgtgaggccattgtttggtaacatcatatggcatcccaacatcacttccagtgatgctaccgccaaaaagctcagatgacagccccatatcgctgctggcagcattgctagccactcctgtattctcttgcggcaggccgagattaacatcattgcctccaaggccgctgctgcttccgatgttgatgtttccttgtggcagccccagaccagaaccaatattataggctctaggattcccacaaggcaatcccagatcagaaccaatattataggctctaggactcccatgaggcaaccccagatcagaaccaacatcataggccctaggatttgcatgaggcaactccaggtcagaaccaacatcataggccctaggattcgcatgaggcaactccaggtcagaaccaatatgataggccctcggattcgcatgaggcagccccagatccgaaccaatattataggccctgggattcacatgaggcagccccagatccaaaccaatattataggccctaggatttgcatgaggcagccccagatcagaaccaatattataggccctaggattcccatgaagcaaccccatctgatttgcagcaccagaacttgcagcaaatgcttgatgagaagctgaccctgcgtcacttttagtccttccactgctactgccagcgatgttctcgctgtttttcatcatatcaatgaaccattggtcccactgagcggattctgtgaggttccttccgcctccacctgtacttcctccaacaccagccgtgctgtcctctggagcagggagttgaggagggtgagggggtggaggcagagactcttgtggaggaggattgatctgttcatagtattccatcctcttccttaaatccttctttctctcctccataagccaaactaaaccttgcagttcatttatgttaaaatcatcagttttcttaccaagatggaattgttccatgagattggaaacttccatcactttgttttttctgctgttcttcttcagttgatcctgcgatttgaccaccctttctttgaggtaagtttcttgattcatcattttcttggacttctccatttccggcatattgttgaaccttgcaagcagctgttccaccacggggcgagacggccacattgctggctcgctttcatctgggctatagattataatgaatgcattgacatcacagagggtagtcaattcactcactttcttcagcaagccaacctttcttttcttaaggctggcttttctggcactatcatttgctatccaattgagcttcaccttctttcttgtcatgttttccaattttgtgtctcttttgtgctttaaaacaaaagagtgggtttatatagcgtagggccaggggtagaactgaaataaaattagggtttagggttatttttagctattaagagtgtaaggcatttaggttaagaaatctatttgtccagattctaagattattttgctaggttagataattcaatttcattgttggcaattgtaggattattcattgttatttaatgctaagttttgaagccctatctggactaatttgtacgaagttggttttttaaggttttagtgtgtactaagacattgattataatttaaaaatattgttatgtacaagggagagaccatcattttaatgttgttcaatatgtgctttcatataggagaacggcgtaggactgaaatcgtcggtgagaaattctagctaattattttgagcattaagttgcatttacaagttacgatcaagaggtatattaattgattgatccccaagtcaggtgtatatcttctagtgtgttagcggttgcgtgccacgttccttgagtgaatggttatatttatatttaactacaaaaaatgaacatgcttaactgtattatttttaaacattaatagttgtctattaagtcccttggattcttgtaataagtagtttcttaattgtcattggagcacaaactatgctgcataatcattagttgtgctattagttgcgaaaactataagtgttctgaaaccatatttttttcacggacacggtatcatattgtgtacatccttttatgcatctcatggttgcttgcacacattttataaataggagtaccgaattgatttatcagattggaacattacatcatacaggactatagcgccaatttgatattaaacataatgagaaaatttcacaaagtaactgatacttacatttgatgcagtatgcttataattctgaagtattttatttcatgtagcattagatcatatgcagtttgaaattcttgcacttgtagtaccttttcaattcttccatggaatttcttcagcaacaagttgactcagttcgtagttactcatgttttcatcacgtcgtttcagtccttaaaagtccctttattatgttaaagtttgtcgcaatcctgcatatatagcatgcctattgatgttttcatatgattgtttctatataaggagttctg

SEQ ID NO: 9674 - DNA, 2710 bp, Citrus clementina
  Intron number 9 from transcript clementine0.9_000931m (loc us clementine0.9_000931m.g) derived from phytozome v7.0 (c hr-ID scaffold_67; pos 714634 to 717343)
agtttagagtgccctgttgcgtcttcgatattacggtaagtttttgtggtagtgtcatttttttgccattacaggatcaactgatgtttataaattatgcatactgcgtaaaataactttcttcgccgattttcacattttctctcatgtagcttcgagaataatttgattaggcattgatagctgtttgatgcattccattagtaaataatattgttatcaactgatgtttataaattatgcatattgcctaaaataactttttgtacctattttttaatttttctctcatgtagccttaagaaaagtttgattaggtattgatagctgtttggtgcactccattagtaaataatatcggttaatgaaataacctaaggttaggatggtaactaaagcatgaaaaggctgctttttggaatgcatagaagggatggtcttgctagcatggacaaatatgggtacctttaatgtgtgtgtgtgtgtgtgtatagtcatttgctagtgaggacatccttactttaaacacatattttaatacagtgaagactgttttatttgtattttagtgatatcctcactttgttaaaatgaatatgttttcgttagatattatatatagaaagagagaggaagagagagtaaaagatcccttactttattatagtaagagacaaattgaaagacaagaaaaacacatactccaatgctgaaatttttgtttttttgttttttactttttagtttatcccttactttaaaaaagtaaaggatccctcattagataatgactctgtgtgtgtgtgtgtgtgtgtctagtaagagttcctttactttaatatgataagaacaaagtaaaagataataaaacacaaatttctatacacttcatgatacaatacactgtaaaaagtatggaatctcttattggaaaattactatatatatccctttgtaatatgggattcctacgttggattatattgcgggaaaatttttgtggccgttggatgccaccttatcttttattttaaagtcatttattttatgcaaatgggccgtacgtcaagaattttttttatattttaaaaaattaaaagaaagtgtaagccataactaacttttttatttaaggaaaaaaagagtaaatttagcatttgagagcttttgctcaattgagagagaatcacgatctaagaaaaagaatcaaatttaaaaaatcacaaatattagaagctgcaagaactagatgccaatttgaatgaattgaattaaatgcactcatatttcctttcattgtagaattactaatgcacataataatgcaacagataacagacttgcacagcaattggaatgcatcaaaatcattaccaaaataatgaattaattgaattaaataaacataatcagtaagcaatatatatacatttaatcaccataagtaaacatgacgaagctctagtggccggaaaatcccaaacggtgattcagtttttcctaggctctaatctttgtagtttctagtaattgtgatatttaaagtctgattactgttttcaaatcgcgattctccctcgattgtgtgaaagctctcaaattctaagcatttgattttaagtttgctcttcctttttttaaataaaaaaaaaaggtctgttaaaagtgttggaggtggggccaatatgtcatatggcttccgttttctttcaattttttaaaataaaaaagctcttaatgtggggcctatttgcataaaataaatgactttaaaacaaatatttccaaaatggcattataactcaatgaaggagtcccttattcgaaaagtgtagatacacgcacacatcatgaactgtgtaattagcaaatccaatctatgtgtgtgtgtacacacacacacacacacacacacacacacacacatcatgtatgaatgtggtccttgatagcaattagcaaatccaatctaatcctcttgtcccattctatatctatccatctaatcatgaacacatgcctaggtggcatttgtattggtatatcatctttaggtcaatcaagctctgagtatttgtataactatcaacttgattatgaactgtgtacttaattgattagaagcctatataagcctatatatgacatgtgtaatccatttaaaaacgtaatttcatgttaacaacatcaaattaattgatttgaaactgactcaagtaagtcataacctcatatattaatttgacaatacttgaaagtgtgatgaaacacactatattgtaaatttaaaatattctataacatcattgatttttaaactattctatcattagctctctctctttttttttttttaaaacacgcgcacgcgcacatacacgagatagtaacatatggcttgaatatgtaatgggtttgtatgattcaagtaattaatcaggctattatggttaaattttgggttagacatgtcaacttgtgctcgacctgtttgattattatgacaaacagctcaactcttcaacgtgaagacaatgaaagctatttgaaactgactaatttgtgttggcttccagcattttcacatgtcatgtctaaaagtattacccttgtaccgacactcatataaacatgtgcacactgtgttgtctctcccatcattttcaatttttgattttgtgtaaagcttgacatctccatttgattaggt

SEQ ID NO: 9675 - DNA, 795 bp, Citrus clementina
  Intron number 8 from transcript clementine0.9_016559m (loc us clementine0.9_014486m.g) derived from phytozome v7.0 (c hr-ID scaffold_47; pos 1442897 to 1443691)
ctgctggacctgcaaaggtacttttttctcccctgttttgatctttaatcaaatcataccctagatcttaacacttctttttcagtgcaaatttattttcttgcttgattagttttgtttctctaatctctatatcatggtacctcgataaatttttaattatattcctggggtgtaggatttgaagttacaaattttttttcactgttaagatcgatcttccctgccttttccttaatatttagtgcagttttaccgcatgggagaagttttgactagattcttaagcctacttggaaagaagcatactaagatgaacagaatataacactgccgaacgacctgatggtagaatttgcattccataaaaagaaagggatttatatctttgagctatctatgatatgtgctgactaatctgaaatttcttagtccaattagcaaatataatttcaggcttgaaagctaaggtaaataaacaatatagatggcatatgttgtatacaatttagagttacttgtccctccctccccccacgcaaaaccccctccaccaacaacccccttccccaccaaaagaaaagggaaaaaaaaaatgaagaaggaagaaatgtgccatgcaattaaaggacatccttattatagaatgattgtgttttgtagatatgcaattgttttactttggtcagaaacttgtctgtgatttgcacatagatgtacttttctctctcttgccccacttttattaacatagtttctgatcatatcaggttgtgatcacaagcataaatatag

SEQ ID NO: 9676 - DNA, 2312 bp, Citrus clementina
  Intron number 1 from transcript clementine0.9_004710m (loc us clementine0.9_004710m.g) derived from phytozome v7.0 (c hr-ID scaffold_56; pos 104951 to 107262)
ggttaccgcgctgacgaggtcctcggtcgaaactggtatgaaagctatttagcttgatttgatttcctggtttatttttttgtttggtcgatgagaaaaaaaaaatggattagatgaaatttgttgtgattattcattagtgttttttttttcggttgcattactatgactaagtttttggttgaaaaatgatgtgaaattttcatttttaagttttagagtttgtatttttattttttattttttgcttgctctgtttggatgaggagcgaaggatggaaagaaaaaatccactggcgaaggatgcaaatacatagactctgttagttaagaagatggaaagctcgtttgtataattattctttttgtttgaatctgtggcaaccttgggacaacttaaattgtatattccttttttgcatggtcgagggggtgctttgctcttttggtgccaaaatgaaaacaaatctagacaggtacagtaaagtatatctggtgcattgccttgagttttgtagctcaaataatgaaaaagaaaaatcacataagtcaaagttttcatgttctgattttggccatggaggaaacaagaagttagagaaagagtattttaaatattcaatagaatgttcacatctcaatggaaggcatttggagttaataaaatctgaaattatattatggaaaagatcaaggcggttcactgctggagaagtgcacagaaaaagcaaataatctggtcaattaagcatcatagccatagactacaaaaatgtaaacttgctacatctgagaccctgttgtaccattgcaagtcaagccgtcttgcagttagcttgctttatggtgattaaatgtctttttaaatcaattgtttttatttttgagtttttaagctcttgaagataggaattgttgatggcatatgatagttgtatcagttcagcttactgcgcatgcccttacatgcttctgctgttgttgtgtgcaaaaccttgctaaataagccttcaaatataatctattttcagatcaatgtatgaaattgtgacttcctgtgattttgcctatcaatgtttatcaagtgcatggatagtccttaaaagattgaagtgagttacaatatctatgaatatgctgaatgatgacctttgtgcagtatcataaggttcgtctgaacatgtgttgcatgatgaattaattttcaaagttgtagctgctcaaggtttaactctttgttttcattctcaagcttgtagctacttcggtgttttgatgctaaacaatagagttgcttattggtgggcttaaattatttttttgacctgagatttggagcaaagtgatctaattcctcctggctccaaaatttggatgacctgtcttagtgggcccatcgactgtactagagaggacaaaaagaaagaaaacctcatattcaagaaagccattgctcaagagtcacgtaatagttataaagatgagattaaatcaaatcagtgagagagctagctttattgttaacttgatggatcaataaaaggcatgatggaatgaggttttcaacagctaggcaggtgctgtaacttattttcttttgtatttgttacaaaagctaaaaattctactgttcccattcagtgagcaacttgctgtggagatttcttattctgctcactgttttctctgcttttgtttacttctttttatatgtatgaatttttatgggtagtctccctttcctaaacttccaagtagtttccgcttccctttaaggttttttgagacaatgtaatgtggttttctggagaaattttcctatatatacatatacaattaagtatatgaagactgcagtatctctttctttggtggtttgactagtgtatatagtgtagacatagttggaatctaacactgcttatcctctgtgctattttgtatgtatatgttatatggtttctctttcttctttttcctttctcctttccttttctttttctttcctcctaccaaatgtactcgctgtgctttcactactttgatctcttaaataataataataattgttgtatgcacaaaactttaaatattctcagtatttattttttttctttttttgtaacattttgatgtcagctaattccttgctttctttcttttttattttttcttgctttagggattaaattgatgtatttttctttcaattggaaagtgttgtatcttgtttcttgaagccactttgtctgagtatgcctttgtctttctgtttagtcggttcttacagtaccgggatcctcgtgctcaaa

SEQ ID NO: 9677 - DNA, 1884 bp, Citrus clementina
  Intron number 4 from transcript clementine0.9_007071m (loc us clementine0.9_007071m.g) derived from phytozome v7.0 (c hr-ID scaffold_21; pos 2670780 to 2672663 reverse strand)
acatcaaggcttttgctttcaagaccaaagctttggtaaatggcacatctttttctggagttcctttttgttacttgtgttctcttttgacattacccagttctgcttttttgggtaccattattagtcaaatgactgatgtcaatttcagctggcgaagcctctggtccaaatctgttaggctaaatcaatcccatcattttaacttgcataaaatagagttaagtctacagggctaagccatcgtccttaataaattattaatttctaatgcaaaaaatgataatgaagtcaatcagcttgcagtgttaaataaatgtactttgttactattattatagggctttcttaagttacattaagatgtaacttacattaatcattaagttgtaattaatgatctaaaaataaaactaactaaactattttttaggtcactaaatacatcttttgagttaatataagttacattatataacttaacaatacccatacatacaataacatgattttgaaggtctgaacctacttataaaataaaaaaaaatgtactttggtcttatcattgacttgattaaaaaaaaaaaatctgcacaaacaaattgttaggctgattattgattagcccctttaaacaaaatgtttcacatcatcttgaaaatgtaacaaaataataatgtaacaaaatgatattataacaaatatgttagttatatacaagcacattagctatctataatgtttttattacttaccttttctacaaacaatcatttcatacatgaagttgctttaagacgtcaaaaaacaaatgttaaagatgatattcaaaaggtattctttgacactagcggcataaatttttaattttaatagttgggtaagagggaaagaaaagtttgatcctagatttacagattttcttcgctttctaatgacaaaagattggttaagaaagacgaaaaattggtagttatttggtaaaaccagttcaggtcaaaccgaccatccaaattttaacccaattgagtcagatggctggggtgtgcggtttgatcgaatttgatcctaaatagattgattaatatgatttttttttttgggtgatagaaccacgctaatatatggcctattaattgattttacagacgggtctaagcagagtttggtaaccatgtgattcatttaaatgctagtatatgataattgcttcctatttttactacttccacctaaatttttcagatctatattctgtcaatgtctattttacctgaatatcaagttcagtttctagcttgctctctttgagctgccgtcttaattacagagttgtacttgatttcagttggttttctaatttatgataagttttgcacccccttcaacacttatcttgtacgcttatcgttgaaaaagatgtgataaacatatttacagcaatccaaccagccaggtccatttaccaaagataataactttaacaagttatttatcagtttccctaatgaattaatgctgacaggataacaaatgaaagttcgacaacatagattgttaaatgtttattttgctttgacattctttgacatttgctcttgaattatcactggaaaatttgtgaatggtagggcttctttaggctcaatctctttgcttgttcagaagttaatgcattctggtttgatggcaattatcttgctgctgatgtatcaaccttgcatgacctgttggatgatttgaattttgttatgaatcgatgtcattgattgacaagctcattgtgaatgatttgcacctacaactagtttatgaggataatagcattatgtgtgaaacctctcacaagttagagcatttttccccattaaacagcttttgaag

SEQ ID NO: 9678 - DNA, 1213 bp, Citrus clementina
  Intron number 1 from transcript clementine0.9_006230m (loc us clementine0.9_006245m.g) derived from phytozome v7.0 (c hr-ID scaffold_10; pos 5463765 to 5464977 reverse strand)
cattaactcgcagcttttcagcttctctcttttaggttctctctctatctctgagattttagaaacatttctgtttggatgccgagaaaaaatgcaattttatgttcttttgcagtgttttgtttttgctttttttttttttttggtcgccgcgttttagcaaaatgctactcggaaacgatgaagataatgttaaaaatgggaaaattggtctcgactttaaaaacgcttactgtttttgaaccgttcgtgtataatttttttagttccttttttttattttgttaattttagtttcttacagccacagatcttgatctatatctggcttttttttttaattttatttatttttggatgaactttttgaattttaatttggagtgttagagtccttgtttgaagatgtaaaagcagagaatgacttgttttctgcgtagcttatactgcatgtgttatttctcgttgcgatttttctatttcatcgtaattcagtatagttaaaatttcatgcaagagcgttgctctttaaagccactcaatacgttgttcctttattattattattattattattaatcttgtggctacatctggacgatgctccaagtcattttatagtacatcgattcttgctcatattctgtgcgagatttgggctaaagctattgtgtttttgctgtcatattatttttgctgttcttgttataaaacttttagcattcgtgtacgaatctgaaatgttacttttaaatatagcaagtatcagacttatgcggttttttactttgattattattatagcatcattatgttggatgattcaaaggggccctgggctgttcatgcatgtgcctttagtatttttggtttcagttttttggtgatgcattattgtaaaattgtttagatcaattatggatgaccttttcatttagttcccctattgagcatggtaggtaatactcatgttgaaatttggtgtatgtgtgtttggcgattttgacttgaggatctattaagttatgtaaccattttgctagttatatcttctaaagttttgcgtttccccaccttaatttacaagcattacatttcactgttcttgaataccttgtaactagacatacagttttgcgttacccgagcagacttgatttgttttctaattacactctttgttctctatgttgaagtgtgtttacttcctacc

SEQ ID NO: 9679 - DNA, 3107 bp, Citrus clementina
  Intron number 7 from transcript clementine0.9_003713m (loc us clementine0.9_003725m.g) derived from phytozome v7.0 (c hr-ID scaffold_2; pos 9350759 to 9353865 reverse strand)
aggtcagtttgatatactctagctaactgggtgcttgtttaaaactactatttttcttcatcttgcagtgccttcaataaaatcgttaattgttgcagaatttatgttgctttttcaggagtggttaacgcagcttaatatatttgtgctaagtttattttctttctactttaccttgcatccattactactttgtagttaagagccaattatgttgcagcctttgtacatttcggcgtttcaagtcagaaggcagaagctacaggatacccagtcattttctgtggctgaattatttatgaccagtcttacaatgtgtttgaccgttggctgttttaatggaacttgctcatatgaatttaaaagttgcatgattgctacaattattgtcttgtaaatgaaattttttcttaagatgggacctatatcattcaacgaattgtgctgtactaatgtctctatcaaaatctgcaggtggagagaatggtgaaagaagctgagaagttcgcgaaggaggacaaggaaaggagggatgccattgacacaaagaaccaagctgattccctcgtgtatcagacagagaaacagctgaaggagctgggagaaaaagttccagcaccagtcaaggagaaggttgaaggaaaacttcaggatctgaaggattccatttcagaagagtcaactcaaaagatgaaggacgccatggccgcccttaaccaagaagtcatgcagcttggccagtctctatacaaccaaccaggtgctggacctgctcccggtgcggaagctgggccgtcggattcgtccaacaagggacctgatagtgatgttattgatgccgatttttctgacagcaaatgagtaccttacagctttctgttctcattcctggtatcatttttgttgcatgggcaaaggacacaacgttgtttttagaaatatagaagatattggtgacagctacagatggtaggaaacccccatttgcaaacgaaactagttttatttcttgtgtataaaacgcacttcaacaatagttcatttattaaatgcagaatatggtttttatgatgaattttagagttaattttgaatatttatgtgtgatatgttgtcattctcaaaaaaaaaaaaaatgtgtgatatgttgtcaataatgctgggatctcaatgttgtatgtgtgaatttgttattgttatggggatgaagtaacgatctgacttctgagattgagtggacagagagaatcagagaactgcacattaaaaatatcattgaaattttcagtgcaaagcaaaggtgattgcactggaaaatgtcctaaaaatgccctgagaaaaagtgtgcttctggcaactgccgttgcgtttgcaattaatgcttcgagcttgaggataaagatgctaattttgtcatctataattacaataaactactaaatttcatctgccattcatttttttctttttcaagctttaggccacgtagaagtctttcaaagtgactaatttcgtgatatcgtttatataacgtcattcaacctctgtcatttttctatcttaaatgcgtcaacaaaaagaaaaagaaagctgtaaactattaggtctactaagtgagtgtttgtggtgcttttaactttgttttgaaagcaaaccagcacaagacactttcatttggtaataaatgtattaccactcatccaatgcttatagtttacagctagtgagtgtggcttaaaaaacaacacttccgttccaacatgctgctttgaatttgaaatataaagtttgtatttcgtaaaaaatgactaataaaatgataatatcagcatctgtgatccattaggtaaaacctatatatcaaaaagatctttatgaaatgaaagtgtgatatggcttttatagaacattggtgatcgaccatatgcctaataaaaagttcatcaattggaaaaggaatagggatggcaatggagaggggaggggaggggaggggatcgacatctccacactcattcccgatattttacatatattcctgtcccctcccaatctccattagaattgattgaggagatcaccgttccctccccgaatgataagaggggatttctgaggggtccacaaacctcgaataactaatacgttttatatttaaattttgaacttgattaatcatattaaaataaaaatttaaacaaaagtaaggtttgacaatatatcttacactaacattaatccattacaaaaatcgtactacaaaatataaatgatcagaataattatcttcgtcaatcttcataatcttatgaaaaaaagaaattgttttatatcaataatgaaataaatgaaatgggtatagatactaaaattaatatttttaataaaagcgtttactcttgtacctcatactcctcctgttcttcctcaagaaatgtgacaaattgagagatgatatcaggtttcaaatctaaaacaataaaaaaatctaaacaatatgactcattatctgaaatagttttgggccaagatatttagaataaggtctggttgaatagtaattcaggactacaactagttaagtaggttcgaaatttttataacagatttgtataaatattttgatatttgttatttaaactaatatttaatataatttaaatttcattattcatttattaataattctaaaaaatagaaccaaaattaaaaattaatatgaggaaatggggaaatgggtacgggatggagatttcaccttatccccatcccttttccgaataaaaaactgggtaaaaaattatccacattcccttcccgaataagaaattaggtatcaaattgtcctcataccctccacgaatagggaaaatccccaaagattcccatccccgtaagaattttctgtggctgaattatttatgaccagtcttacaatatgttttgaccgttggctgttttaatggaacttgctcatatgaatttaaaagttgcatgattgctacaattattgtcttgtaaatgaaattttttcttaagctgggacctatatcattcagcgaattgtgctgtactaatgtctctatcaaaatctgcaggtggagaga

SEQ ID NO: 9680 - DNA, 4081 bp, Citrus clementina
  Intron number 3 from transcript clementine0.9_007096m (loc us clementine0.9_005958m.g) derived from phytozome v7.0 (c hr-ID scaffold_20; pos 517091 to 521171 reverse strand)
ggagagggcacggaatctgcggttggagaataaaggtttttaatcattgaacaacgaaaataaattgtgacattctttaaagtttaatattttataaaaaaaattaattctcaatttaacaaaggattctctatacttagtgagttcagctaaaccggatcttcttcactgagtgttatttgaggcaatttatctactgctattgtagtttccttgttttgctcatactctgcttcacctttagtgttggagttctataggtaatgcaatggtactttttggtgtggcacattgtctagctgtatatagctgatgttcagtggctgaattgattggttttaagattcttctgtattctgttttaccacttttatttaattgacagtttgttcttaacaatcattattctgaatgataatggataaaacaccgaaggccttatagcttgtgtgtgaagtgattttaaatttgtttcaacataatcttgtttatctagtatttgggtggataagaagagggattactttttggagtgtactcagttgaattctaaaaataatggtctcacatcattatcagaagttttccttttagattcattgatgtctacagcatgtataagcagtagacattcaatctaaagatatagactatgtatctcgtaggtttggtagtgaggttatttctctggaaattggtcgatcaaccttgtccgcttttagtggtggaattttacttagaccagattagacagacctgctgagaaacatgtatctctttgcttttcttgagtgccattccctggctgtgctcaaataaaagaatctgtatagagtgactttttaaaatttcaaattcctgtatagcattgggttaagtgcgatgcctgtatttgagctgtatttgtttcaaacacttcattatgggattaattgaagactgatagattgcatttatggcactgcaattagatgtcaattcaaatggacaccttcaatcatttggatttgatggtcaacataaacactgtaaaaatcccgttttgtgaataacctattgaacactataaagactttgttagtgaaacaaactcgttccaaatcaatgctatgcgtaaatgttgactatgcgatatatacattccatttagatatattaacctaaacccttgtgagaaatcgtaagtacaatatctttgcataatctcaagtgtgatatattagaagagaagcataagctcaagtgtgatatattacaagagaaggaactaacaccagctctttctggttccatttagatctattaaaaagaaggatctattaaaaagaagaaactattatgtacctcatacttcaacattcctaaatgatcaagcattatatttcttatctatttgatcaagcagtattacataagtatgaaacaaatgattttacatatattttcttatgcaattcatacttcattcttcccttcctcttggtgacattctatttcgtttatttataattatatcgaatattagtttctttagtttttctcgtcccctttttgttttttatttttctcctcacagacactcaattgccctctttactcaagcattttctcttctgtgcaacaattaaagtgttccctatcatttcaaagaagaaatattttgcattgcttttcttgtttatattcatatctttaagacttctattattactgtttcaccaatccgagaactgaagagatgtgtcatttgtctggttttggtgagcttgctaatcaagtttagactcattatcatcagattccactatcaggcaatggtatatgtgaaaagctcagaagttggtggatgcagacctctgtaaataatggaatgggactgataagattagtacttccatgtcttttatgctgggaaatttggaaagaacaggatagacgactatatgaaggtagtggcttttaacttgtgcagaattataagtcacattgattttggtcaaagaaattagtctttgttttttttgggggggggggggggaaagaatgttcctttttccaaaaatggaaatggttactgtgtaaaacataatggcattccaaaactgtccaactgtatattaaattctctttgcaaatgatgtggaggatagaagcatctaagtttcacgagtgttcaaaaaccaattaaaggtttggatttcagattttatacaacttttacgtgcaattagattttattaatttttgaacattaattcttctgaaaatgaaatgttgctctgaaaagatgaaaagacagttttttttttttttttgggttttggtttttagggggaatgggggagggaggtctcttccaccaatatgactctcatgcaagttgagaagttggaacttaagagaaaagcttggtcttaggcttttttatagtgtctttcgaacttcattatactatctgttattattggatgtgtatttcaattcaatcggccttcttgtcctatgtagtattgcgttttcattctgagctttgatgtaaactgaaaattactcataatgacgcttaaaatgtatgtatgtaggcacattcatgagttgattatatgagtgaaaatgttaatagtcaaatgtgttagactggtcaggcctgtttaagaatcagcatctccacaaaaggatgctgaagatatggttgttaagatggaaagacggtgagggaaagatggttgataaatgtatgttgaaaatccagctgtgtgaggaatagacacctagagacaagctcataggattatatgtaaaacagggatgataagatgaaggattagaaaagcaaaaaaggctaagcaataagttgatttgcagggagctagtagtatcaattactgagatctggatcacagaaagttgataaaggttccttgatttggtttgatgatgttaagggtttcataagagagggtgtgtggttttagtgaagttctacaagcacagaaggaagtttgatatttgtggcacatatgaggggaaaatcagatagcttttggatggagatggccttaatggtgcagatgggccaataaaatctgctaactctatatatttgtgatacgttataatgtcatatttaatatcaactaattttttatcaataattggtagtatagagagcctctgatgtctgcactggactgatccctttgaccatctcagttccagcaatgggtgatttgtaacattaagaatacgggatagtgagtcaatggctccttggttatgtagtatgaacttgcctgctcaaataggtgttctgcttttatcaacaagaatgtggagcttgttttcactttactattgaaaattttgtgcctaaaggggtacttcaagttgagctgcctggtatgagctggtttggactaaattaccagagattaactcttcagcctgatgaagggctcactgttattggatgtaaattgcatttatttatttcttccagcaaatacaaggccttcccccacttcctttttcgattttccttcttgttgcagtttgggcactaaactacacttgaatcttatgaataaatttgtgaagcacctacacggtttgatcacaattgtacaagtctccattcatccataattccatctggttttggtcttggtgggctaattttcaagttgatgtgcaagaagattcttttgccccaagttgaggacactaaaatgtaaactggaaattaacagacgggttttatggacttgatcagaatagtagttttctttgtattttatagcatttatggtcttgtggatatccaagtagctgatttgagattataaagtataatttgctgtagaaacacaaactgatatttgggaaactcttgagatggtgcatggtggaatgacagaacaatatacttactagataacagtgtcttctttctcatttcgtgttcttatacatatttcgtctccgtcatattttaagcaacttcatctttttacttgttgtgaagaaaatcattcattctattgcagaacagtcttttaaagagaataatagtgtttctgag

SEQ ID NO: 9681 - DNA, 2039 bp, Citrus clementina
  Intron number 1 from transcript clementine0.9_028331m (loc us clementine0.9_028331m.g) derived from phytozome v7.0 (c hr-ID scaffold_55; pos 140820 to 142858 reverse strand)
gcattgagttggaggacaagcttgcaaaggccagggttgcaaatactgattagtatgatttatgaaatgatcagggaaataagttactcttgtcaccctatattcttttttttacttgatgattcttaacaatagaacattcaatataagtttccttcctaattgcttaaaaactaagtctcttagctaagttaagctactctctgattaaagttgctaataaggaacttgttttcaattagttttgtattcaattatcttgtcagagcaatgctgctcaaagataaagttcaaccatctacaaatcacatatatgggcataatgtgtttggaagcccatgtaatgaccatataaattgcatcaaaccatcaagtggcatttttgtccctcttatttcttgttgtttctactctaggaattaataatctaaaaagttaaatcctataaagaaaagtctctggatgaactaatttatacagaatgatttagtgcttgaaatcttttttctcagtatctcagtaaatacatatttacaagaggtaaaatcatcattctaaactctaagcctcactaatattttaacttttatgtatttaagtcatttaaactttaattatatgtgttttgtaataatttaactttaattatatgtgttttattataatttaagtattttatatattttatgagtattttgtcactttacaattaacgaaaagtcggacggcaaaacatatagtgtttttaagcttaaaacaactgaaaaccttaagaagtgcataaaggataagattataattttacgacattggtggggctcagttaacgtggtattgactagctgatgtggcattgaccgacaacgtgtcagtatcttattggactaaaaaatgttgatgtagtgttggccaatgatgtggcattgtttgatgatgtggcgttgaccgatgatgtaacaatatcctattggaccaaaaaaatactgatgtggcatgaccaatgatgtgttccaaccaatcagatcttgccatgcaatgcaatcccgagcgtccgaattatttttatctgatgaccatgatttactcattgtatctataagtaaatgactctctccccaaatttgacaactctaaatccaaatttgagctctattttttgtaattctctctccatcttatattttctatgtattttagtaaaattatcattttacccctagttcaatcatcagtggctaatttaatttcaagcttaggttgaaggggaagtctcaacataattcatgagcttaatttggtaagtttattttctttttatctctaatttatgtggttgttttgactcattattgacagacaatgtatcttgtttagattttaaacggtataccgatttccaagtgaaagattgttattgtttggcacaatgagcactttatagtatatttattagaaagagactctcctctagtatttatgggttgtcttgactcaatgttgatagagagtgcatctaagttgtgtagtggatggtcttgccatgttgtcgacaaagggattattatcatctagcacaacttgtactcaacactataattagcgaaaggccattaccctttggcacactgagcgctagaagctatatttaatagaattaggcttatgaagagtgaaaatatttcctcataaattaattggaaataaaaaggaatattaagcctttgatgaagtgttgagtgtgaatccaaaaactcaagtattttatttgaattattttcatccttaatttattctcgtcatttttattttaaatcttagtattactaaaaaatcatctccagcaaattcacatatacacttagaaaagtaaccctacacataattaaatctaccttctcgtgagatcgacacttatcactataaatctatactgcaatggatttgtgcacttgtgagtacaataaaatttgcacaacaataaacatccatgacttgatcatgtattgtaatttttttattttcaggccaccttatcaaga

SEQ ID NO: 9682 - DNA, 3174 bp, Citrus clementina
  Intron number 3 from transcript clementine0.9_012058m (loc us clementine0.9_012058m.g) derived from phytozome v7.0 (c hr-ID scaffold_20; pos 3735221 to 3738394 reverse strand)
tgtttgcttgagatttgctgctgaaaatcttgcaggtttgtttcagtttccttgtgtactttatgtggccctttggagattatcgagaagataaatcctaatgcataccgattacagcttcctagtcatatccgcaccgcagatgtctttaatgtcaagcatcttattccttacagaggtgatcatgatgaagatgttattgctgacaatctgaattcgagggcgaattctcttcaccctggggggaatgatgaagagtaggaatccatattatactaggattagtttccttattaactaaagtttaagacttttaaattcctttctaatttagaattttgtttccctttcaatttaggattttgttttacttcatgaattaggataattactactactataaatagctccctcttgtagcctttgaaagcagagatttttgagtttaataatatttcaattttcaaatctctttgtgagtatttgaacagttaattctcggtattctgcggaatcaacgagtcttaatccctaaattcgcggtattcttttgaatcaacgtgaatttagttgttcttttgttccggtattctctaaaatcaacggaatattttgaacattaaacttccgctgcatcatgaatgctttgaggagtatacagaacaaaaaaacttcagcaccaaccctatgtgctggaaatttgttgatatgaaattcacttttttattttttttcccctaattattcacttgagtggctatgacttagttggtgaaagcttgtattctggataggtgatcttatttggagaattataataagatttgcatatgtggaggttaaaaaatggtgatttctgtgtatgagctcatagcttgatggacacgccatttccttgagttgttaattcttggttgagaattatttctacattgactacactttgtaagaccctacatagatgatttaattgatcatgcttggtcggctgaaattacctttccatacactggattacagattgggttatttgtgaagtaatgctattatgacctacaatcatttgtttattcaatagccagaatctttttagatgatagatacaaaggaatgagctaagctgccaagatttcaaggccaagggtatgtttcagcttactatacagcgcttctttggaccttttggaaagctctaagtttctttattttggattgattggtggctgatgtagtccttttttgagttttgtgtgtttgtggaacaattgagattctgatcagctttaggaaatgtttctgtatcaatttgctgataggaatactgcaacatatgttattgttgaagatttatttatctacacaggaagtctgttaatctggatgctacaaaaagctttgctgtgatattatgttacttcactgcagtttattagttactgagagactaaacttttctaccagacatcttgaggcttggtagtgcatctaagcaattggtactcaaatgcaatttgttatcatgggttggttcagcatgtgtatgaaaagtacacccttcatggttagggagaattatcagaagaaattaataaacttttacgggtagttttggctacaaaattaatgaaaagtgtgaatataccaattttggtttttagatgcctgtttctagagagtttgatacttgcagctaatgaccacactcacctcttagcctgtggttctgtgatttctctaaatgtcagtagattttgttgataatgaaggcaagcctatggatagtgaattgaaaagtttcaaatgtaggctttaggcctttctatttctataggtcttgatcttttacgccagtggacactcacatattgagaggctggatggtcggcgtaagcttctgtagattctcttaattattgtggatatgaaagcaagatttaaaatctgtctagtaaagtgagcagcattaccttacctaaaggaaaaaataaaaagaagttgtcaacattctgcggttttaagaggacagacttgttatgatgacttcaattcaggaggagacagcggtcaaatgtttgggaaatattagaagtatcaaaaaggactaaaatgtcatttttcatcacaagggttaaataagagaaggattatggaaggaattacttaatttcttcagcttctgttcagtttgtgtatccttttggtttaagattttttcttgaattttctttcacctaatgcaagctccttgtgcaagctctctatatgagtatatgtcatatgttgtttctctgctaatgtagaaaatttttgcctgctacaagatttagggggttgatgatgagcattctgcttttatcattttaacaggcacagacttctgaaatcagcttagcaatattttatttgtacattttgtgtacgcggagtgcatgaattgcactgatgttttacagaagtttctctgattgctctttgtgtagtcagcacggttgtcattgccagaaccaaaagagaatattaagcatcatttcaactttttgggctacctttacatatcaagtatgatttcttagtgtttagggcattttatggccttgtttatccaataatatattttttcagtcctgcccaagggagggtgaacaagggggattggatttttcttacgatgggtctgttggtgaaaggagatgagctcttgcagtgatctttgtgtgaggtgtcagcagatgggatatgcatatacatacaggttatgcctgaagtttacaatcagacatcagctgcttttttagtgcaaggttttatgaactggttagagggctgactttgcaaaaccctggtgccgttatcattaacaatttgagtttagatagattcagttattagggggtggtttacgactgaggagatatttgtatctgatttctctttcttttctaattataaatgctttatcatgagggtaggattcttattgtgtttatttatggaagtaattatgaagtaagagtcaagacataatatttattgcatgcgtgccataagatcaagcagttaaaaaccacaaaattgaggtagatttagaaattttttccatgttagataatgtaaatgtgatctttaatgtgcataacgttggtctctaatttgcattcactttctgcagctgtt

SEQ ID NO: 9683 - DNA, 2501 bp, Citrus clementina
  Intron number 3 from transcript clementine0.9_005530m (loc us clementine0.9_005530m.g) derived from phytozome v7.0 (c hr-ID scaffold_10; pos 4832292 to 4834792)
cacaacgttcaggtggcaaatccaagaagtttcaagtaagtatcctgatctttcaaacttttgatttataaaatctctcgccgtgctttggtgacaaatgtgcatatcagccaaattgaaaagaaagatagagaatgaaaaaataaaaaatgtagagaatagtgaaagtgatgcagagcaagaaattgaagaaatcctaattatatttaaatgtataatatttaggaatattttaattaatttgtattctagtttaatttggtttcctatttagagtcttattgtttaggtattgcttatttgggtaatattcctaatttaggcataagtcttattaaaataggttttctaatcatattaggataagtcttacttagtataaataagtgtcttttgtagcttttacaagcagagaattttgagtttaataatatttcaattttcaaatctctttgtgagtatttgaacagttaattctcggtattctgtgggatcaacgagtcttaacccctaagttcgcggtattcttttgaatcaacgtgaatttagttgttcttttatttcggtattctctagaatcaacggaatattttgaacattaaacttccgctgcatcagtttgttatgaagatctttacccataaagcatgcatatggatttgatgaagttgttcacgatgatgtttgttatgaagataatgaggaaaatggtaactttgttcctttcgacaatattattccttccgaggagaatattaattggcaattcatgtctacaacaaatcctcaacacaaagacattgatttggatcaatcgccgaaatttgatgagtatcttgatattgtgggacgagaagaggtaattgttcatccatcttttgatcttgtggaggagagagagatagtcgttgatacaatctcttattgttctcttgatttgccgaaagaagacaaaaagagttgtgatatttttcaacaattagtggattatgaaaagaaattgtttttcttcaactatgttgaagttcgacacgaacaatatgagaagacattattagagaagttgttgatagaagaatttattttacgctattggagtgattggatggacgttattacaaaagttggaaaatttaaagttcgttgtctatgtcgaagctctattttaaaaattaatccttatgcacatgaagatgttcttgaagactacaacatacaaaattcgaggacgaattctctcaagcctggcgggaatgatgcagagcaagaaattgaagaaattctaattatatttaaatgtataatatttagaaatatttcaattaatttgtattctagtttaatttggtttcctatatagagtcttattgtttaggtattgcttatttagagtcttattatactaggattagtttccttattaactaaagtttaagacttttaaattcctttctaatttagaattttgtttccctttcaatttaggattttgttttacttcatgaattaggataattactactactataaatagctccctcttgtagcctttgaaagcagagaattttgagttcaataacatttcaattttcaaatctctttgtgagtatttgaacagttaattctcggtattctgcggaatcaacgagccttaacccctaaattcgcggtattcttttgaatcaacgtgaatttagttgttcttttattccggtattctctagaatcaacggaatattttgaacattaaacttccgctgcatcagaaagtgagtagagagaaaagtccaagtgtggaaaaagagatggatagaagtgagggagatacccattttttgttatctcaataaaaatcataataaaatacatagttttagtcctatttattttagccaacaaagaaccaaaaatacaacttctaaccgaagagagatctgctactaataagtgatgaaaactaaatcaattagccaaaataaataaggagaaataaaaattcaaaattaaacttattcctaactcaacaactggacctgacagattcatgttctgtagtccctgataagttaacaagactatctcttgaatttcatacaagtgatcaagtgcataaactttttacgtataagtggcatctaatttggccattcctttcgatttttatgtaaccaaccatttttttggtttgaacttcagattaaagaacaaatgctctgttttaagatagattataatttcgcacaaggacacccagtaagcttagcattttgctggtcatgtaactttgaaactattttttgtacatatctggatcattttccatctggttaatcttgaaaggattggtacaaattgataacatcaaaactagctaggtcatcgtcattcaatcattttgtttgttgtttattgtttgttcatatttccatcttttccagaatatttatgttcgcaaatcctgaccagggtttcctttatcgagtggttaagtggactactgt

SEQ ID NO: 9684 - DNA, 1223 bp, Citrus clementina
  Intron number 1 from transcript clementine0.9_003849m (loc us clementine0.9_003849m.g) derived from phytozome v7.0 (c hr-ID scaffold_8; pos 1522397 to 1523619 reverse strand)
aggcttcccgtttgaacgataaattgctttcagaggtgaggaatttgaactgctgtgagtttttttggctggatttttttttttgtaatttaaaataatgttgttgtttttgttttttttcgggtgacaattgtgtttgggtgccggaaaaattcaattaaaaggaaatttaaaccccgaaatgccctgcttccaactacttttggcaccaaaatgtttattcttattttatttttttattgtttttaatttttcatttcatcttcttttgcgaaattggttgatgttttgggattttattgttgattttgtttttagaccccaattgggactttttcatgggttcgatctgggatttgacggataattcaatatttcaccaaatattttatattaaatactcaacattttttaacaaatgactaagctttacactttttaaaactttttttttaatttgctgttgagttttggagatcgatctttgttcagggttttagatcactttccttttttcgtaatttgattgcaaactggccaaattatccctaatttttgtctttcaagtctggaataattctatggattctatgcttggatccttctctgtttcggggttttgttgtggtttaggttttatctttttgagaaaatttcatatatttgaaggagttttttttttaatagaatttttggtttttaatggtttttatgcacctctagttagttacccatatgtgcatctgcatataattttcactcaattttgtgtttttgaggtttatcttattgattattgtattgggttttagtgattttggttttagaaggtcagatcatgtggatctgatggtagttgcggaaataggtttctatgtgaaatttggtgtgtgtcgatgaatttgtcttggttgttttcttttaatcaaattaaggccctagaattggtagtaattatcaaattttgaaaccgttttctgtgcaaatggaaggattttgactgatttatgccgttctattttatttaccatttaggagattgaaatttggtctattgtatgatatggtacattgatgcttataatttaatatatagaagcagtttcgggtgtaaatatgttgtcacttctacattttctgtaaggcatgaaaacttttacgctaatatttccctgggtactatttcaggggtttgtgggtttaagatttccgtggtgcaccat

SEQ ID NO: 9685 - DNA, 1366 bp, Citrus clementina
  Intron number 14 from transcript clementine0.9_002197m (lo cus clementine0.9_001929m.g) derived from phytozome v7.0 ( chr-ID scaffold_2; pos 5228540 to 5229905 reverse strand)
gggaggtatatctcatacttctgacaacaatttctaccttccatagttctggttttatattattggatatttcaatgcggatgataccatatatgtatgagagcctgacaatagacctttccttttcaaagatccaatgttctgtaatatttttgtgtgcatttcctataacattccttgtgtgtatcctaggagaattttgtctaaaggatttttttcttttttttcccttcatttgtatttggtctgaatattcttatttgccaaatattgtaggttttgattttctactttgcatctgacaaattgtctgttgttgccagatagtagtaacaacaaaaaataccacataataacagttaggacgctctgccaaattttatttggcatcatatcgttcattcttcaaaggatttgtgattattgtggtagattcatcattcatgatgtctctgtcgctcccttctctcttaataacttttctgatggtgtgtaagagcctagggtttggttttgcggcattttaacttatgatcatgatttgttagcagcaggattataataacgcatgttttatttttcaatgagacttcgagggacaagattatcagttctgacctttttttcaatataatagcacatgttctatttttcattgagactgcaggggcaaaatactatcatgttgaaatcatggtttgaattatttggcacaaaagaaattgcattcaagttgaagcgtgtggtgtgctgtccctaaatttatgcagaatgaaatgtctgaaggaaaataagcgtagattgctaggatgtaacactagataagaatggataaatgggttctctctttgctgtatgttccaaaaagtctgtctggttgaaagtgttttcctctcgccttttgaaatttaatattcttagaattttaatggctccatgttttgtagattttagttttggttctataaatttccttcataatctacgacacaatcatttaagtttgtgaagactcagcaaactcttattgaagcttttctttcctatagaaatttgtctatctggcatgttggcattgcaatttgtacgtatgtgagctatcagtaccaagattttgacggtttgtagtagatttgtagttgctgatatgcatggatattgtctgctgattttgtccaagtgatttagcagatgctggaactatgtatcattcatgtataaactgcgttgctttattggtggaatctctctgctatgtagagggaaacaggatgcttgtgaaattttttggcttgttattttccgtaagtttggctgctttttgaaactagctatttggaatttccttttacaggatatcaaggtt

SEQ ID NO: 9686 - DNA, 3274 bp, Eucalyptus grandis
  Intron number 6 from transcript Egrandis_v1_0.001899m (loc us Egrandis_v1_0.001378m.g) derived from phytozome v7.0 (c hr-ID scaffold_5; pos 28583016 to 28586289 reverse strand)
gacatccgagacaagagaaaagcaactatcaccaagtaagtatcacacctgaaaatcttttccagcctccaccaactagcgttggcgtgttcaattatgtacactggcacttattggtccctttgtgctttactttttctctttcacaggccttctacaggtgccttttaagttttttcctcctgttttttcaataagttttttctttcttttatttgtttgttgcttatcattgcctccagcaccattgtaatcatcatcataggtgtagccatcattgtgatgtttatcttcatcatcttctttgacatggataggttggggtctttcttaccttttcaagtcttagaatttattaagtcaaaagagtcaatgcctgtgttggagaggcattaataaaaggaaccaaatcaatgaagtcttaaagcagcaatacttctttgttttgggcaggcatgatatgatgcaccagaaaattcttacattctagaacgtactactcaacgatcccaatgcggtctgccataatcagtttcttcccatgatgataattggtaattggtcatcacttgatgaccaagttgaaatttcccttgatggataaaactgagaggtgaccttagcaggagtttcctatcatctcttatagggtactccaatattgcaaactcatgttccactatttggctgtctccggttcaaagagttgactctttccatgttccattccactatctcctattatagatatcttagtaggagttaccacaagccttatgtggtacagttgtttcagtttgagaaaagactaaacgatgatcacttttggtgctagtacactgcatatgcggtgatatttggttgttaacatggattacctgatgcttcagaagagaaatgtcatgcttttgttcaaacaaggaggttttacaatttgacctgcacttttctggtcacctctattaaggtattctttcggtgcggcagcttctatgtttgtcctccaagaagagagttcttttgcaaaagcttgacttctcaagtagttgcttctagcaggactatgtgcattacccgaactagttaattgaagcgtacttctaacccactctgccacatagcctctttgggtgttttcttaggcaatcagtttcagcttaaaagagatttatgattaagacaacattgaaattctaatctgctctgcctcatatcctcctttgatgttttctctagcaattagtcagcaagacagatcttatgattaagatgatattgaaatctagaattgtttgattcagattattattgggctgttcacagatttaaaagagaaactaaatgaactgaacatctgaggctttgagctggagcacttaatcaatatggcttgttacatatgtttaaatgctggcagtttgtcgtgtagcttaatagacttgaaatgggatttgatactcctaacagaagacgagtaagaaaatgatggttgtatccaagggctggaaccagtctcaaagtgagttatctatcgttgatatgcatgcatgtggtctttcctaatttatattccgggattcatcttcaaggatgcaaataggcatgtatttaccattcttgatctggtcagtgttctccacagaaccgacatactctcaagttatgtaaactctggtttttgtctggctgtaattcgccctcatctgtttctattatagtggaaccttaagtctaaagcagcattccaatcaactgtgctttgtagattaaattttataccttacactcagtgtcgatggagtgattaggagggaccttacaggaagataaaagattagaaaaagtatgtctcgtttggtaggagggattgagctcgacagatttggagggattatagtccaaaatttccttgcattctttaatcttctcaaatcgatccaaatctcgagggatttggagggatcgtgggagatgcacaatttttttctctcttccatgtatgccctctattgtataaaataaattaaaataccgtcatttgaacatcgttcccttttaacgagtaaaacacacattttattgtttattttcaattttttatttcatgtatttcttcttttaacttgccatgttgtaatcctgtatcatctattatggatgatgcatctctaactacttttgtccaaattgtttaagcattttaagatcagtcactaggcactcctccttttcattttcttaagtaattgttttcttaacttttttagatcgtaagcattagatacttttttgaacttgttttcattatgtgcttttttttagatcatgtgaaagtaatgtgtgctttaattgttcagaatgcatgatttttgttggttcactactttaacattactattataactcacacctcgttgcaagcaaattagaagctttttgtgaagcaattatagataaaaaaaaatatatgaaccattgtaattactaccatagagaactcttgctagaactttctttgtagttaaggtgagaagatttgaaaatattgcatatgggtatagtcaaagcattttaggttgctttgcttgttttatgttataactatgaatgtgtgttttaatttgttggctgtttgggttgaatgaagtgaagtttttctgttactatatctttttttatgagtaaactgttacattatttaatttagtaaagctaaattttatctatttttcctatgatgaaggacaagatagtcataaagatatagttagattcctttccactcctcttctccaaccaaatgtgaaagaactcatttgcttcatttcctttctttttattcataggcatcccaacaataatcaaatcctctcctttcctttctttttttctcgaggttattatccgaatcctttctatcccctcccaataactctgtccaaactgcgcgttaatttgatcaagcctctgcttgaaattgaagattctgtggctggacgaagctctgtttttctgtgtggacagtttgagtaagatatagattggccaattatttgttataccatgtagctttacttttgtagtcctttttataagctgaagatgtaaaagatagcaggatgttcttttcggtatggatgttgttctggccattatataatattattaactgaaacgccaaaattgagtatgcacagaacactctttgcttgtattgatcatggtatattctcttgtaggtgaagtgcttgcggcaattgatcttaagaaagtt

SEQ ID NO: 9687 - DNA, 505 bp, Eucalyptus grandis
  Intron number 9 from transcript Egrandis_v1_0.001847m (loc us Egrandis_v1_0.001847m.g) derived from phytozome v7.0 (c hr-ID scaffold_2; pos 14590213 to 14590717)
catctgaacttgacatatcttgtgaatacaccttggtacttcatctctttgagctttcttcatcttgttcttctaggaaattttgtgcgattagttttaccattctatgtttttttatttttatttttattttatttttttaggattttcttcctcagtgatgttcataagatgcatacatttaatcataaggtcaaaaataagatttcataggcagaataatacgggcatggggagtgaaatttaaatgcataattacagagaaagtacattgagagcacagattcaaaactggtaatttagctgaggattagtttgcaagagtttgctacttttattatttgtatctaggttgtaattggttttattttttgatagttaaactctgatgagtagttccactttaaatttcctgaataactcttatagatattctactctttttaatctctcattttcaaacatttcaggacgaaaggttttgcatcagctccatccagcaggt

SEQ ID NO: 9688 - DNA, 2249 bp, Eucalyptus grandis
  Intron number 1 from transcript Egrandis_v1_0.031687m (loc us Egrandis_v1_0.031687m.g) derived from phytozome v7.0 (c hr-ID scaffold_7; pos 5331124 to 5333372)
atatccgtgagtgatgatgtttacttatggagcatcttacactgccatgaaccactaccatatttgacacctgttcatgccttttctcttctcatattttttaaggtctagaatttttatttcacaaatgatcaatcatttatcttttgatggtacatttcattataacaactattgcatatcggctgatatgtcggcatctatttgtcatttagctgaaaagtgttctttcacgatgatttcctttctgctgtaggagagtagacaattatgggctttgcttgggaattccttttggtctttgtagttctttttcaatgctttataagttatttatgcccaagagggcttcttggtattggttgttttactctagtattgtttgctctattatgtctgcatatccagggaactgtgctttcaagtgaatgaattgttgaaacatctttactggttgatcattataagcaatagtaaataccagcattatcaatggaattagattctgtaaatagcacttaagtgtctggataggatatcactgtatatgtagatcaatttggctttcagatcctggatttaacgaaatttcgatttcttgaattttttttatcatttttctttttaatcatgtgattttttttttttttttaacttcattatggcatgaaaagaagccatgtttatagcccggaataaagtgggataggatatataccttatcttagctaccattaggtggaagtgtttatccttctcaaattttcgaaaggcacagatgatttgatattaggaaagtctattagttgttgatgacattttaaagctttatctgttgcatatcatgcttatctgagtctgtatatatttgtacattcaaatatgattgtgtcgttgtagctgcacttccatgcatttttgttgatcatcattagatacatattttaacgcaacttctgataaatgattctctctttttcttggattctgtaaaatcattttttcaagattgctccacctgttgatcattgtcaacctagagtaatctatatgccgacatatcaattagaggattgatcttgcagcctcaatgccttctgactcatctttggcaataagtgaactggtcgggcacaatgaattaaaatttgatagttgaaacatttgtttcgattggtgaataccatggctaatcctatttttcaaactgaatttgttgattggttattaatcttctcatagtcttttgggtaatggagatcaactttcaatgtaagtttttctatttcattgctccttaacgcttcagtagtttttaggcgggtgcaatgggatgctggcattgttcttctggtaagagctattgctgctgaggtgtcagcttgcagacagccataccttctaatgcatggttttgcagctgacctgttctgttcttcgagataggtgtgttggaagaaagaaccattggttagtttgatctttgagaaaaatatggaatctaaataatgaatcaacactattgtacagtgactaggttgtcctactttttcttactcttttcacttgtagggtttatcttttattccagcatgggtgattctttcttagttttaaaacatcatgctggcttttttctagttcttcatgtaattggtatttgttgcctagatgatattgtctctatttaatttttgaaggtgataaatatcagtacagctgtctaaaattcacattgtgaagagcctctgtagaagtcggatacaatgtctgaatacctcttcatcactctagggattggcattctcccagtgtaaatgctcatgcattttctgattccagagattaatgactgaaaagaatacatctgatataaatatgctgctaacatgagtatatttattgcatggaaaaagcctgtgtagttgagtcatgtgtagtttgttctggtgaacaaactacttagctgctgcttgatcctatatgtgtaaagctgtccttcatgtctcttggaatactctgagatggttctgactatagattcttcaagtaggaggcaaggtgttagctactgaacgcacaatttactccagctattccagagttttctcctgtatttgcatggtggaagtctttcaatacattgaagaggaagtgatatttgatcttccaatgaccaaaactgtcattatcacttctcttccatgtcttttgatgattatccacctaggttctcattttctgtaata

SEQ ID NO: 9689 - DNA, 6587 bp, Eucalyptus grandis
  Intron number 6 from transcript Egrandis_v1_0.004883m (loc us Egrandis_v1_0.004883m.g) derived from phytozome v7.0 (c hr-ID scaffold_6; pos 8207985 to 8214571)
tttactcattgatagttgcgaccatatcgctgcgagtatagatggaacaagtggtcattgatagttgcgaccatatcgctgcgagtatagatggaacaagtggtgatggccgcgctctgctttcagaaagtgtgcaatcattggaattgtccgggtgtcatgaaatgaagagagtgattgtggcacccgagaatttcgcaaaccgtgatgtgcgacggcagtgactgatcaataaaagtatcgccgaatggtatcattagtattttgcatgagcattgtttgattccatcaacagaccgatatcttatgtttattaagggtccaatcgttgaatagactattgacttcgctgaccgtatatatatatattccttttgatgactcgacacagttataccacttgagtgcacatgagataagaaaagaaattgaaacaccatgtaatctcgttcttcttctatacaagaatctgagtcatgaataagtacacttgataaattattgaaccaccaagaccatgggaccgagaatgctccatatttgtgcaagtataaggatcagttttttttaattgggccttgttattgaaggaccgcacgtccactaatctactagcccaaaacaacccgaagaccccttaatagtcgacatttaagtcaactaactggaagagatgttgactgaagcttggctggatgatgccatgttgctggcgtatggatagccagcgaaatgcacggggaggcatgctgaagacacgtccattccagctatctgttccccttgcaaccaccaaaacatgctctcttatgttgactggttttagcaaaaccattgattttgtgctcgtgaaagtgggtaatcaagagagtgagcgaaactaggagtaatcaagagagagtgaatgagaaaggttgcgagtgagcagcaagagagtgagtcggcaagggaaggaaggaaattagtccctgtcgcgcatgtacattgccgccgtcgtcgagctgcacactcctcaccgtctcaccacacgccgtggaaccataggacatcgaggcaagtgaaagtccattaatctatataatgtgatgctgttattgtccaatatggtgcaatatacttggaaacaattgagttctgaaagtagaatgttaaattgtgggtaatcgaagtagagcgggaccatgagattgaggaattactttggttttgtgtacattttgatcctgttgatttattgatgaaagaccgacttttagtagacttgtggaagtaagatagttacggtgggagtgggattttatgggattcgcttaatccagtgcaatttcatgtgtaaccctgtaactttgtgaaattttatgaagagttctaatatgaatttgatcccgatttcttcacggaagttgtgaggaattgcatgagctagaatatatatttttatcagaacttctcggaatcaatacgatggcttaaacctctgttaatatgcaatgctttctgtcgaatttcattctgtgataaaagaaacctgaactgagttgtgggaactactactcattatacataacgaacctggcttagtgtctttaatgaaactttttcctctagatctcaattataaagtgttaaaatttcagaatttttcatggtcatttgccggttatttcgaaatctctactaaaggcgtgcattctggccttttcactattttactatgaaactgttcattttgttctaagattcattgtattttgagttgttattcactttatagatgcagtgacattcagcatatcacatgacattggaaaatttgataaagtcttatagatccatggaatccatgacgtcattgcatcaaaatgtatttttgtaatgagatgtatattatgatgtggatgttaccgtcggaggtgtgagccgacgatgccccgggagtgtcaggatgcccaagggtcgagtgagtcgacgcagttggatgcctggaggtttgtgccgaagggtcttcgggagtttcgggatgctcggttgtagggattgtacgtaaatccggagggaaggggcaaccaatttcatggcgagccctagatatacctcgtgatgccaggtggggtgcgagatgcccaagggtgtgacggaacacgctctggatgcccggaggtttgtgccagagggtcttgcgatgccaagttgggtgtgaaagcccggagggatgcaaacaccggtccccggggaatgaaacctttctttgaatgttaaaatccggtacattaaaggagtgcatgtgtgtgcatgtggcgtgatatgagaatttgtctatgaaattgagttggcttcatccgatactgaaaatgcattcgttatggcattgaattatttttatgaatgtggtgcaggttaataaactcttgatggcatgcatatatatatatataaatgacatgtgtgttttgtatgcatctggatagttagagtttctacataatatggtttaatggatcttttattgctgagtggttgtactcacccctcttggggactaacatttcagactaaaagaaaaatgacgctgctgcctgcgactcttggtatgttttatggactcttgattgacctacagtgggagtggtcagagcaccgtcatcctgggatgcacgtgtcacgccccgaaccccgagcgcacgcacatcccactgcggtcgatcaaaaatgcgacatcccaggatatgtcgccgacccatttattttattacgcatgcggaagcgaaacaaatcccctgacaataaactaggggatagaaaagcaggaagcaaaaccacaacataacacttaaacataattcaacagaattacaaacaggggtttacggctaacagtctacaaaagactggctcttaaaaagaggttatcctacgacctacaagtcgcacacgatctccaatctttatgacttcacatctccaactcctcaaggccaaccaaagctatccggccgctccgtccaccagggacctgaaatggttattcaataaccactgagacaacgtctcagcaagttcaaccccctaaacccctattagaaagaaaatacgccccgggtggcctagccacatcacacagaagacttacctcgcctcagcctttatctgcaggttagcacaatttatataaaccaaccacgtgcaattatgataaccaaacaaccatggcacaatcacattatcaaacaattcaaccacttggatcgtctcagcgatcaatcgactcggccgattacatgtcattctagcaaatcaatcattgctcacaatcacggccctactaggtaaaattagaatcagtggcatcacggtctcactcggcgcgacctttaacaggtggcatatcacggccccatcgggcgcgacctctaataggtggcatataacggccccatcgggcgcgacctttatcaggtggcatataacggccccatcgggcgcgacctctagtaggtggcatataacggccccatcgggcgcgacctttatcaggtggcatataacggccccatcgggcgcgacctttatcaggtggcatataacggccccatcgggcgcgacctttatcaggtggcatataacggccccatcgggcgcgacctctagtaggtggcatataacggccccatcgggcgcgacctttatcaggtggcatatcacggccaatcgcccatcaatttctacacttaggatttcataaagaatccctataaatcacaatcacactcaattcatcacaaccaatcatcaatttcaaattctaaatgcacagcaacgatcggcacgaaattctgagcaaataaggtcccaatgaaaattttcggaatttaataaataattaaatttattccgagaataattaaataataatatccatagttttcgaaatccacactcaatttataatatccaatcatcaatttcaaaatccgaatgtactgtagcgaccggcacgaaattctgagaatttagggtcccgaccaaaattttcggaatttaataaataattaaatttattccgaaaataattaaataatattttaataatttcgaataataatatattatttaattatttaatgatttcgggatatttaaataaatcaaaagtaaattcctttatgtcacatcaatgattatattaatataaacacccacttaactttaaattaaacacaatttaagttaatcaagcacattaatataatctacacttaaataaattaaactaaccacctaataacacttaacataaactaaacacacctaaagcatcattaaccctctaagcgaggtttagtgagttaaactcaccggattagcgagccgagcgaaccaaaatgacggggacgacgcggggatcgactttcctcaaagcgggccgagcatccgggctcgggaaggcggccaaaacggcccacgaaggggctgtcatacccattttctgcagctgctgtccatggcggtttgaggccgagaaagggcagatccggggccggcttaggtcgaaaacgggcggaggagctgcggcggcgttgcacggccaacggcggggcctcacggcagcggggacgagctccggcagctcttggaactcacggacagaggctgacagagacggccgggcatcggccaagcgcgaacgagcgtgggcagcggcggagcgcgagacggcgagtggcggtggcggtcctagctccggcgacttgctggtcgatcttcgctgctgctggcgctctcagatctgctggagacgcgggctgaggcggagcggagaggcgagctggccggcgagcggcgcggggcagacacgcggcggcggcgagcggtccagcggcgcgcgacggcgacgagcaacgctgctggctgctgcttcgcttccctggtcttcggtctccatggaaccgagcagccgaagaaggaagatgaagaagatggaggaatcgcacggaagagagaggaagaagagagggaggagagagaagaaggagagagagagatgggatcatttttcttttcttttttctttttctttaatcccacaaaatggcccaccatgacatcatccatgatgtcatactccactcactcaaaactcccacaaccttattccaatgggtccaaatttcattttccgccggggttcaattcttgtacatccactttcttcaattctcatcaattctcttccaattgaatcaaattgaagtccataaaattaatccaatgtcaccacactttaattcacatcttcacttgtctatagaaccaacttaagtcccaaaagcgcgatccaaggtggacctactaatttctcgagccaaaatagtcattctctgatttaatggctgaaaaactctgatcgcgtgaaaaatcttccaaagatgatttaatgatcttaaaatgatttgtgacacacccagacttccaatttccgaattcgatctcaattccacggttaatttcactttggcacgatactagcgcggcctaacctaccgggtagcctttagaaattttcatgcattcgacctgtggttgatcatctcaagccacaatgtacatctctgaaacattggcgactttcggttgtcgaggtaatctcaaggtttcaaatacgaacacagggtacccaatcgatagaaaattcggtcaagtgccgatcgacacgaattgtgcgatccggtggaatcacccacacctgatcacatgcctctatcgagtcgacctatctccgatctctaatcgattttaattgtgccgtaatgacccttgcagactagctcggtcgaaaggtcgcttcctggtcaaattctcgagtctgatgcattagaaactcttaacagcttcacccgatagactagtttccacatgagtggccaactcaaggaaaagaactatatgcgtgccaacgaaatgcccgtctcaatttattgaaaatagaattggaaaatcgggatgtcacagcacgggttggtattcgagcgcgtgaggattttgctgacttttgaggtaggcctctctgccgggccttcactaggagttcatatcagttctcgtccgtatgaatgaccgttttctgagggtgctaccaccaccaccggccaacggacctgactggatatgacctagagtcgagggtagcaggagatgcatttttgggacgctgacacatgggtgatggacgaatgcagatgatatccaaggatagaagttggttttcttttgggtaattgccaggcacaaaaagatctcggcatttcgttgtatcaactatcatagtccatcccttatataaataaaagtgtttggcctaaattatgaaagttttagtatggtgtgcatcactttatattttgatgaagggtagtcgaattatgcttccgccatattatttgcgcagggaccggtaaagaaaacaaatgaaaacccccaggtattataagtaatgttaaaatttctttggtctcagagtagtatgctccaagagaatgtaactatggcgaccctaacggatcgggggccgtttcgggggtgccacagtg

SEQ ID NO: 9690 - DNA, 7691 bp, Eucalyptus grandis
  Intron number 8 from transcript Egrandis_v1_0.003526m (loc us Egrandis_v1_0.003519m.g) derived from phytozome v7.0 (c hr-ID scaffold_4; pos 7486227 to 7493917 reverse strand)
actacaggtaaaacatctcaagatctcatttttaaggtacaatcagggctgacagttcgtgtctcaatctgctcttaccgtgtttacaaatgctgaccatcaaaagattcaccgaggatgaaaatgtgtttattcatgttgataaacagtatacagattaaggttgttgcaccgtgttgtgtcaccattaagttctttttctaccatccatattgcgcattgtgtctcattcatgtctgatcatgtcgagcattgccttcaaccgacctcgccatgacgaaaattagtattgcctaaccctttaatgtctctcatgttgcagcttttcatttggacaacaggggcaagcccataaccgatgcagcaggcactctcgccactcccttcgcattgggagccggccacctgatgccgcagagagtggccgaccccggccttgtgtacgacgcatcgtactcagactacgctgcatatctttgtagcttcgggatcaaggacccaagcttccagtgcccaaaagagcggatcgtctcgaggaacctaaattatccgactctccaaatcagtagactcaacgggacgatcacagtgaagagaaccgtcacaaatgtaggcggaaaacacaacagttgttatttctcacatgtcaaaccaccgacagggttcttggtgacaatccgaccgagtttgctggtgttcgatcgcatcggccaaaagagaagcttcaccattaccgtcaaagcgagaaatagcatggtgaagaggattcttggagatgactatgcctttggatggtacggatggaacgatggtattcacaacgtgaatagtcccatggcaatatctttggcataggctttgcccaatttctttttttaatgcttgcaattgatctctcattttatctaatggagaaattagaaatgtagagataagaaaaactaggaaagcattccacaattcgagtggtttggagaaaattatctgccttgaataaagaaagattaacttgtcccttttggcatgatatgatataggtttttagaattcgatgcaaataaatatgattgattctgatcacctcgattacattgtatgtatgcacgaacggaaccatatgataaccgggacttaggtcttcttctccttctcctttagatggcattgatggataagccatactattcttgaataagatgtggagaggagactatggccttttttaaagcatattctaacagaccactcattacaaattattgttagattatagtagttcaatatcaagcgtccaatcacattattatcgaatataagacgtgcaaaactcgataaccaggaaaaattacaaaaaaagtcgtaaacctattattattatactgtcctaaaccttctttttttttgacatataggtcctaaacaatttgcatttgtatcaatttaagtcatccaaccaattcaagtcctatgtgattctattagcactgaagtggacaaaattttataatattttaattttttttaattattttttttcttttatttttccttttcctttccttcctttagccggtccttggatcagagactggccaaaggcgagggtgtgcctcacccaagggcccaacctcacccatgaacggtgaggctcaactcttgccaacttagcaggcggcctgggtgaggcgtgccctcgcgttgcggactcgactaagatttttttgtcttttttcttctttttttaatcgaaacggcgtcgtggccgagcgttcggggatacccggcccggcccgacgacccgctccatgacccggctcccagcggaaaccctacccgacccggctccggctcgcgacccgacttccgccacccccagatctcgcgaaaccctacccaaatccgactcgatgacccggaaaatcgcaaaccctagggtttgcgaatctgcggcgccaagggggggggggaactgaggtgtttggcggcgacggcgactacggcggcgatgacgaaggcgacaacggcgatggcgacaacagctaggtcaacggaaaacgactacgatgaacggcaatggtaatgacgatgcttttttttgccttctctcgaacggggacgacgacggcaacaatggcggcaacttagcttcctgatctggcgcggcgtcggtggatcgatcacggcaacagcttcacgggggtggcacgacaacaagccttcgaggcaacgacgtcgggacttggtcgggacgaacggcggcggcacaatgtccggcggcaacaacagcagcaaaaaacttcagatctgaggtgcagatctcggtcggaccttcctcggcctcgattctctctcacttaggccagatccgagcctccaccggccgaatctgaccttctcgaagttgctcgccgccggccttccccgaagtctctcggtggagggcgggctgagcttgcaactcgagttctctcctaggctcgcccttcgatctttcccgatgtctctcagtgaaagatctctgagctcgccacgccctccgacgatgcttgcggccacctatttataggcggaggaaatccggtcaacggaggggctcggttgccggcctccggcttgcccaccggttccgcttggctgaaccggtgtcccatcgagctttccagtgaagcttgctcagcattaatggcgcctgaggtcttatcccctccggccgacgtcggcctactctcctcagccgtaggccgtccttcgcgcgtcggcttccctcgcgcgagtgagttgtagcggcgaaggagagggaaggaagaagaagaagagagaaaggggccgggccgaggggtgaagaagaggagagtgggcctaagggctgtgtgaaaggggagggggctgggccttggctgctgcttctgttttctttttgtttttgttttgcttttgttttttgtttgtttttatttgtttattattccgaaaatagacaagataaataaaataaaaacttaattaataagataaaataaacttaaataaaattgaggcgtcaacaactacggccatttcggaatcactttccgctccctcgtagacgactcctatagttataaatacccagtcatcgtccttctcacatcgttacctactgggaagaaaagaaatttagtgaataaacaatgaagtaccacaactttttatgtcttttgttcgttatttacctccccattctcgccctctgctcagaacgccaggtacgtccgacttgtttcctggccaagattggatttttttccgattccatcgctcgcgattttttatttttttttgggttattctcaatggttgtattgcatgtgtcaggtttacatagtgaatctcggagagcacgatggaggcaaaacaaagcgagaaatagaagaccaccatctctctcacctatcatcaatcaaagccattgatgtcgaagaagcaagatcttctcttctttacagctacaagaacagcttcaatggctacgccgctgttcttactcctgatgaggcctccaggctatcgggtaggtgctccaatgacaaagatttgttttttttttccctctctctcactctgtcgaagttcgagtaattaaacttcctgcgtgatggcaatttgtggtggggcagagctcgatgaagtggtatcggtgattcggagcgacccgaggaagtactctatgcacacgacgaggtcatgggaattcttgggtttggaaggagtgaaaggatcatggaaccctcataagataagaggaggcctcttgcagaaggccaaacatggaaggggagtcattgttggggttctggatagcggtaagtgtctacaaaatgtaaatttgattttgcgtccttatcttgatgggttagattctctccgctactgtttctcacgtgattctaggtcttatcatctatgtagtttcgtgggagattcaattagggttttactgtgctttttcttggagtgctgctcatcgatggacgacatgatttcatgcattggagggtgattgattggttttttcattgcttctattttggggtcatcaggggtgtggccagaatcgaagagctttagcgataaaggaatgaggcccattccaaaatcatggagaggaatctgccaaactggacaagagtttgatgcgtcccattgcaacaggtacttagtcaatgtcattgttttctattattggacttttcacgttgtttgaactcatagctatgtcaggcataacttttatctcgtgacttagccaatgtcctttcgcgtcaattagctaaaacttatttgttttagtttatttctatcacgacaagatgaactttacttagattaagaatagaccaattatcaaatcttggatggaaaattctcttacccatttctcccctctcataattgttatcgatcttgtttgaactgtaaaattgcatgtgctatatatggttgacgtatttgttagatatgttggtttgaatttcaaacgctataattaggatgagattttgaagtggtgagaccaaacatggtaaattctaaagcagtccattaatttggaaaggaataaaaagttaatacatatgctattttatttatttatttttttaacaaaactctcatccatcaccattgatttggatagtccatcgacaattaaaattagaagtacccaattaattgcgatatatactaaacatgaagatgagtagtatacaaactgtaccatacacgaatccattcacaatcaatttttattcctaaaatagtacatgggatattgatattgataagtttagtctagttgactagaactttaaaaaattgtagcccaatttagagaaagttaggtgatattctttatcatttctggcagaattttagccaacccaagatctgatttcaagttttgaaaaaacacaacctaattatctttataaaactatcacgtgaggattttttagagcatggcgtaaaactagaacacttaacgtcgtgctggaatcccagattttattgtttgacctcctatcttctagcccccaaatcttaattatttcttttttttcccgatattctactgtcaatttcttaactttatcgaaaacgccatgcctgtacaaggctttcaccatgccctacaggctacccaccctgtcgtcttgcaaaattcttcgtcggattggtggggatagggcttcggacattatgttggctataacttcggtttgtctagttggaaacatgcaacaaacaatgtgacaaaatggagtaaattatagattttggtcctttgcgattgccatcctgtgacctttccctccatctggcgagtttcctttgcattatgaataataataatggccagtcttttcaaggattttatatgcgatgaagagagagagagagagtttatgttgtgattgatttcatcaatacatctcagtaagaccaatataataaatgatgtggcaaattattgttaggagatggatatagctaacttaattaactgacgacttgcgatgtacaacacatatgataaaacaattttataggtattgaagtgcttacatttttctttttaattttgaaagatacaacccatgtctcaaaagtaataatttaaccgattttataaattggtattgaagtgcttagtatttttttttttttttaattttgaaaagatacaacttatgtctcaaaagtaatagttaaactgtaatgaaattgtaggaagcttatcagagctagattctatgtcaagggctatgagacccactttggtcctcttaacaccacactagactatcgatcaccacacgatagagatggccatgggactcacacggcatccaccgttggaggccggagggtggctaacgtctctgcccttggcggcttcgcccacggcaccgcatctggtggcgcagcgcttgtccacctggccatctacaaagcgtgttgggcgatccctaacgtatccaaagtcgatggtaacaagtgctttgaggaggacatgttggctgccatggacgacgccattggcgacggcatcgacgtaatgagcatctcaattggcaccaggcggcccttgccataccaccaggacaacatagccctaggggcattttatgcggccaaaagcaacattgttgtggtgtgctccgcaggaaacaacgggcctgctccggggaccctatcaaaccctgctccatggatcatcaccgtcggtgccagcaccatcgaccgaacttttgtcgcaccggtagagttaggaaacgggatgtcgatcgaggtgaaaattaaatcacttatatgtttgatagttctgtatatgtagcacaactattaaatactccaatctctcaatctatacactgataatatttccaaatgctgctcaacatatgctaaaaactcatttgcacagggacaaacagtcactccatatcactccaacaagatgtatccactaatttatgctggagatgcagtagccccaaacgtatccaaggaggactcagggtgattaatcgttcatttttagaaaaattctgattgtttttacctaaaatttggattagttgctaattaatcttgctaatatgggtattctttgcagtcaatgccttccaaattccctcaatccaaagaaggtgagggggaagatagtgctgtgcattagtgggaacgggccgagagtcggcaaaggcatggaagtgaggagagctggcggtgccggattcatattgggtaacagcccagccgacggagctgacctgacatgtgacgcccacgttcttccagcgactgccgtgactcattacgacgccactcggatttatgactacatccgatctaccaagagtccgacggcgagaatagtaccagcaagaaccgtcctgtacactaagcccgctcccgccatagctgcattaacgagtcgaggtccgaatgtcatcgaccccgatattctcaaggtatagtttcccagcattgttttccctctttcacgacgaggaagaatactgtgaaaaatcacgatgacattgctaacttattgcattaccaattttttttcttctgctcagcctgacatctcagccccgggagtgaatatattggcagcgtggagtgaggcagattcgccaacgaagttggaaagcgatcctcgaatcgtgaagtacaactttgactcggggacttcgatgtcgtgccctcatgtggccgccacggccgctctcctcaaagccattcatccaaaatggagcagtgcagctatcagatctgcccttatgactacaggtaaaacatctcaagatctcatttttaaggtacaatcagggctgacagttcgtgactcaatctgctcttaccgtgtttacaaatgctgaccatcaaaagattcaccaaggatgaaaatgtgttgattcatgttgataaagagtatacagattaaggttgttgaaccgtgttgtgtcaccattaagttctttttctaacattcatgttggggattgtgtctcattcatgtctgatcatgtcgagcattgccttcaactgacctcgcgatgacgaaaattagtattgcctaaccctttaatgtctctcatattgcagcttttcaattggacaacaggggcaggcccataacc

SEQ ID NO: 9691 - DNA, 792 bp, Eucalyptus grandis
  Intron number 2 from transcript Egrandis_v1_0.032113m (loc us Egrandis_v1_0.032113m.g) derived from phytozome v7.0 (c hr-ID scaffold_7; pos 18737708 to 18738499 reverse strand)
actactattttctctgcttctggatcatcagacaggtaaatatgttgtattgcattctattttagtgtctgttggagtgtctttttgcttcttcttttttccctttaaggcgatcggtcgcataatttgacttttcttcaataggaaagaccttaaatctaaaagaacattttttatatttatattttttggtttaaacacacaaaaccttgaatagaagaggttaaggtctacatgtgttggcagttcttccttttggtagttaagagatcacatttgtgtaatttagcaagttttttatttttaaattgtttgattctatgaattactatctgtcgagcctaaagaaatttactcttcatgagttgctggtcattgtaatcgtgctctgaatctaatcaacatctagactagttgttctacatcacctatcgttggacccatagccgatatagtgtctgttacatgcatcagttgcttatgctttgtagttattcagaggcatcgacaaactagggcaaatacctatgtatcctatatttttggtgaaaataggacttttatattaccgttacttttttaatagattgacatgcatctatttgcacaatccactgaagtaacatcagaacatttcttaatggtttatgaaaagctgtttcatggattctcataattcgactcatgcattcaaggatcactgagtcatcttaagttctgctctaaggtacttaatctgctttggcctcatgctctcactctgtttttaggaatttgtctacctcagccatc

SEQ ID NO: 9692 - DNA, 3491 bp, Eucalyptus grandis
  Intron number 13 from transcript Egrandis_v1_0.010991m (lo cus Egrandis_v1_0.010991m.g) derived from phytozome v7.0 ( chr-ID scaffold_8; pos 72573601 to 72577091)
ttgaggggacaactagtcttcaaccttcacaatcggtatggctatgataatctaaattttactagttgacctataattctgcataattcttttgatttcttcctgtgaactgtctatatggatactaattcatcttagtagttctcctccttgtcttcattgaactcttttaacatctgacttttgcaatattagagctatcaactattgatggttattcagtcttaagtagttatagttaatcattcaatgcttaattcctcctctttttgttatgattgacacaattttttctagtatcactattcttagaactaaataagtttaatagtgtgaggaaaaactaatttgttttattcaataaagtttaatatatatacatcaaaataagccctaaaggtcctaaagaccacttgacccttcatatttctagcactcccctttaagctggaacatagatattaatcatgcctagcttgttacggatatgtcctatcctcccattacccaaaaattttgtttaaaatgttggcaagttgtttgcctatttgaatatgactaggaaggatcactccattctgcaacttctcttaaataaaatgacggtcgacttcaatgtgttttgttctctcatgaaacatgttggaagttatacacaccacagctttattatcgcaccatagagttatgggtattgaatcgttaaagcctaacttagtcaataattgtcgaatctacactaattcacatggcacttgtgccatggctctatattctgacttagcactggagtgagcaacaacactctgtttcttactctttcatgataccgaatttcctccaatcaaggtacaatagctaatggttgatctcctatcatatggagatcttgctcaatcagcatcagagaatccttcaaccctcttatgaccatggtttggttagacaattccttttccttgaagccttcttcaagtacctcgatatgtgaataattgatgtacgaggggaagacaacaactggcttaccacactaactggaaaagcaatgtccggtcgagtaactttgagataattcagcttatctactagtcttctataactctcaagattattaagaatctctcctccctcagtaactagtttaaccccttgttccataggtaaatcgaaggactttgttcccagcacacctgtctcagcacacctgtctcagtgagcaaatccatgacatttttgttgcgacaaaacaatacctatttgtgactgtaccacctcaattcctaggaaatatttcacttttcctaagtccttagtatgaaagtgttgttgaaaataggtcttaagtttagccataccaattaagtcatctcctgtgatgataatatcatcaacatacacaatgaagaatagtttgcttccctatgattgtttataaaagaaagaatgatcatttccacatctggacaacctaaaagaaaatagaaactcagaaaatcttcaaaaccatgcccgtggggattgcttcaaaccatataaagatttttttaatttgcaaatcagtccgccaaacttccctaagcaacaaacctcggaggttgccccatgtaaacttttttatgaagagtactatgcgagaaagcattcttgacattaagttgaaacaaagcccaattatatgtggcagtaagagagatcaaattacgaacaaaagcaagtttggcaacaggagaaaaaatgtctagatagtcaaccccaacacctaagcatatctttcaacaacaaatcttgtttataaatgagcaagagaaccgttgggattgatttttacagcatgtacccattgacaaccaatattagttttgcctataggaagtaatactagatcccaagtttgaataatctcgacagttaattcttattacatttctgtcttccagccagaactttgtaatgccttaactacagacttagggacatgatattgttcaacaaacgttaaaaaagcccaaaaagtaggagacataggagaatgtgaaacaaactttgcaatagaatgttgagtacaaatatgtgtacctttgtgatgagcaataggaagatcaaaatcagatacaagagaagggttagctaatggtggatttggagcaaaagatgacatagtagtgatgagaggagcaaggggagcagtagctactcaaggatgtctagtataaacttggaggggaggtggtttctatgtacatattggtgaaacagttggaatagttgatcgaatgatggtgtacaagtcttcatccaattcagacatagtaattgaaacatatgataaggagtggattaaaaaaaaatgacatatcagctgtcatgaaatatgttctcaaatggagaaacgatatcccttttgagtatgggaataacccataaacataaagctgatagccttgggatcaagttttgatactctaggtcgatgatcatgaataaaatatacaaccaaaattacaaggtggtaggacaaatagtgaatcattgggaaacaaagtagaaaatggaataccaccttgcaaaatagaagaaggcatgcgattaatgagatagcacgcagttaaaacaacatcagaacaaagattttggggaccttcatctcaaataacatggatctagtaactttcaacaaatgtctagtcttctttttagcaacaccattctatcgtggcgtattaggacaggaagattcatagatcatactgtgttgagtcataaaaataaaaaaaggcacggaaaagtactccttagtgttataaaaaaaaattaatatatatacatcaaaataagccctcaaggtcctaaagaacactttacctttaatacttctaacaaacagaatcactctgtactcatatgtggttctgcattattaaagagctgagaataccaaaaattcattgttgtaatataaggattgattagtgctatcatccttttaagaacaaaaacaaaatatcaaggatgtaatagtttgtttttgagattaatgtgatccgtttctcttaggttgtaatggtttgactatgattacaaagtatatcaaacaaagtgctggtcttttctggatccagtgaccttcagatggtcatgggccatccctgttcatcacttattcatacctctcggcagacttgttttggagttagtcttgcactttttgtgactacatgagtctttctccccattgaatggcaaacttgattttggcacttttgggagatactttgctgttcggtcaaagcaatatcattccacatgtatttgagttttaaccagtagcggctgtatccagtgttctccttcatggtaaggaaaagcaagataaagaattcttgtgatttccaaattcgctggatgtatgtgtgcatgtctgttcaactgatatggaactgcgcaagtgacctcatactctgattttgtccactaggcatcatctggaa

SEQ ID NO: 9693 - DNA, 1412 bp, Eucalyptus grandis
  Intron number 13 from transcript Egrandis_v1_0.000065m (lo cus Egrandis_v1_0.000065m.g) derived from phytozome v7.0 ( chr-ID scaffold_2; pos 62754656 to 62756067 reverse strand )
aggtaagaaaattgattgatttctgattcttgctttggtgacgcaattgaagtcgtagatttgcaagcaaatctcccttatggggctagctgactaatcaccaatgtctttccatgtctgtgtatccagtgctagaagcgacacctcagtttcctctgtttaagtagcattctgcacacctttaaattgatatgaacatgcatagagcttgcattcatgttggcctgtcctagttatgtttataatttatgtcaattatgctggctttacagcatgatgaattcgtttaacaagccaattggttgacaggaaatgtttttatacccgtcaatgtaggcgataagcatctcatgctttgtcatattgcaatttgctttcatagtttgtgtttttcatcatgttgtgccgtgatatgtatgatattgacagtaccaattgtgttcatgcaataaaaataaaataaattatgggagctcaagtagacttgtatagttctttatgaaagagatttagagaaaaaaccaccagtcttgaattaatgtgtagaatgtcagtaaaatataatcatgaagctttcaaagaatacaatttgtacttttatgcatgatattcgtttagtatttaattaatgctgaatccgatatttgcattggccaaggatatgcgcagctgcaagaaaaaggattgaatgaacttattcccgaacattttggcgatctagtttgtccgcttgagtcatgtctgcatcatgcatgaaaaataatcatgaacttagttatgaccttatgagtgctaaccttctttgattatagagattcaggcagcaaaattacagcatgaaaaatgtcaacttacttctttttgttcatgtttataaacttcactgagatgaaagtttggcttgtcttagcatatccatggtcaagattatttgttactggatgaagtgtgcgagtcggtgacttgtggttacaagagcaatttttcttcggaagaagagtttattgaggcttcgaacattgttaaatttatttgtcattcttctcacttgaaacttttttattttttatttttttgcaaaatgaagtccagttttttcctttcctcaagcttcgatctcatgaggtaaaagtatgctgaatatatattgccctagctgttcatgcaaacatttgagtgcttaaccgtgtgtatcatgtgtcaaacttggatcttatgagatttggattcatgaattttacttcaggtttcatgatatacaatttgttgttatcttctataaacttgcttttatttattattttttgggtattgtagctaagttttctcaactacataattctggcattccctgatcttagagtacttttatttcagcaactcattaacaaccttgaccgcgaccttcagta

SEQ ID NO: 9694 - DNA, 769 bp, Eucalyptus grandis
  Intron number 6 from transcript Egrandis_v1_0.015147m (loc us Egrandis_v1_0.013970m.g) derived from phytozome v7.0 (c hr-ID scaffold_10; pos 10750552 to 10751320 reverse strand )
ctactacattatcaagtggagtggctcttactcaggcatgcctactattctttactttcaaagttgctgttgatgataattttgccattaatggaaggttgtgactgcagcttgctggagggaattctgctcttgctcttgcaatgacggtgatatcaaatctattggggattctacttgtaagttataatattgtttttgtcagtatactgtcagatcatatctatagattctcagaagaagagagttgggcaagatgttacctgatctttctattacttggcatctttttctctgctttttatgattttttttcttttttttcttcaagagctgcattgatgcaacttcttcatgttattgaaaatacccagaagattttctttggtttttacttgaatgaagatttgtggtgctcctcatgctttatactttgttgcaatcaataagtgtgatttttttttaacaataattttgcagcactagttcctgagagatggctgctcgtcttgaattttgtatgtaatttacttttgtagagcaagcttggtcctgctttttagatatgaaacttacgtattttcacatgcatggccatggatgcatgataattctctgaatacttagaagtatctatttgcttttttttttttttatttaacatgatcgcgtattttcgacttaaattcaacactgttatacctgtacaacaatctgatggcattagtatctttctaggtgccattttctatctccaagttcattgctg

SEQ ID NO: 9695 - DNA, 2363 bp, Eucalyptus grandis
  Intron number 6 from transcript Egrandis_v1_0.017815m (loc us Egrandis_v1_0.017815m.g) derived from phytozome v7.0 (c hr-ID scaffold_1; pos 1089261 to 1091623)
aaggtacatcctgttgtatgatgtttctctggataacttcattcgtaatctgttgatgtggggaattgatttttcgttgtcttgatcagcttttagttaaaactaactggtttcagagcattgggataaagtactctctaggagtccgccatgaggagtctaggttgagattaagtggatggcgtctgggttgagatcaagtggatttaaaagatggtctcttgatgagttacagggggtggaggaactcatcccgaaaagttagcttgccaggagagggaaccccatccattatgataactattagttgcccaatgtgggatcttgcctgcattgtcctccccctctttaggattctgcgacctcagaggacagctctgaggatgcagcgacgggccaccaccaagtgataaagtgccagaaggtgcgtgtccgagaagtggctttgataccatgttgatgtgttcaaagggatggaggaactcatcctgaaaacctagcttgctaggagagggaacctaacccattacaaaccacagaatatctcattagttgcctgatgtgggactttgcccacattatctctccccatttagaacagcttaattgcttataagtttgaacatttgattttgggcagtatgacttttgttaattcaagcgattattgtagtgcttttgtgcttataaagattgaaagcacaatactgaatagattttgtttgtgtagtaatcatgtttcataactaaagaattttctatttgggttctcagataaattaaggataaatgtgaaataataactccccaagaagttttttaagattttgtgggtggacaattggcgaagattttgaaaccttaagctataataatgaatgatcaaaaatgtctaagggggcaattgccccacattgttcaacataagtccattcatacttccaatcttctttaccaagctcataattgatactgaacttagcaccagctaatttgtatttactatagcacccttagaaagttaaaatatgctgtagacttttttttccaggtatatcaatgagtttgcacaaggtggaggcattcaattagtttgaattctctataagcttaccccatgtctaagatttcttactgtgctatgtgtttaatatacttcattgatgccactaaagaggtatgattgcatgcatcaaatgccttggtattttctttttcctgcggaagcatgtgtaagggtgagcatgcaaagagaatgtatatagaaaagtaatcctccactaatcctattaaagtgttattctagatcacttcttaaggggatttatattagtttaggtttattggttggtctctgaacattgtattagagccatgtttctacgtgttgtgcccgatctatataaatgaacaataactgagtagtccaaaagaatcacgtctcatgatgacacatgagattctagataactagaaaagccccattttattgcaaacattggatttgttgcattctctgcagagtgcactccaagcgccacttaagcttatatactactcaccatggaacactaaatttccattattttttcaccttgatgactttcctttttgttgttattaattagaaaaatataaacagcataccttatattaaccatttgcatacctctacttttgaaaataccaaatacatacacgagttttacctttggagacaacgttgcacatggttattatcctgatttacgtaagtgcaattttcttttaaaaaatgcccatcctcactaaattctcacactcactgaaaacactcaaaaaggggctatttggtctttttgatgtggggttttgctaaaggtatatagatagtatttgcaaaaattgaggcatgtaagtagtcattggatcaaaattgaggtctttttttttttggtattttccctgagtagttatatttgacttttcaaattttgtcataaaataaatgaaaagcagatgattgcgcaaatcttgtatgatgcttgtgtttctttgttaattattatccattttaagataaaatagctattcttgtcattctgttcacacgacgccctatttttttttttttccacgtcttgttaaagcttaatttaggtattgttccccattgtgtattcaatgtatgtccttcatatggtttctctcaggtttgcacctagaggagtgctaaagtgctatttgacattgcttgtttatgggatttgaccttgttttctcccttcacctaacaattgaagcatttaaattggattttgttaaaacctcattcaccttatgttgcagggtgcttgcacagtgcacttccaagatctcagtgc

SEQ ID NO: 9696 - DNA, 1817 bp, Eucalyptus grandis
  Intron number 6 from transcript Egrandis_v1_0.004247m (loc us Egrandis_v1_0.004247m.g) derived from phytozome v7.0 (c hr-ID scaffold_9; pos 38855534 to 38857350)
tggtaaaacatctacaagaagagctcagaaattatgtaagttgttctgccagtatttgcttctggacttttactttgtttgacctatccgtaggtactaaggatgatgcttctcacaacagatcatctcgtgctagaagtggctgctgtgtgtttgttgtgtaaaactttgctatagatctaagcgataactagttaacttcaaatttcttgccttgtcatcatgcattcagacatgctgctgtatattttgaaggccattgtcctttagttttatacatatgtttccttggctaccggtgaatctcagtgtttatttacgggaagctagattagaattagctgtcatggtgaatgagctttatcatggtgtgaagccttggaactttattgcaaagcaaaccttgtaccttgatgttaacatgttggccaagttatggcacgattttaaggtccatccttaatgtcaacctgtcaagctgtgcaatttggactttatgagctgggaatatcctacagacaatccagaagaggggaagaatgagtattttgtagtgttaagatggaacagcatgtatcagctagactccaatgttgacacatgtaatgtcggttcggaataagttttggcctgctaaacatgacaaggttcctgataataacacctagggcctagtacagctttagtcctctaaatgccaatgtttgtgcgatttggtcctctaagttttattttgtccagtcaagtccactaactgtctcgatttgtgcaatcaacctttagtcaactgctctcaccgaacgtgcaaattaattaatgacgtggcattactgatgtggcaaaagtaggcacacaatgctataattaagcagaaatctaacttggacaaaaaagcaaaagaaatgctaatttgccgatattagttacatgtaaaccaaggacttgattgcatgaatcaagaaagttaggggaattgattgatcaaattaaggtgtagaggaacaaattgcacaatcaagagagttagatgacttgatttaacaaagtaaaagttagaggatcaaactgtacaaacactaaacttggaggattgaaattttaatttatgctaatgattatttcactattgatgatgtgaatctgttgatattgttgcttagcaactgtgtgttcatattcctagaccttttgatggtcgtcgaaaatgtatagttgcaactactaagaattggccaagaaagctgcgtaatgatcacacatgctgtgtctggggaaaaagtgcaatgaaaggtgctagaggaattgaaattggaataaaaaggagtggaagaaaccgatattgtcttctcatgtttgaataagaagaaaccacaaaataatgaaaatggagagaaatctaactcttgagaaatttagtaaatggaaaaattgtttagaatttactatgttggccttagtcaaatacattaaacctgaaatggtgatgcaaaagaatttacttctatgtttggaggggtgtgataatgagagaaagaaagtggagtgcaagaaagttgggcaggaaaatgcaatttttcattgtttcaaataaataaataaaaaactaatgggggaagaatttcagtcaaaaaaagtcttgtcagcccaccaaaacattctcccgtagatgagggatttcaacatcttttcctgcttattgcccctcagtgaaatatagttccatttccctgaaactcttcttgtcttaggttacctgatttagatgcctctgtctttcaccaggagtctgaagtgcgggaagccagaaaactgaaatc

SEQ ID NO: 9697 - DNA, 5252 bp, Eucalyptus grandis
  Intron number 1 from transcript Egrandis_v1_0.011149m (loc us Egrandis_v1_0.008568m.g) derived from phytozome v7.0 (c hr-ID scaffold_4; pos 37056140 to 37061391)
gcattttggcagatgttagtaaatgcaatcttgatcatcatctcatgtgtacgtgtgtgttttgttttatgaaccttaatgtgtacgctgtacgtcttatttgaatttcagcgccacgatggttgctcctacaactatagcaactcaatacatcgggcaagcatggaggggtgcagttattatttcgtttgtatggttctcgcatcgctggaaaacaaatgtgttctctcgtgcattagcagttgagagtttggcaggacttgatcgggaaaagatacctgcactagaccgactttcgtctatagggctgtttgtaattgggttcatggccttagcagaagcgtgtggggtggctgtgcagtctatcactacagttggtgctataggaggtacttaaactgtccctttatctgttatgccttctgtctgagaattacctgcaatctcaggcattatatagctaccgaatcatacgcaaagtaaaatcttttggagtttcttttggtaagtgtcatgttgttgcagcattcattatttggaaaatttgaaactcctcagttatacaagagctcattcatatgtttattgcactggcacatactctctatgtactgtctcaagattttctgcaggacatatcttgctaccgcccataatgccaacagctatatgatgcctacaactcttgccctgctttatcctatttgtcaactaaatttatgcaggaatagcaactgctattgctgccaaagatatacttggaaatgtgcttagtggcttgtctatgcagttttcaatgcctttctcgcttggagataaaataaaagtatggttcagcatctcaacccggctccttactccatctttgtcattgcaatttgttttctttttccctttcctcctggataggaaatggagttttgttcttcctaaccatttacactaagcggaagcttttcatctcctaatgcatttgttgtgagaagtcatctcattgttgtccataatttggatcttctatcagtacacgatcatgttgttcctagttcctctggaaaactcatgggctgtgaatatactggggaacaagtagcatagagaaacaagccttgacttttaaacttaataaactatctgttttttaggctggatctataaaaggtgaagttgtggaaatggggcttacaacaacatcactgcttaatgcaaagaaacttccagtcattgttccaaactcactgttttctaaacaggtgagtactctcctgaggaggtggactactagcagtttatcttgtgtatgtagttgtctaaattttgtagatcttactgtatcctattagaaggtctctcaacaatctctcagaaaattataacttttactattctttgcagggttgcgtattaccctttattttacacctgcttctgtgctagaatacagtgttacttactgagtttggtagataggtctaacatttcggatattatcatgtgcttggatatgcaaaatacttatatactactattctagcttgagctaaaaaaaaaactgttgtttgatattgattgagttcggtctgacactttaaaatcttcatttgtatgcttgactgcttagtccactacgatatttgatttcactggcaatacctcttgctggtcgccccattcaaaaaatggaataacaacctaaactgcaaagagttagcgaatattcgatgcttcataatcaaaaccgggcgtcttgttggctggatatgcaagtgttttttatgtagtttgttgtgaggtaggagtaactgcaatcttggtcagaaaatctcattatcggtcttcaaagttcgcaggtgattgtaaataagtcacgtgctgagtggcgtgccatggtcaaccaaatccctttgcaaagtgatgatttggagaaggttccgcctatatcaaatgatatcaagaatatgctgaaatcacatcctaaagttttcttggacagggaaggcccctactgcttcctgtcgcgagtggaaagttcttgcatcgaattgactctcggctgcaatctcaaacgcatggtgagcagttcttcctctggtgcacatctcatgataaagcagctttctactatctataagagaacaaccgagtaaaaaaccttcgtctcatcatgcaagtagcaatagcatcatctgcatagaaaagcacattttaaagaagatggatgtttcttgctcagttgttcttttctatatgtttttctttttctttttaattgcgtgttgtaccagaataggtgagacagcaaatacgcaagatttcggtattttatctgtcattatgatataggaagcagtattcttacgccgcatgcttagattcttgtgccatccagtctccaattttttttcctcctttctgaagccatttgacatgttctaccatgctttgttgtcatatactttcttgcacttacgcaatgctctgtggggttttagggtggagatgagttgtacaccacaaagcaagatatccttcttcaggcagtccagataattaagcagcatggtgctagatttggcagcagaatgcaagaaaccaccggtcagtgacagtgaggaagaattgcgagtttccatttggatccaagacaccagttctgtagttgcttgagtcattcatcaatcagctcgaaagagccaataaaacgaatcaataatctgagaccaaaataatatttggaggacccttcggaggactcttccgaccaaacaagaaatatggaattatcggcaaagttgtttcctttttcttttccaaaaatccaaaggattctacttaatttatacattgttcattatataggtcatcaattcagcattgactaagataaaaaggcaagaaagaaaaaaagaaaaaagaagagtgtgctctcttctccaataaaactttcaaataatttcatcaacatgagtggtctctatcaaataaaaaaatttcaaaacggcccgaatgaatatctaatttcttgaagctttgtcttgttgatagttcatgtaactactcaaatttccataaaatttaaacctagaataagtgtatagtttaacttcacttcaatactatgataaataactaatttatcccccatcgtacaaataatttaaatttagttaatatacataaaaaatttctatactaaaactcgtctccactttcactactcactctggttcaatcattacaagtaacttttcaaaaacatcaatcttaaagctcttgaactcctgaaatatggatcgacgaccttgctcgtcgacaagccatcgccgtccgatgagaacctttgaagcccccacctaactcactgccgatgttgaagtaccaagcgataaatcggtgggagcccaccctagcagcctcacaatagcccataaaataaaactacacttaatatagaatatcattaaatcaggtactaacacatcttggtattgtggggggatgattcatcttacaaatctgaaagaataaggggctacttaaagtctagtaaataaaatttcattaggcctaaggtaggaaatcatttcatcgctcaactcaatatccataaacaacaatttaagaaaagtacaaaaacaaaagcaccatctttttctctccctctctctttctttgttctctccaacctcactcaaacacttcacgactctctctttctctctctatatatatagcaactcacccttgaaaaaacaataggtttcgcgtttcaactattagaaattagttttaacatgatagttttaggtttcacattcaaaaagttaaaaattggttttatcatgataagttttagaatcccaccttaaattttcactttctttaggccgaaattttggaagagaggccttaagtgatgtggcccattcagctaagcatctgtggccgacccgacccgaaataccgcctagtcaggctgcggacccgacaacccggatctgcctcttcctcttccccatgctgaccagaaaccgctgaagcaagcaagcaagcaagctcgatttccttcttctcgccgcggtcgcatcgcatgctaaaggatcgaacttgtcattacagctcggaacccgttggattgccgaggaacatgcggaacgacgagccgaagattccgaccatcgtcgaataaaggttccgccttttcttgacctcctccgattttcgtccgtcaacggatgtcatcagcggcaggaaagtttccgcagtatcactttcgttccgttcttgggagtatttctatgatgcctgagctttagctcttcccgcggctcctgcaaatcccgggtgctggaaatttcaggcgatggctaaacttggcttccccagtttgaaatccgtttgcaaattcaccgtcccttgttcgaaatggctgtcgtgttatagttcgaagtatcctactcgagtatcacgtccatctctcgatgccatccactgctccagagagtcaagatctcttgaccatgtgaaagcgtaccagagaatgctggctcctgtatcagtctatggtgctaccggttacctgagaagacccaccaatggattttctccaaaactaacccgcacgtgcggtggaagtactttctcctcctttttggcaagccccatgttgaattctcggtcatttgcatcgtatttcggcggcaaacgagatgcacccgaggaatcggaagtatcggctgtttctggggtaggcaatgtgggtaatggggacagtgcggttgtatcgagtgagtggcttgataagatgaaggaagcttggcacggcgctgttgatgtggctggtcacacacgggagaaggttaaggatgtatctgatgaatggactccttatgtgcagcaggtgctcgattcgcacccttatgttgagaatgttgttatgccaattggtcttactttgaccggtactctattggcatggtttgtgatgcctagaatattgaggagatttcacaagtacgcaacgcaaggtcaggctgctttgctctcgggaacccctttgggagaagaagttccttatgacaaaagcttctggggggccctagaggatcctgtcagatatctcatcaccttcatggcattttggcagatgttagtaaaaacaagattgatgattgtctcatgtgtacttatgtgtgtttttgttatacgaaccttaatgcgtaccatgtatgtcttatttgaattgcagtgcc

SEQ ID NO: 9698 - DNA, 8336 bp, Eucalyptus grandis
  Intron number 1 from transcript Egrandis_v1_0.029438m (loc us Egrandis_v1_0.029438m.g) derived from phytozome v7.0 (c hr-ID scaffold_9; pos 24649701 to 24658036)
ccgtcgatcacaccactctcttcgactacatcctggtccgtacttgtatctccctttgtcaatttcgatggttttctttgtggtggagtgctgtttcgtatttgcaacgatgttcgtattgctgcacttttggcttctgaggagtgatcggtgctcgatcttggaattctttgtttttctctctttctaagagtgcaagtgctgctcaattgcgcgcataacacgccattaggcagctcgattcccgtctctgcaagcatcccgaatctgcatttgctgaggtcacgaactcatggctcagctgatgaattttcgtctcaagagcattgcattctccggctcttgccgcccccctcgaacggctccgctaaacaatgagagcccgattcgactattataatgttcctgaaacccaaacaccagagatggttaagtccaaaccgaagagttacaatcctgcctgcttgatgatggggaaacagacataagaaacgaaaagccccatcgttttatcccttttaaaaagcacgccttctgctcctgcaaaacctggagtcgggtgaactagttctcttgaaattataccttccttttaatttaaagttcttgatttacttgataacattaaattgccttgaagccctcttcggaactttaggactcaagaagcccaaatgaacaaacaggacatctagattcggctttagattagtcaggttaatactcactttggccttgtcaattccgaccggtttccttttcctcaattatgataggtaggtctggcgttgctacttacaaattcggttaggtcgggctaacattactaaaatcttgctttgatcatctgcacaatccatgagctctgtcttgagggcagtgctaggcctcgaatagtcagttattctagttcagcatcggccttttttcgaaatggatctcaatctgttcggcaggtgaatcaagggaagtagtttgatcttcaatgggatctatattggttattgtttgctcttataatgtacaaagtatttatacccagataactcaacatgaatggccaacataaggtccaagatgtgcttatttccaatcaacctgcaccttcagaagagctttttaatgtgatttatgactcgaaggttaaagcttgctttttaatgtttgtgctcatcagtttttccttgcatccattcaggcggcaaatttcctggaaattccaactttgctggacttgggctgccagactgtggcagacatgatcaagggtaagactccggatgagataaaaaaaactttcgagatcacgaccgcatgcacaccggaagaggaagaagaggcgcgtagggagaaccagtgggtatttgaatgaagccccatagaattcagggtcttgtgttatatgagacattggctcgttaaaagtttgcttctggcaaagtgaactcttcggtgagtttttctgacatgatatggttgaatgttcaagtgaaaatttcacgtattcaatacttagggagggtttgatcttccagcatattcttgtacacgaggaccctgtaaagtagaagttttgagatacatgtatgagttgttttaaaaagaaaaatcccacgtcaaataattagtgtggcgtggactaatttatatattttagttgactcataatttattgacttaaactttctgagtaaagataggtccaattagatatattgacgggtttggatttggtgatcaagtctagatcctgatggcaattcccaacacgatgggatggagatttaagttgagaagaaagatacctaaattaaggggagtatacttaatactaggctcggacttgggtgagaaaattggtcaaaaaatcttaaacatattgcatttttgccaattctttctaaaccttttaattttaccgatttaagtcttaaaattttttatgtttcactaattgaattcatccgatcaattttatctggaaatcgctaacgtaaaattcatgtagtgtgggataagttaatatatccttgtttgggctgggatatgggtgggaaaattgtttaaaaagtcttaaacctaaattcaattttatattttacaattttactaattgagtcctaaactttttcacgttttaccaattgagttcatttaactaattttgtccaaaaattgctaacatgaacaccggtcatccaacatgacacgatcggcgatcacattgacttaggggtagcactaagcctcgaatctatcgtctttgttcgttatggaactcattccatttggtggatgaatcaagtcaagtagtttgttcttcaatgggatctattgtcttttctttgctttgatcatgtataagtatttatacccatataactcaacatgaatgaccaacataaggtccaagatgtgctttaagtccgatcgacctgaaccttcgaagagcttttatatgtgatttataagttgaatgcaaaagcttgtgtttttatgtttttgctcatcagttttcctcgcatccattcaggcagcaaatttcttggaaattccaaccttgctagacttggcctctacggtagtggcagacatgatgaagggtaaaacgccagttgagatatgcaaaattttcaatatcaacgatacattctcacctgaagaggaagaagaggtgtgtagggcgaaccagcgggcatttgaatgaagcctcggtgaattcctaggtcctataatatgtctgtatcactggttcaatgaaacaacctctcacctttaactctaggtaaacgctccttatatgaggatacttgtaagaattagggttagagaagagatttgagtactatttatggagtttttaactagatcctctcattacgggtcaggctcaattcggcccacactagccagtcccatatttatactaattaataaaccttctatttcaccttagtccaaattctgtaaaacagtaaattacaatgtcaattaatgtagtccacattagaaaaactcttacattctcccacttgggctgtattaattgaaattgtattgtatgtgcattagaaaaactcttacattctcccacttgggctgtattaattgaaattgtattgtatgtgcgcacattggtctatagataatttcacagagccttccacggtcacgagtgcttttaacttgcatatatacacacagagcattccacggtcacgagtgcttttaactttattgatattgattcaatatggtagtatgacatatggataacatctatcatagagatcccatttgtcaatcaccattctcttaccttaagtggcaaaaaacttgtgccactagataatgtgtttatggttctaatgaactcatatatgtcttgtccttatggttaacatttctttatgtataacaagacatatgtataaggctaataattagatacccctaacattcaccagaggtttaagcaatatattgagacttttaataatatatatatatatattcaacataataacaattcattcaaaaatattttattgaatgcaaaagttgacacatatatattaaagtgttactaaattgtaacagaaactttattcaagaaaaaaaaaaacacaacttccactaaataacagcattccgagatgttcctaggctcatgctaatgacatgtcgctcaaatacacacgggcgtaggcctttagttagtggatctgcaaccatatcatctgtaggaatatgatctactgcaacgtcaccattctgcattgattcctttatagtaaaaaacttgacctctatatgtttagacccctcaagacttctgttgttattaataaacaacactgtagaagtattgtcacaatatagctatatggacctatctacaaaatcaaaaactgataatttcctaatgaggttccatagccaaatagcttaactagcagctgaaaaacatgttacaaactccgcttacatggtagaagaagatatggatttttatttctcgctcttccatgatactgcacctcctcccaacataaatatgtatcctgtcgttgacttcttatcaccttaacaaccagcaaaatctgcatctgaataccttgctaattggaagtctgggacatatctataaatcagcatataatctcttgttttgtttattttgttgccttaatatgggttggacattggctcgatgaatgtttacttctcacgcggtgaaaacttatgtgagtttttctgatatgatacggaatgaatagtcaagcaataattttacggatttaatacttaatgagggtttgatatcctagtgtgtgcttgcatcttggtgaggactccaggaaacaggatgaatatgagctactttgctaaaggaaagccatgaatattgctgctagttggtgctgttgttgccttacgcaaaggatgagatgtcctgtgccttgaacaagacttgaaatctagaatccctgggaaaacgagccatgtcatgacaagcgtatggaattgagttttgaaacctaccaattgtagagtgagaagtcaaagagacttaaaattcgatgaaagtatcgcacaatcgattgtgaccaaatgcctgatgcagtgccttttccttgggcatatgaaagagtaccggacacttggagtgctaaaacttaacacgaaaagataattaagtgttaaaagttaggaaagtaatacttaagtgctaaaattagagtaaatagataacttaagtgttaattcgaccaaaatgccgatatggcaattttccggcgaaataaatgtaaaatggcaacgttttgcaagctgatgtgggtagtcaatgtaaaaacgacagttgtttttgtggtgacatggtaaagaaataatataaaaactaattaaattaaattttaaaataaatttatttaaaacattcgaaaataacaatacaaatattaaaaaattaatttaaaaaaaggaggcaggcggcgagggctcagctcttagctgcccccttccctttttttttttaagttttagtttttcttaaaatattttaacatttttatttttaattgttttaaataaatttatttttaatttaatttaattaattttatattaatttttttaccacattagcaccaaaacgacgtcatttttgtattgtctagtcatgtcagcgtgcaaaacgtcgccgtttcgcacttacttagctggagaatcaccatgtcaacattttggttggattgacacttaagtaattcattttgttccgattttggcaattaagtgtcattttcctaacttttggcacttgagtctcttcgtgccgagttttggcacttagggtgtacttctgccgcatatgaaagataaaaaacctttgatgtgcattccatgctcgtaaaataagcttgtcaaatatattttttcaataaacgtgaaatgtaaggccatcggaggttgatgagagtttttgtgatgaataaaaggaaagactatcaaatatatttttcgatgtcgtgtggcatagcttacaagagaaataaatgctgatgatcgtataaattctctatcttcagttcaatcaaaggttgtacctaaatcattcgtgtttggtattacgatttgaagactagtgatggcaagtaatgaaatttctactaactaaaccttaaaaggttattcatgtgtttctcgagaggtgaaaaatccagtcaattggatgctaaaaagttctaaagaagctaaaactagaaaaatgaacctacatataaatcatatatagaccacataaagtattgaaattctcatatttccattaaaatcaagatcgttctcatcatatatttctctaaaagttttgttccttcaaaatataattgaattgcacaactgccccattaagaattagatacatgtctaagtggtccatgatctacatattattctcgcaatttttaatatgatcccattgagtttaagcttaaaaatgaaaagaaaaaagaaagaaggtaggataaattagatggctgatgggattgactttattttttttttcgcttaattaaaaattcctgattcatgcatttgaaatttttctaaatttgaaacgctttgaaacttctacaaaatacaaagggctaatacccggaaaaatcccaaactgatacacgtgtgataaatttattataaactaattttttgaccatgaaaatcctaaactggtacacctatgataaatttacccaactgattataaaaaatcataaactaatatgtttgtgacaaatttaccttaaactaatttattcgactaccaaaaacgctaaattgattcatttatgataaatatatcatctattaaattagattaatataaaaaaattacaaaaattatataactatgataaacaaagagtgaaatctcaaatcggtatactagtcaactgtcacgtgtcatttaacttaataatttgacaataaaatttaataaaaattaattgatggtaaatttatcacaaatataccggttttgggtaaatttgttaaatgtgtattggtttagagtttttgatagtaaaaaaattagtttgagataaatttatcatatataccggtttaggtttttcatagcattaatccaaatacaaatatcgatagtaatttgttttgtaattttataaaatatttaatatcttaacggaagggcagaataatacaaacagccccggttaatctctctccgaattggttcttctccacgtctctctctctctctctctctcaacgacgaagcaagccatccatgtcgtctcctccctccgcctccgcctcctcctcgccgccgccgtgcccgaagaagatgatcaccctgagaagctccgacggggcgaccttcgagatcgaggagaccgccgccttgcagtccaagaccctcgagaacatgatccacgagaactgcgccagcaccccgatcccggtgccgaacatcaccggcgaagtcctggccagagtcgtggagttctgcagcaagcacgccgaggccggcgtcgacgacgagagcctcggcgcttgggacgaggagttcgtcgccgtcgatcacactactctctttgactacatccgggtccgtaattgtatctccctttgtcaatttcgatgggtttctttgcggtggagtgctgttggcaacgatgttcgttttgctgcatttttggtttctgaggggtgatcgctgctcgatcttggaatcctttgtttttctctctttctacgagtgcaagtgctgctcaattgcgcccataacacgccattaggcagctcgattccctcctctgtatgcaccccgaatctgcatttgctgaggtcacgaactcatggctcggctgatgaattttcgtctcacgagcattgcattctccgactcttgtcgcccccctcgaacagctccgccaaacagtgagagcctgattcgactatgataatgttcctgaaacccgaacacgagagatggtttagtccaaaccgaagagctacaatcctgcctgcttgatgatggaggaaacagacataaaaacgaaaagccccatcgttttatcccttttaagaagcacgccttctgctcctgcaaaacctggagtcgggtgaactagttctcttgaaattataccttccttttaattttaagttcttgatttacttgagaacattaaattgccttgaagccctcttcggaagtttaggattcaagaagcccatatgaacaaacaggatattggatctagattcggcttttgattagtcaggttagtactcactttggccttgtcaatgccgacaggtttccttttcctcaatctgttaggtaggtccggcgttgctactcacaaattcggttaggtcgggctaacattactaaaatcctgctttgatcatctgcacaatccatgagctttgccttgagggcagtgctagtccttgaatagtcagttattctagttcagcatcggccttttttcgaaatggatctcattctgttcggcaggtgaatcaagggaagtagtttgatcttcaatgggatctatattggttatcgtttgctcttataatgtacaaagtatttatacccagataactcaacatgaatggccaacataaggtccaagatgtgcttatttccaatcaacctgcgccttcagaagagctttttaatgcaatttatgactcgaaggttaaagcttgcttttttatgtttgtgctcatcagtttttccttgcatccattcaggcggcaaatttcctggaaattccaactttgctgga

SEQ ID NO: 9699 - DNA, 2027 bp, Eucalyptus grandis
  Intron number 4 from transcript Egrandis_v1_0.014980m (loc us Egrandis_v1_0.014980m.g) derived from phytozome v7.0 (c hr-ID scaffold_11; pos 22629915 to 22631941)
cggaagctaccattgtccttggagctgttggaaaggtaacattgaagattgtagtatatgcttcatcattagttgtcgcttgcatcaacttcatcaggaggcatttatattatttttaaggttttttaatcagcccctaaagcacttattgagcaacaaaacaaagatatgtatattttcctatgcactacttttctttttttatgtgtagtaaaacattttgggaatcaaaacattcttctagagtatgctgaataagtgccccttattgaattaaaggtgctcacttttgaatgatgatggaatagaatcattcaattctctaacaagtcctagaattgcttagattagtgggcataagtctctgtaaatatcagaaatttcataatagaaaattatagtatttagttacaatattgagtcactatactttttggtgattacaccatctatttgttgagaatattgtgcattgtccaatagccatcagaatcaatgcatttgacttcacaaataatgttacttattgtcacaatatttttcttcccctttccataattatatgctcccaatccctcccccttgttctttttctcccttataatatgaagtgctcattcttattgtctttcaatggaatgttatatgtcaatatagactctagatatgataagtgatgaagttaatatcgcacctccttcatttagttgaagaataacagagagaggaagatgaagattaaaaatggagaatatgtccgttaataattaatttggatatagtaatattacgtaatgttcaactatgttaatgtatccataattagcgttgtgccttggtctgattctagtctatttgacaatcaaatcctgctttggctcaaatatgaattatattgcaaggctttaggattttatagatgttttatgaatcacacctttgcccttgattgaaatattgaacaaattagtcaactctgttaatcgtccatgaatcgtgaatcaaattgaatcatacatgaatagtaactgaaacagacactacttcacttttgctgcatgcagatcgctttgtatgattccgaccatgaacaggacgatttaactacattgtctgaaggcactcgttagcaaaaacttgttcttaataatttattttagctcaacactatttattttccactgggagtgggggttcttttccattgttgcgattgtgtaagttatggtgtgtagctccctcttcaggtgaaaataattagcccatttgtggaagcagttttcagttagtccaaaatgaatatgtgacatgcagtgaattgttccaaccattcagagtcatttgataatgttacaaatagtgaattgtagatgtctacattattacaagaggctttttgtaaattctgctctattaattcgttttcagaaaggtttgtcctggtttaagaatctgccataataagaaatcaaagaagttctgagtcggacaggtccatcatattttctctcgcaaatcattggaatgttgattagtccattgcgaaaaaagtctctggattgctgtcttacgagaaaagtcttctgccggctgttttgtttccttgcattagttgttgaataactatgttttccttgtaggacagacatcataaactttggtgaatttaatattatatattatcaggaagttgaagttggttttaaaatatcgatgtgctgctttaagggtatttgggtctttcttataattagagatttggtacgccgatcatgcagaacaatggatgggtgctttgtaaaaagctacttcagattgttgcatgtgcttatcaacaatttcatcatctctgattcaaaagaaagaaagaaaaaaaagacaatttcaacattgcttatgggtgcttgaggcaaactctagtatgatagttggcaaatttctctttcacgtttagcgagaatggtttcttacttgtcaatatcatatcttttgacaggctgtaaggatagaacactgtgagagggttc

SEQ ID NO: 9700 - DNA, 2853 bp, Eucalyptus grandis
  Intron number 1 from transcript Egrandis_v1_0.029189m (loc us Egrandis_v1_0.029189m.g) derived from phytozome v7.0 (c hr-ID scaffold_5; pos 52118996 to 52121848 reverse strand)
agaaaaacagaaaaagaaaaagaaaatctgattaggtgatttttcttttcttttattttacctttttattattattctgttttagtggaattgttccttgatatattattgatatcccaatatgaaatagtctatcaagcactatcaagctagggattgacagtccgattttcgcgcccgaaatccgactcgcaatcccttataaaaatcgacaatccaatctcaagcccgagatttgattcgcgatttaaaattaaaattggtctacccgatctcatgcgcgagatatggttcgccaatttttggatatcaatattatcttttatgtgatttgctattgtcaagttggttgagtcaaatcttattttcgtaaaaataaaaaaatcaaaaaaatcttaatttggattaggtttgttgtcatcctgcatatctaggattgcaatcttattatgaatttttaaataaaaaaatccaaaaaaagaaagtgcaatcatttaggctgttagtttgttatttgaattgcatgttaattatgtgttagttttaatttcgagattaattaaaaaaaacataaaaaaatcattgtgcatattagattagaattgcatgcttcattttaaatttagatcatctttttttaagataaatggcattttagatttagataatgtcttagtttaaattaggatttaatatgacttaatccctagtttaaattagatagaatcttaatttagctagatcatttgaaatttcataaaatttgtcttaggataaattagttgcaatttctaggatagattgcattttttttttaataaaaaatgtcacatgcatatgtcatgtagaattagggcattctttgcacgtcattgcatgctaagattgcatattataggtttagataatttctcctaaatagattgcatgcttattaggaaaataaaaatcatgtgcacgtcatatagaatttgtttcatacaatgcacgccatttagtgatttttgttaggtgcatttaattagaaattgcccatcattagaattaagtcattagattaatttagattgcatatttaaatgttgcatttctttaatttcgaatctcatggaaaataaaaaattatttagaataaatcatatcatgcttaggatagattacatgcttagttatgtcatattgcttaggtcatatagctaagtcatgttgccatgtcatatcatttcatgttaaattagtggcatgcattgcatattgcatgattttcattaattaagtgaaaacaaaacaaaaattgcgtgttaattagaaatcatatttaggactgctgatgtgaattctaaactaacaacacagatgctttcgttgatataaggtaagtcctgcaatttattcatttgctttcttgagtgttaaattggtggtatgcgcacatgtatgatcacctcacatgttaggaagtttatttaaaattaattcaattgccaaacatttttgaaaataaaaagaatggtaccgaaagggcattagagaaatctagtgtaaccaagcccccgtacccataatctctggttcgtagaagtaaaataattctccaattattttacttaggtgtctaatcgacctaccaaaaatagattagtggcgactccgaattaaaaaatttgcatgttaagaacttgaaccgaaagtcgcgaattggtatgggcttgggagagcccgagttaagtttagacttaacaatccattaaccaaaccctaggtggttcacaccccgaaaaaattggtcgcgacagtcgtcatatagcttctcgtacaaggtcaaacgtgggcatcatgtgggagaagtcaatattttgtcgtttcgatatggcatcgactgcactgtcggtggacggtcgtatctttgccgttaagttttgttttttgttttttgttttttttggatcgaaatcttatcatcaagttagttatggtaatttgttgctttttctttaaacttttttttttccttcttttaaaacattctttaaacgttttgctatttcttgttgtcaattttatttttcttcttttataaacaaggaatataaataaataaaaaaacctgattttgcatcagcagtcacagagaaactaattttgcatattttaaaccagggtttgctagtatcttggtactccttctaaatgcgcgaagcttttcggttggcaactattctttcttttgtgaatattctaaaatatgctcattagtgccatccaccaaaagatatttccatttatggtggataaagatttggtggggtttggggtttttcccaaaatggaaacaaaataaaaaagcattatgcgttatttattgtcaaattctaagaaagaaaattgacttctcattacttctaattatgggctttacatctttgaggtagtgatttttgtttgatctctgcatttaaagttccttgcatggactttgatacaattatagcttaggttatttctctactctagttatatgatgtgctttgccaaccactgcatgaccgtcaaccgccaatcgccgcacgattgtccatcgctaactgccgcatgactatcgcacgattgttgcacgatcatcgcacgaccaccgcaccaccaccgcacgaccgccgcacaattgcaaactgtcggcaccgaccaccgcccacagcccaccggcagctacagttggcatcgacagtggatttccatttgttgaatttgtaatctttggttccaccctttggtatctttgagtaatcagacttctttgggcatcaaatatcaatttctgattttcttatggatgcttaggtgtcagcagaaact

SEQ ID NO: 9701 - DNA, 4949 bp, Eucalyptus grandis
  Intron number 1 from transcript Egrandis_v1_0.006324m (loc us Egrandis_v1_0.006324m.g) derived from phytozome v7.0 (c hr-ID scaffold_5; pos 58023064 to 58028012)
ccgcccgaggcacgggagaggattgtcaacaagatgtgagtgctctttcctttgcttgggttttatcgttttcgtagggaaaatgtggagtttatgatggatggttgcttagggacgattgccgagggtttagtatgttaaataagtaatggttttacaatatggtcatgttgctaggtcgaggcgcaacatgaattctgaggtagcttttgctgtaatttttttctcgttggatagtttagttaagtctcaatatgggatttagtgggtatgcaggccggtagctcttgttacattggtgattatataagataagaagatggttgtatttctttcttgattgaaatagattatctcctagttttgtacacaaccaggagggtttaccatagtatttagattatcatagtcgcagaggtaaggccatgtgcctttctggcaggagaacggttactggatgatcgcctattatgtttgtgacagaaatctacttatccagagcctaaggatttttaagcatcttattgcttgttagttgtgttattctctattaatcttgaatttgtttttcccctttccaattcaatagcatcgctatagtcattgtaggggttgaaggtccaaaagttttccacagaaaacttaatcctcacctaccttgaggtgcaatgcttgaactcccacccatactgcttgtaataggaggagatgctgtcaatgcatgtgggttaggtatcgccaaaattttataggtttgtgaattcttgtatgtgtttttgaatcatttctcagtttgctttctcatctgggagaaagctaatcgtaatttgttgaacaatatgcaacttgcacgggattcttttatctactatccattggattttatgactatgttaggattacgtaatttcagctctgttatacactggattttgtgaccatctcccgcaaaccatctcttctgaacttttatccttttcttacccactctcaactcctgactctcttccagcccttgacctctctgttttccagctctggcgagctccctaacctccattgaccaccctgaactctggcgagccattgatgagggcccccattggctatgtaggctcttttcctcttcttttctattgttgtttgctttctccaagatgttgaagacttttcctctcatcttctttgccatgtgcgattgttgaggctggttttgtcgtgagagacctacaaggtaaaagggctttttgtggaacgaaaatcttttgagcttgtgttagaggtcaaaaaggaggaattgttaagagtgacaagagtatgccagatggaggagacctctatattgaggactttaaaatggtggatggattaccatgcagttgtagaacctggtaaaacaggtgtatggggaattagatgttgtagttggaagaagtaccagccttccaaacatgtggtggcattgtagtgatgtagaatgagaaatcgggcaacttaggagattgtttagtgggccaatttagtgtcccgtgcctgttttgtggtgcagaagtggggaagagtgggtgtttactggggtgtatggtcctggagtgggtagtgctaggagttcttttggggattaattctctgatattaaaagtaaatggggagtgcagggagagttcaacgtggtattgtttccacatgaacaggatgggattggtacagacagagcctgcatgagggaattttggcagatcttagacaccttttgcctgattggcttgttgttggtaggttgggagtatacttggtccagggactgggagaggctatcctttttacgctttgatgggttctcagtttcaacaacatgggagggtatcacccaaactcgagtcaaaagttacctcaagtgacctcagaccaccatataattgtgttagaggatagagttattgaatgggcccccactcctttccagtttgagagtatttttctcaaactagaagatttcaagtaggtagttatcaattactggaagaatagttctttcagggtgtaggccagcttcacttttgcttcaaagcccaaggggctaagatatattctgaaacatgaagtcatgagaaggttggaaatatgggaaacaatatgaaagagacaattgaagaagttgaagagcttaaggataaggagatccagatgactttaatagaggaagagcattttaggagaatggaatttaaagagctcttgcgctgttgattcaaatggaagagacctcctggagacatgtcttgggagatttggcttgatgatgatgagagaaacacaaagtcctttgaaagatggccaatgctcattgaagatataacttcctcagtaagttggaagtttttgggatggctgttgaacatttaaacgccatgagtgcgtggttatctagaattctatgctgattcatgcagggagagatgttttgagtgaccggaaatggaggcttctcttgatcccactatggttgagatgctgcaaatgcctttccagggggaagagattagaagggcaatcgtggagtgtaatggagataaggcactaggtcctgataaatttacgtttaaatttttggcgagaattggagattgttagcaatgaccttctaaaggagttacagagtagggggcaagtttgtagataatctttattatacattcttaattctcattcctaaggagcctggtgcaacgaatgttacagattttcagcctataagcttggtcggtagcatctataagatttttgccatagttcttgctggtcatttgaaaaggttctagctcacctagtaggatcttttaaagacagttttgtggaagctcgtcaaacattggatgctattcttactgccaatggtctcaaggaaagaaaagtaggagtgcttttcaaattggacctggaggaggcctatgatcagggatcatgggagtaatgtatgtgtaaagaaaaatgtatttcttcttttgtcatttttgttggtggagatggatttcaaaatgcatttcttcactgattttcttggttatggtgaatggcagtccaagaggtctcttaagtattctagagatttaaggcagtcctctgtcacttttgttgtttgtgttggttttgaaagtgttgagcaagatgctaattaaagctactgacgaaggttagattggtggtttcacgattgacaatgcttgtaatgaagattccatatttattttttcatttgcggatgacgtcatatatttcttggaggatgacatcaaacaaattttacacttagaagcatactgttatgttttgaggctgtctcaggactgaaggtgaatttgggaaaagaatgaaataattcctgtgggcgagaatgtaaatttgcaagaaatgtctgggagtagtgattataagtttgccagcatacctatagagtactagggttgcagttgggatgcacttacaaagcaaaagctgcgtgtaatctgatgatacaaagatttgagaagagtttaagtaggtggaagatggcttatttgtccatgggatgtagacttatgtagatgaagcatgcactttttaatcttctggtttactttatttctttgtttccaatccctatttcagtggcaaaaagactggagagcatacaaaaaaagtttcttcagggatattgggatgataatccgggatttcatttagttgataggagtattgtaacacaagcagtttctaatgggggagttgggggtaaagtcattggttcttgtatgtaaagctttgcttcgacaaggattgtggagatttaatggggagaaaactagctcttggaggatggcactagttgcaaaatttggtttggaagattcagagtggataacaaagcctggtcgaggagcacatggggtcgggcttcagaagcacattaggtaaggatgggatgctttcaaagacagactttctattagagtgggaaaaggtaggcatgctatgttgcatgatgacatctggtgtggagacactgctttcaaagacttcttcctggatgcatgtgcactagcaagaaactagatagctagggtggccaattgttgaaagactgacaacggagaaacaatgtggtaaagtaatatcttacatagcgctcaagattagaagcccaaagcttctcaaattttttttgagttgttgtatcgagcaatgttagatgtgaggacaataggctacggtggaattgttgtacctctggaactttttctgtcaaatcctactattccgatctctcttcttgctattacaacagagcacactcttcccatggaaatgtatatggaaagtcatggttcctttgaaggtttcattttttgcttggcaagctgcttggggatgtattcttacttaagataatctctagaagagagggaaaatactggccaaaaggttctttttgtgcaagactgaagaagagaacatgaaccacttacttttacattggagctggaccagaaagataagggctacagtttttgcaattttaggagtaaattgattgaccttaggcacagtgtgatgtgaactttgggcttggagagggactttcagttcatgtgtcggaaagaaacagattactaagatgattcctctccttgtcttttggctcatttcttcacttttggtatagcaggaaaattcaatttcatacatctagtttgttggaaatgctacaaagtcttttatgtgttattttgtatgtggtttggcttctattataagccgttttgtaggggaagtaccccctcggtacttcttgatgaaatcttatttatctttgagaaaaaaaattattggccagaaataatttcagctgaagtacaagtctcttttggtacgcagattggagtatttgctgagacatcatcctgtttcta

SEQ ID NO: 9702 - DNA, 7003 bp, Eucalyptus grandis
  Intron number 11 from transcript Egrandis_v1_0.004247m (lo cus Egrandis_v1_0.004247m.g) derived from phytozome v7.0 ( chr-ID scaffold_9; pos 38862406 to 38869408)
gttgcaagctgttgaagagctcaataatcagtcaggtattaattcattgcttagcgtagaaattaatataggagaagaaattccttaccaaaaaaatatatatataggagaagaaaagagagtgatgtagaaattgataaagaaggaacgggaagaacgtgtaaactgattagggtctttcacgtctcacatttttattattaaataattcttaatgaccataataaccctattggtgttaataaccataataaccctcacactgtaacactcccccttaagctggagcatagatattaagcatgcctaacttgttacaaatatactcaaccctactattccctaaagatttggtgaaaatatcagctagttgcccattggtcctaacataactagtataaataactccagcctgaagcttctcacgtataaaataacaatcaacttcaatatgcttggtacgctcatggaatactgaatttgaagtaatatggattgttacctgattatcacaccataattctcattggtgtaggatcttcaaatccaagttcaactaatagctaacgtatcgaaattaattcacaagtagcgtgagccataactctgtattctgattctgcattggatttagccacaacactttgcttcttactcttccaagatattaggtttcctcccacaaaagtacagtaacccaatgtagatcttctatctgtaggagacccagcccaatcagcatccgaaaatgcttccactcctttgtgaccacgatcaccgaagaaaagaccacgacttggagttttcttcaagtatctcaaaattctgattatagcatcccaatgagaggtacagggagaagacataaattgactcgcaacacacaaaaaaggaaatatcaagtcgagtgataattagataattcaattttccaaaaagccttcaataccgttctagatcattcaatagttcaccttcccctgtcattaattttgagccagcttctatgggtgtatctaggggtttttctcctagcatacttgtctctctaagcaaatccaaaacatacttgtgttgtgagatatggatacctttctttgcttatgccattttgatatccaaaaaatatcaagtcatcccaaatcctttatttgaaactgttgttacaaatgcaatttcaattcattaatccctatagaatcatctccagctataataatatcatctacataaactacaagaaatatctgtccagctcttgaaacacggtaaaacatagaatgatctccactacatttaaacaatccaaactggagcacttctgtaaacctctcaaatcaagctttaggagattgcttcaaaccatataaagattcattcaaacgataaacatgaccataccctttgagcaacaaatccaggtggttgctccatatacacttcctcatttaaatcaccatgaagaaaggcatttgtaacgtcaagctgaaaaagaggccaacaagtagaagtagccaacgaaagtaaaagacgaacagagatcatcttagccattggagagagtatcaccattatcaacctcataaacctgtacataacctttagcaacaaatatggccttaaggcgaggaagagaaccatcaggattaaccttaacagtgaacacccatttacatccaatagtagttttttcttaaggtagaggaacaagatcccaagtcttgttttggtcgagtgccattagttcctcctccatagctgtcctctagccttgactagataatgcttcagcaacagttttaggagtagaatgtttattaatagtgtctagactagctcgaaaagaagcaaacataccaaaataggtgacaaactgtgcaataggatgttgagtacaattgcgaactgctttgcaatgaacaatggggatatcaagatcagtatgtgataggcttacctcagacttagaagatgaagaagacgaaataggtagaggtacatttgcagggggctccacatactgatgatgatgtctactgtatacatgctgaagtggtggagggattggaggaaatacttatgcaaagaagaatagtaacaacgatatcccttttgtgtacaggaataccccacaaaaatgcatttaagagatcgagggtttaatttggaaagccctagacaatggtcacaaatatagcagacacaactaaatatacaaggtggtaaatgaaacaaagattccgaaggaaaaagaagagtgtggtgttacatccttaagatcagaggacggcatgcgcttgataagatagcatgcgaccatgatagcattagcccaaaaagatttgtctacctttatttcaaacatcaatgatcgagcaatttctagtaagtgatagtttttccgttcggtgataacattttgccgtggtgtatctaaacaagaagattgatgaaggatgccctgttgggtcatgaattcaaaaaaaaagattagaaaaatattctttagtattatcacttcgaagaatacaaagaggagttgaaaattgagtatgtactttgttaacaaaagcacaaaatatagaaaaaaactcaatgtcttttcattagatatagccaagtggctcttgaataatcattgacaaaagtaacgaaatacttaaagtccaacttaaaaagagtaggtcaaggaccttatatatcataataaactaagacaaaaggatgagaggcctgtttattgacgcttggacaataactaatacaatgcaatttcccaaactgacatgactcacattcaagaccagataaagattgaaattggggatctaagttttttaaacttttcaaggatgggtgtcccaaacgacaatggatctgatgtggggaagctgcggaacagacaacacttgtagtatcatcaagcaagtaaagcccccctgacacatatcctttaccaatcgtcttccttgtcttcaagtcttgaaaaacacagaaatcaagatagaaagttgtagaacaatcatatgctttggtaagctgactgacagacataaggttaaacgaaaaactagggagataaatgactgaagataaagatatggaggatgttaggggaattgtacctatcctctttattgtggatagagaaccattggctaatgtaacattagacataaactcatgaaagttagatagatacctgagactccagtcatatgatcggtagcacctaaatcaatgacttaggggcgagaggcagaagaaaggcacgcttttgcattacctatttgaacaaaagtagttgtggaggaggattatgaaattggttggaaaatctggagttgattatacctagcaaattcctcctttgacattctgatcaactttcctccggcagcggattgtgaagaggcactagattctactgcattagctacattagctgttgagagggccttccaagaagcttataacagaatttttgaatatgtccaaataaaccacatgacaagttcgaaccaaatcggtattacctcttatgtcactataagtgttgctagcaaagggtggttggcctctaacaaaactacgattggcgccaccagtttgaccaccaccacgacctcaactaccaccacaatttccttaagctgtcaaggctaagttcttacctatagaaaatgcatctttaggtggttaatgtgagacttttagaacacaagcaaatgtctcagtgagtgaactcaccctatctcctccaaatatttgggcacaaacggcatcatactcttgccctaatcctcccaaaaaaaatcataataaccaattgctcccattggtcttgcatttctttgacattagaagtaatgggtagtagagaattaagctcttcatacatccgtttgaaatcagcaaaatactgagtaaatggccgaccctttctatcagctttataaaatccttgggacacttcatatattcttgaaagattattttgtcaggaataaaggacattcaagtagtcccaaactccttcacattcacagtattaatttgtaaccaaatccgcaatttgagattccatagagttcaacatttgaccaaaaatcctagcatctacaatatcccaatttgtatcggaggcaaattttttatctgttagattattctattgctctctcctagtcgacactaacaacacgattttcctcaattgttggaaattggtgataacttctatgttcttttttgtcaaacgactagaggatgtagacacaatcttagctactacacctctattctccaccataatttgatgttcgatgtataccaatataacgcaagaactttcatcacaataatcaaattcaaatccctccaactaattcaattcaacaaactaccgtgatttgtttcaaacggtccaaatctccataatacttcaatcaactcatcatatttcatcaagacaaacgcccaaatcatagattttacccacttagaaaccacctcatccaacatcaatttcgtggcgaacaggatcggtatctccatcaagcaagttgctgcaattttttttttttttttttgaaaagtgagagaacaacgaacacacgagcaaaccttagaagaccacaccaatcagatcaacttgcacggaggggtgtgagctcaactagcgtcgatcttgaatggatggacaagatcacgtgatgccagacgacatcggatctaaaccaacaaggccaaatctgagccgactacgctcgttgacatcaaatctagactcgagaaggctggcctacaccggcttgggttgagtgatgcttgttaatgtgactttgatgccatgtagaaattaatataggagaagaatcgagagcaatgtagaaattgataaagaaggaacgaggagaacgtgtaaattgattagggttttccacatatcacacttttattattaaataatacttaatgaccataataaccctatcagtgttaatgaccatcttattgaaagcatacattgatttcactaggcttatttgattttggcaaagaaatttactcttgaaattagagagaggatttcgatggtttaggcatatttatgagtctaaaatgatctaaaagttgggtgaaggggagcagtaatctcttcatttctctctctgatgctattattttgacctttgaagactatgtggcaaaaaaggaaaaagtaatagacaacgtgccaatattgtctacaataatctgaccaaatgatccactagttcccttcaatttcaatttagatcgtatagtttttctaaatgtatttctgatgctttttaactatcttgcttagggtgaggtgtatcaattcatttgtttcatgtggatgtcaaaacaacccattctttgatctggaagctcttttatggactcctagtatactttctagtcaaaaggcatatcatatcctatgagatgaaagtctaatgttctcagtgattgaaatcaaatgtcaatcacatgattgcaagatgcatcaagatttagttaccacaagtgaaatttatccttataaaacttcagtaaaattcttcattccatcccgttcatgccttttctaatcaagtccctttattttcaattcgtctaattaagtcatgctttcacaaatttctaatcaagtgctttcaacaccaaatctggttgatgcggtcgttggatgacgccgcagtatgacacggataaaatttggccaatgtggatgccatagtggaaaactttaggcaatgtctcaaataattcatccacgtaacactcctaaggccacgttgactggattgggtcagatttgatgtcaaagcgacttattaaaaaatttgtgaaagtaggatttgattagacgaattaaaagtacgaggattgtattagaaaatgcgtgaaagtatagggacaaagagtatatttcatcctaaaactcatttgttcataaatatcatgtaggtctacaaccaatgagcctggatcgaagagcaaaacagctcttgtttacattgtaaataatgggaaccaacttcctcgttgatgttttatgctgattgaagcacatagacctgtgtttttgagaggaccaatttataattgagatgaggatgattgatgctattaaagaaaaaccagttattacacatactacagcaaaaaattcagagactggtggcagatttgttgctttggtttatgcttttagaatcattttgttaaattatatgcataatggtgtgaactttaataattagtttctcttcaacgacttcccttccctgcagaagtgtaggcttttttttaagagtttaatatcggtaattgtaaaagaactctgccattgctttttgttaatgtatgaaagttatcttgttcttttccccctaaaacagaaagctcttcaaaaagcgacattttgttcctttacaactatcaaatcaatgactgattggtttcatgaccttgattaattgtgaactctcactcctgctgttgtggcaacatcaaccattgcatacatgtagctactgcaagcggcatgcatttcagctctctgtgaaagtttatgtttgaacttttgagtatagtgacctttactcatattggtacagaagtaacctggaactgtagttttgtctctcttgctaatggttgagttattcctttcatcacttcggtcattgtggcattaatctgtgtcgcagaaaatggatctgctgatttcacttgaaaatgcttagggtatcatatgtatatgtgtgtgcacgaatatatatttatatccaaacattaaatgctgatgcacataatgtaacgaaattcatgtgcctattgcattccgtatgatgaagttttgatttggggttgtaaataattttacattataaaactatagcttggtggtgcataactaaatgctcttttgttcttgttgtgttgctgcacatgtaaactgtaggca

SEQ ID NO: 9703 - DNA, 1873 bp, Eucalyptus grandis
  Intron number 7 from transcript Egrandis_v1_0.001692m (loc us Egrandis_v1_0.001692m.g) derived from phytozome v7.0 (c hr-ID scaffold_6; pos 41236352 to 41238224 reverse strand)
cttcagcaaaagtcgggggcaaaactaacaatctggtagtgcaggtaaccctttatacagttgacagtctctgcagttgcaattatattattaaattttacttttatttgtgtccatccaatttcaatgtaaattaaatgtggtcttgtcaaatttataatactgtggactatccaaagtcaccttatctttatcacatggttttctaaaagaaactgtttgactacaaactacaatacccagttcatactgccagtttggatctgccttcttttgccatctagcaattaatatcaaaagattgtcctatgtgatggttttgatggggtctacctgtttgttgtctccttttattgttctcatcttttaatgtggcttatttcctgttttttccagaatacaaaatttctaatttagtctttcattgttgtaatttcctaaagtatgtttacttataatttctctccctgtgaataatggacgagttttctttcaaatagcaattgaaatggcacttttctagtcttatagtgattttaggttcaacagttgataatcttgagtgaccacaactttgccatttaatgagtctagacacagagattctggttgcttgatattaaaatttgtgtaagcttttcttttgaaacatatttatcatacagaggatcaagcctaggaaatgccaatatatctgttgccctttttagaagctttgtacgtaatgccacatgagttgtggttctttcaggaaggtgcagcaaattactcttcagtgattttgtcattagaccaagccttgtttttgctcttaaagagtattggtggatatgagatttttgtgtggagtactgattcttcaattgacagtcttaaggactcgcttactttcggggatttgactggagtgaagactcgattccggcttcaattccctttttagcatttagcgcaattttctttaggtggccctttctagttgaaggaatagttcctctgatatgatcacatatatcaattgcattgcagcacaaaaaaccaagaatttggtcaaaagggtacttccctttttatttcttaatacttttaaaaaacattctcacatatttatcacgacaagacgcgaaattgatattctgagaattggaatatggatctcagttcgttctcttccattaaccgacttgttccatcccaacctcattccactttatcatttcaaacctcttgagtcattttcttcaatggtgatcactgatgggtagagttctgaggactatcaagtaattgatgcagcaggttggagcaattgacctctttgtcattctctttgttataatcaattatgaaaaaagaagtttgagaaaccactactaactgattgataaatttaagttgtttgtgagacatggtgtaacatttaaatactctagcacttcctctcgcatgtaggctgatctttggttgaatcaaagcgtgggaatgaattatactcagggagacatttgaggggtttagagaggtttgaactcaagatttcctgctctataccacgtagaaactgtgggatcactacctattgctctaaaagcatacgttgttaaatgtaggaattgtctttattcgaatactttacatagaggaaaaacttgttgcaataatgtcagcgggcagcacattctgagataggaattttaatgttgcacttccttgcgaactttctttcatcggacaaagtttaatacagttgtagtctcccctttatttggaccatacatgtgttatgtcatatctatttgttggctttatttctctccccacatgcagagatctttgcttgaactattaaagttttataggtagtgctactggt

SEQ ID NO: 9704 - DNA, 1845 bp, Eucalyptus grandis
  Intron number 1 from transcript Egrandis_v1_0.028672m (loc us Egrandis_v1_0.024232m.g) derived from phytozome v7.0 (c hr-ID scaffold_9; pos 30350022 to 30351866)
aaagggaagcttttcgagttttcgactgactcttggtttgttctcgatccgttcttttcgtttttctgggatttttctgcactgtttctttgagtgctgtcgccgccaatgcttaatatcagaacgtttgcttttcccctcttcattgcaagttgattattcttgagaatttgtagcttgtttcggtgaagccatcatcactcgtaaaggggcaacagaaaatgagaaaggaaaacagcatttgattgggttcgttgcattctgcagaatatagtctaccaaaataccatcatacacatagtgacggaatttaaagcagtcgtttgtggttttcatggattccaaaatttcgaaaaatattgctgttcttcttttgattctttttcttttaggttttcttcacaaggtttgatcaagctgctttttctttgatccccttctttgtagtagagtttctcatgaagaacggctttttcttgtgcctacaacaatcttaagtggataattgcggccttgatcaatttatttggctgtctaatcatccgttgtcagccattttcatgtgccttcccatttcgaattatgtaatcagaaggactcttaagctgcgaatatccagcttgaaaataattctgatattatcacgttgatgaaactgttggattaaaattaactttgcaagcgaaaccttttgcttatttcgtcagaaaagagaagttcgtggatttgcaaaatgtatttcttgaaataattgcatggtatgaatgtggccgtacgctgttttgaatttatttcaaggtttctagaaaagcttctctatctacacacacacacacacacacacacacacacacacacacccacacccacacacattttagtatgtattcattaatgagattcagttaatactacatttaaaacttcatcaacgatttttatctggtgggttgaagcttatttttcgttttatagagtatggacacctagtactatttttagcaaagcctatgcttcattcattcggcgagttcagttccctaggcttttgagatctaaaaccatcaagactgcatggtttctctatgtattgagaatcttcttctagatctatgatcctatgactgatcgaagtttctcaaaagatggatgcactgttcttgctattttctgggggcaataaagataatctccatgtttttcttctttttctgttttcatatctaacctcttacttgaatttgaattttaacagggattaaaaataaggagattacttgaagaagaaaatcggaaataagtgtgcttctgaacattttttaaaaataaaattagcaggtcctttttgtggaaaattgaataatcatttgacaaagactacaaattcaatggcattcttttttaaagttgccaaatatttatgataattttctcattaggcatgcatgcgcagcctaagagtctaatcactcccccagcctcacctgatctagctgcactagggagataagattagtttaatatattgacctaaaactctctttttcatatcaatgcagctatgtcatcagctttcaaaaacattacttaaatatgtaactgcacatctctttcgtccaactgatgcattgataagtctctacaggtgctaattttcaaaacatatatatgcacttgcataaggacatgcgatcattgccaagtagcaccccgtttgccccacattatctgtgagatgtaaacgtggtgggcctctgttagctacaatatgattggcatcatttaagcttttgcgtaatcatcagtgttctcaatttgcaaaataccattaacggatcttgcagc

SEQ ID NO: 9705 - DNA, 3952 bp, Eucalyptus grandis
  Intron number 1 from transcript Egrandis_v1_0.004033m (loc us Egrandis_v1_0.004033m.g) derived from phytozome v7.0 (c hr-ID scaffold_9; pos 11223574 to 11227525)
ccatcatcatcctcgtccccgccgacatctggacggtacgcgccctcacggattacgctcccgcgatccgatcgtattccccgttccttctctctctcgcgcgcgcgtgcatgtcccgtgctttgattcctgctcgccgtagctccgaatcagcgagattgctcctgatttcaaccggtttttctgtagtcggttgattgatgaatgccgcgtgaaccgcgttaggtgtgatatgtgcgccgattttgttgatgcgctcgtgaaatttgaggaaggcgagagtagaatcacgcaaaagcaaggcctcagctgtggtagaaactaggtttttttttttttttttccagctggtcctgcgattctgtgcatattccgggctccattcgttcttatctgacgtattattgtttattgcgttcttgttcagattagagatacgttttgggtttggtgcaaatgctcgcccatgtttgaatggttaattaagtactttgaactgtcaattatggagtatcattacatttgttatggttccggctttgtattgtgttacctcttaatctgaaactggaggatctatcccttatccattgatttgctgactttattgagttattacagttaaattggctgtagcgattcgttcattgataaaatcttgtaggccagggcattagatcctggatctctgtcctttaacattggtattcaagttgccaatctcaacttaggatgcctttttcatctggatagctgctcatagaaacctgttatgagctgctaaggaagagaaaccttaacatccttaagaaggatggtccgctctagaccaatgctttatccttaggctctaacggggggagggggggggggtgaattgtaggtttaatttgcttagatttctgctatgttacaaaagcgacatattgctgggtttgaatcttttgatgaaatcacagatgacctcggtcctttcaaatcatgcagctacccacttgcctcgtaacaaatcttcaaatacttgctaattgctgaggtggctgtcatgttagtagcatatggttagttcacatctacataattttccatgccatcaacatgaaggatgattgctgctagcagccaaaccaaccgaacttcatcaatcctgcctcaatctcaaaaatcagccaagtccaaaggtagaaaaccccaattgtccctaccacccttttttttatgtggaactatttgtttcatcaaaataatgattggtctgaagaacaatttcttcaaaatatctgtctccttggcagtgccatttgattacaccactttcttctttgatctctcacattctagccttgctgttagactaaatgtggttttggatagaaaatggagagctgatcctaggtggggatactcattgcatcagtatgatccactggtgcaatgcaaacaattacttaaaatagatgagagttacccttttctggttgtgtccctataccaaaaatcaaatactgtcacttgggagattatttgtgatgtcgcaagtcatctatgatgttgaaatgaaattcttaatctgcattatatctcattccactcctttaaacaagttttgcctgatgttgaaatgaaaagtcaatgacgaagaatcaagttgagcggtataaatctcattcgactcctttaaagactctctcttctgttccctgagaatgctcttgagtatgtttcttcttagtaaccaggaaatctagggcctctaattaaattttagttccttgtttggtagtttttcttaaagctcctttttatcacttttgttcacaccaaaagaaatcccagacgctgacggttgtgtaccctcatacgtcatccatggatgaagtagcagagtagaattggcatggtcttaattctctagaaagagcacatcaactagaatgtgtgttctatctcctgaaagcagctttcaaggtctctctcttttttttgttttttttttatgccacacatactatgagggaatatagtttagcctagttgtgccactgtgtaatcattggtgtaagttttagcctgtgaggcaatgtatgcattgtaattggtgggactttgattttgaagtttcctatttgactgtattttgatgttgatgcattaatccccagtattgtacttttgtggttttagcaggttaaaagaatatctcatatgtttatctcatggggagttgacaagtttcttaggcttcttgtgaattgcttttctgtggaaatctagtacgctatttctgtcatttaccaggctatttaaactatttagccatctccctggcccaattttcctttgtggatacaacttcgtgtggaaccgtaaagtgtgttttgcccctctgtttatgattgaaagggactatcaagtgtgttttgcccctctgtttatgattgaaagggactatcaaaaaatgtatagataaatagtgattggattagaagtgaaattggctcgacttcaggttgatccttatactggcataatcccaccttaaggtagtgatctctttttagctaaatcaaaatgtacctccacaaagaaggggactaaggttgcctcatcggcacacttgtggtgcgttatcccaacctggggagttcttgtacccattatttagttaagagagacatgggcccctgggagttctcttacctaatttttagcttaggtagacgtggagggtctaacaatgtcacatgctgatatcaccttaaggtagtgatctctttttagctaaatcaaaatgtacctccacaaagaaggggactaaggttgcctcatcggcacacttgtggtgcgttatcccaacctggggagttcttgtacccattatttagttaagagagacatgggcccctgggagttctcttacctaatttttagcttaggtagacgtggagggtccaacaatgtcacatgctgatatcactcaagtgcatgtttgggttttctaatagagaaagaagcaaagcaaccattcaatgctatatactgttaatttgtccactggctgataggttcattaatgagagaattaacttatgttatagaaaaaattatcaacaatgaagtctagcaatttcgaaagatgatttgcttcccccaatgatgatattttgggccaaattcgatagaaattgactgcaaatgttatgaagtttagcatctttaaattgattaggatagtaaacgggtcatttaacagacatccacagccaaccataaagtatattgatttattcatatacttctaatctttaggctgcatcttagattaagatattactgatcatatagattgtttaattctcctagtcatgtatgagaatgatgaatatagaaagtttccgaatataagcccatgcagtgcatgatcatgcaactagtgcttttgatgattagaactttatcgctacttcaatctagagtctcattcctcctgtttttcataatcttgcaagtatgctccatactgaattcatttggtgttattactttggatctatatcatttcatacaaacatcgatatgtaccttttaatctcattattttgcttcctcattgcaatatggctgccgaatattctgggtctgagggaagagtgtgtttccatgaatgcctggtatggattttcagtcgcttgtgactgatcaggcctctagttcacttcagttgacatgtttcaaagctgtaggtatcgtgtgttgattatcaagcagattatgaaaggatcctttctgtttgagggaatcttgtttttatgcttttgtattagctactagaatgatggtaggtcggatgtacatatcacagttccatctacaataattcgtaaacatggtattttgattgacattgacttgtatccctgaaatgcaagtattgttcttgcccattcagacg

SEQ ID NO: 9706 - DNA, 682 bp, Eucalyptus grandis
  Intron number 5 from transcript Egrandis_v1_0.011599m (loc us Egrandis_v1_0.011599m.g) derived from phytozome v7.0 (c hr-ID scaffold_10; pos 22734114 to 22734795)
ttctttctcagcgcctgagttgtccagctttgagggttagtaatgtttttcacaatacagagattatctgtattttttctcggttaatttcttcaaaagcaagttttgacattgtttcatgggtttttgtagaatctcctttgtttctggtggttccttctctacgaggaagatcctagctttcaaaactatgcttaaagatggccttttcaaaatgcaaagatccaagagacaatatgaatttttatgttcatcactttttagagaaataaaaaacgcttaagtgtgcataaggtcgttacgtcaaatgcagtacttctctttaggtcacttagaaagcaggttgtgactttgacctgtgttaagacttgtcagcaggacttgcctttcagaaggtcaatttccaattacttttttgactacctcaatttgcatttaccactttcatttggtcaaatccagcttgacttattctttgttttggattttccaattaaagcaggggggtattatatttagtggtatgtaaggatagatttatgtgctttatagtttgattataccctaagatttgatgtcttggttattttcccaccatgttgatttgatttctccaatactgaaaatttcttgtactatgttgtcagtggattctctcaagtgggcttgtccggatcgcatc

SEQ ID NO: 9707 - DNA, 4137 bp, Eucalyptus grandis
  Intron number 8 from transcript Egrandis_v1_0.012311m (loc us Egrandis_v1_0.011500m.g) derived from phytozome v7.0 (c hr-ID scaffold_3; pos 46210859 to 46214995)
ttctctagtcactgaaagaaacactgatttggaaggtttgttataccctttaactccatttaatacttgactaccattattctgtttgcttgtttcttgattagctgtgaagtgtaaggggaagtccttgactttgctctttgtagttgatagaacaattctgcaagagatgaattttgaaatgttgcaacggaggaagcctattattttaggaaaaaatgatacattttcccttctctttccctgtaaaaatggtaagcctgtatttatatggataaacagtcagggaaagaataaaatagatttggtaatacaaaactgtagttttgtgcttttgtattctaaagattcgtagaagttttgtcttgctggatttgatccctggcctttgtaggaaaaatgtaacctcctttctgttgtttacctctggtgacattgacatgttgctgttagcctgttccatgactccatagtacatcacagggttgccataagtcgctcattgccctgtgattggccatctggctattaggttccagaatgcagatctttggcttgaaaagccagatttgcgatttttggcattccaaagaaataacactctgatattcttctcctccattagacaagcaaaaagaacagatggagggagtcttgtatgaaaactaagagacctaaaccagaatctgatttttggggaatgaatcttgataaaaatttggagaatatccatggtgttggttttcaagtcttgatgtttcgaaagataataacaaagcatgaaattaaaggagggaatcatgtatttaggaacgactttgacaggaaaagaggccatctttcaaatttgatttgcaatgaagtttggaggaagaggagttttcatcccaagttttcaatcatgggtctattagatctttttaccttgaggtttttttctaggaaacaacagttctagtttggctggatgaaagtctttaatgaatattcaactgcgtgatcaccgtttggtttatttccttcatattttattgcatattagaagtttgtaaattagaagttagtcagaatggccttgaggtcgtattaatgtcaccatttgatgtaaaaggaacagcttttactttaatgaacctgtccacatattataatttaagtcattgaatttagtccttgaagccattctactttccagataaaagtattgcattccaaaaacattttctgaagaagctacccttatgtaccatgttttaggcaagtagcatcctgcattcagcatgccgaaataaagcacaatatcaggcaaccctggtacttcctctagtttttgagaggatccacatttggattagtcacattttccttctgcatcttcacctgaagatatgtgataaatccgaagctctaggcaggagtcctttcttgtccatgttatataagactcttcaattaaactaggtaattatgcctagtagtacatctttaaacagtttggagaatctagttctcttgtcatattgttgttgatctcccagtgcactagagaggatctgtagtgcctctaccgcctttccccgctttcttttttctgaaatttcttttttttgttaatggcgggccactaaggttattttaggttgtgcagtttcttttgtttttcttgatgtatctagtcagatctgcatgaggagagattggtttccctctactcgcaaaaatggctatcataaagatagaaagatctggcaatgggtgctcattatttttgtcttcttggagtggtagtgcaagaatctaagtgggttttttttttttttttaagtgtcaaggatgtcattctgtcaccttgacttggctttcgtttgtgctatggagcttgcaaagccatttgggttcctatactgttcgctgaatactagactttcaagtctttaacaattatactcactgaatggatgattgggcacttgtaattattcataacttcatttcacctagagctgtgattgtcaaagattgagctgcatagataagaggccatgagcttgtgatttcaggatcaatctactagtctagaatggttcatgattttgctacctgtccccaattagcgcatggaagtaagcttgctgagatggaatgcattttcgacggcggtgtggagtacttagcaactcaatctcccggtgaagaatatcactgtgctgcagtttggatttttgatatttagatgctttgacatttttccatttagtagtatctaggagatgaaagtagagttgagagaactggatttgactcctgcagcttgtttgcttgagtttactgaagggaaagggagaacattttgccaactgttcttgttttctatttccttttattcttttttgatgattgggggtgggaagaagcagttgagttgtcaaatcagctaattggaggaaaacatgcctaattaaatagcaagacggctattgagcacaacttgtgtgggtaatagcttgagtggcaagtatagatacgttctggttcttttcttcttgagattcattgcaatattagtcataagaataagtgtcggatgaaggaataacagtgcaatttaggaaatgcagattctatgtctgatgcaaagttattttgcttaggattctctctctttggtatcttatatacttttttttcggctggcagcagataatgtaagttgcataattagatattggcgaaatattttagaaaagccaaaacttgctgtgccccgaaccttgaaatgtatccaggagatgttaacttttatctgtattatgtataactttggtgcagccgtttaaagctcagttaaatcacagatgtggcagatgatgtggctaattgtctccattaagcatcactagttagtcaatttattgagtaataaaattcatttaaaattttaggaagggaaaaaaagtttcttttaaaagaatcaggttaagcagaaaattttattttaaaaattcaggttagaaaaaaaaattgtaattttgatctttttcatttgttcatccaactttttgtgcaattgagttttgcttgtttgattttgctatcgtgttttttagtgatcatctctttgttccattgaatttgtacaaaccttgcttatgtgaacatagtcctaattctagttttgaaaggaaaaaaattggcatatttaagcacgactttaagtagacagtagtaagaggatttttggtggatttaattggtagtcactatactgagtataacttgtatatcgcatgtcaatactggcagcactttcagtttaaagaaaaatctctgtaaaatgtctccttgtagcagtaatgtgggcccatcagctgcaatggctgttattttgtggagaaaaaaagttcttttttgctgtgctagtggcgataaggtctgtcatgagcagtattggagctatgagatgaaactgacacttcattatgctaatttaatctcatctaatcttttaatcgaaatgaaaaactagcttttctggaagttattgaggaagtgctctatctcaaagtagaccgttcatgcaaattatgtaattgatgatggtaatcgtgttaatcagagaaagaattttgaagatactacaatatttacagtcttatgagatcaatgcttatgtatgagaaagcctcttcttctgctatgtgaagaacagtttgtgaaagagaaacagagaggataaaggaaagtttctgaggaactgcacctttcgtttttctccttgagatctttagattaatttcagagcgttttcagtagatttaactgttaaatatgattgattaataagatctggaattaaatcaaagtaacatgtttctggggtctattcccattatgttctttatatataatctgatctccattttctcaaaatttaaacttgcaatttgagtcttgtttctgtactttatcttgatgttggaacttttgattgtctcctctcgtatgagacatagctttgtctgttcttcctcttcttctgctattcctgctaatttatggacctgaatattacatttcacgtcatttttattctctgactgacttttgtgacctttcttcatcttctgtgcagaggaa

SEQ ID NO: 9708 - DNA, 2337 bp, Eucalyptus grandis
  Intron number 6 from transcript Egrandis_v1_0.000002m (loc us Egrandis_v1_0.000002m.g) derived from phytozome v7.0 (c hr-ID scaffold_10; pos 9294289 to 9296625)
caagagttcttctgtttttaaagtcagtcttgcaggttaggaaacagttaactacatcgcagatccctcaggtctcagtaatgcattaccttgcttgtactattaaaccgattttgctttttgactctgttagagtaattaaatattaaaccacgccttcatctaacagcttaagcttttagaacagttggcagtggtcttacaaaattccacatggtattggagtaagaggtcttgagttcaaatctttccaggcccctatttgccccccaattatatatttccatgcctttaggcttaggccaaagtccagtctacgcgtgagggtgagtgttaagagttattaaatattaaaccgtgccttcatctagcggcttaaacttttagaatagttggtagtggtcccacaaaatctcacatactcttaacatgggcaaactttgatgctacaaataatgcttttgaagccttattttctcatagaactgacaactgttgagctgagcagtgaccaatatcataaaaagttcagaaaagatattttttttggtaaaaaaaaaagaaggtttcccaagaagtttaactaatgaaagaactgtttgaaagtggttttacattattgggaggattattcctttttgtgttcaaaactctgttcaattgaattacaattgcaaaactaatatcttacatacttatgcgaactcctttttctagtggtttaacagtaataattccttatctaaccgtagaatgagcttgcattgttgggatattatagtaggagcttagaaattggttgctgaaagcataattactccactgggcaaagtgggagttaaggtttaaattgcaagttccacattaattgagagtgttcaaacttatatctaacttattgtcctttaaaaaacggtaccagttttggtaactggaaccttctgccaagcctgtctccagattttcataatcgacaagtcttacatttccacttgtttcagtacaaataaaacagtgccatactttagggaagcatttacaacactcttcatctacatgcttgctcattccctcctttttatgataactaaagaaaatttcatgatgatgtacctttccaatttctttgtctgtggttggtttaacttcccaagaacttaattgatgtaatttcgtgcatgaaaggtagcaatagcttgagaaatatgttgcctagaactaccaagctgtattaaaacatacagaaaaattgtcttcccaatggcttttaatgttgcactgcttatggcacgaagtgctaggcagtgaaacacaaacatgcacatttatatatagagatcagaatgctttgttggatttacggtagcttaatttttgttaagatcagagaagctcttttaaggtggttttcacatgtggaacggctacctgtggatgtctaaggagaagatgtgttttaagaaggagacttaaatatgggtgggaagactgaaaaggataaagtgaaaaaataaaataaaattcgagcacttagatctctcagttgatacacaatcgagagcatggtgcaatatattaaaatagctgaccactttccatggataagactctaattggtgttgtctttattgttgtcgtcaatcatctatcttagacagctaacagctaattagacttcaagcttcttttggagttgagttgctttgatgatggcttcatcagtaagattagcattttggagattcttcctggaacattttacatatctggcaacatcatgtggggaaagcaagcagattccagggtgaatgctattaaaactgaagatagtcatcttcacgcatagttgtgcagtcgtgcacatcattttcccctcaagttgtagttaaggtagctgtcaggtctagctgagtgatcttaatccaagccttaaagacaacttatacacacccaaaaaaaatcaatgggctagccaatagagacctgcaattgataagcatattagggggaaaagatctttgcaaatgaacttactgaaagaaggcattaggtatttttgggagacacatgttctatctatttggatgtatccacatgatgttattctatcttaggcagcacttctagtgaagtcctcctgtctcagacctggattagtgaggggagaaacccagacatctcttaacagtaatttgtcggagtgacagcaatcatgtatctattgattctacaccagtgatgcttatttgttggacaaccttctgtgtaatgtgattccaatgtctaacttgatgtgtgcatttgaataggtgacaatctcaacgtgggaggaaggat

SEQ ID NO: 9709 - DNA, 6922 bp, Eucalyptus grandis
  Intron number 2 from transcript Egrandis_v1_0.041715m (loc us Egrandis_v1_0.041715m.g) derived from phytozome v7.0 (c hr-ID scaffold_2; pos 59216035 to 59222956)
gaatttttaccaggagaacaaggtaatatatgatataattgcatcatcaattcatacttggcctgtgaagttaatttttacacatttatgatagaagcctgtcttggtatttgattctcttacctttattcttatttaaggggatttttgattgatgtcaggatggtgaacaaactgaagggctggggcttcactttgatggtgcttttaatcaaaagaggcctagagataatgttaatggatgttcaaagaattcatttataggcaccaaaaggcttaatagtggaacttcggatgcaaatgaaagccttttggacagcacacatgatgatgcttctttgcagagttcattagtagacgataacatgaaacctagcaatcgcccatcttcagaaagttaccaagacagagccattggacagctgaaattagagatggaagagaataggttcttctacattccacccagagtaaaggtcaagagacttgattatcttcattatgttaggaagagggatcatggtgcattagcctatgttgcccatgctgattattacatattgcttcgtgcttgtgctagagtagctcaggttgagattagatgtatgcacatgggtgtattgaattttgagaggagattagcctggatggaaaatagagtagaacactgcctgcatttaacattctaaagtatcttgcaagttttgtagtgatgggactcgagaagatgatgcgtacaatgtgattaacctttctagtctgaatggataagatttttaaaatttcctgtctcatatgtctcgagagttgactgaagccaggctactatgtttacaaagtgaatagtatactgtttatgggacatttgtgtgtatgttttgtaccgcgagctcttaggcattctgctccctttcaatcttccatacgatgaatgtggtgaagtgcaaaaggctgggtttcagctggacaaagatcttgtggtataagcaaattgaccaaggaatgttggcaaatccaattttatattatattcacggctaaaaatatgttagctgcagcatttcctgtttctttcttttgcatattgcagataactataaatagcaagcatgatgcaagagagagaggggggaaacaaagacggggaggggggggagtatactaccttgtaacatgtgacttcaagaagaagaaatgcttggaaaggaattccaagagataatgttatttgaataatgaagtgccgattacaatattttaggcgcctagttataggtaggtcaccattaatgagataatcaaataactgaaatctaataacagaatcaaggaaaagatattgataaaggggaaagttttcaaaatgctactaagaaatctacaaaatacgtctaaaatttttgacgtttcggaaattaaggaaaacatgtaaatttgatatcaaatattgtaacccatctgtaattttgaaaattttgcaattttctttaatttgttggaccgcttgctctttcgatgctcgaaactttccatacaagcattttcccatcgttctacgtcacttctattggtggagagatggtttacttattgatgacatgagttatttagcagatgcttaagtcttttctcattgacctcatcttgtgattttcaccttcacaagttcatgtttctatgatcttattttgtatttacttgagtaatgcaataaatctccggcaaagtggttatttcttataatcaaacaaaaagcgaagagcgaagcctaaatttctgagtttatgaggcaattaactttttttctcttttttggtcgaaaaggagttaacttgaatagttgtaattttttttacgacatgtttttgtatgagcgtgtgacagtaaattttgatgggactcagatcgttgactgatataacagggggaagttcaaattatatgttgtataattgcctagatgtactcaccttggatgacatacaaccctagttaaaattaaagctcagctaggctcttgaagtgactcctgttaagaggcactgctaattcagcagaaagttttttcctcctaggtatgatgtcattattcccgcggaagaacagaaataacgtttactactgggaacagactagcctttctccccaggctcgaaacatctaaaggaacagagtttgtgatgatccctttgtctacctcgcaccatttcccgcttagagaagaagaagaagaagaggaagaagaagaagaaagaagattttgcgccatcttctatgctggaccctctcttgggtctatgatgcttgcagaactgagatgtcatggtttcactctcaataccaaaccctacaatagcttagcgtgcctgtacaagttgcttcatgacaatagctgacaaaagaaaatattcagagaaactaatcaaccctcacacagcctcccgttgaaggcaggataattataaatgctagccttcacatctccgaggaaactcttttcttccaatctgtctaactagcatgctcgacctttgctgttggtcgaacggaacaaccacgaatagatttaggatcagttgtgcagaggatcagctcctccttggacttttcttttgcttgacatgttaggatcatatgtcttcgtcacatttgaagatttctttgtgttcatgcccactgtgctgacagtcttcaaactgcgtcgactctggggtgcttttccctgaacgtcttgctccctcacgaaaccgagcgctacacttactagaccatggtctttatccgggtccgatgctaagaagaagatgcatgcgagcagtataagggctctggttaagatgaagcccatgattgtggtttgcggaaggacaagaaataagagcacaagaactcccgttgtttactgcagtatcgggagcttaggtgatttggagaccctcggccttttctttccgttccaactcttccaaacataagcctttgattcatcagtagcggatttgataatgcacttaatagcataaagtacggaggggcccctaacagctagagtgaattcggatcccttaaaaatctttagcctggtaggacgtattctacgttgacggtgtcgtcactccattttttatttctttcctttgtaagtttcttagcctctttggaattcggacgttcgagtgagacatagagataaacatgttgccggcacttcaaatttttggaccggaaaagacggctgcctcggttgcgtagacgacgggcgggtcaactgacgcctccctctgacttttctgcgcttacgcgttttgaggaaaccaaaattcgggtcgaacttgccagtccgcactcgaagtcttgtgtgcgcatgtaaatatgatagctaggatccactttagatcgtaccgtgattcttcctccgtgtgagaaaagtatattgtcttggcgtgtgatctagtcaagtcgtgtcaatcgataccatttgccaatcgatctagacactattcacccatgtagtgtcggcaaaactacttcatctcgatcaattctgagcttttccatctcaaatttgtcaaaagtccacttaattggaaatagattggatgtttgcttcgtcgaagataatggatcggaggcttctctcctccttttgggaagctctcctccatttatttcaacatccttaacaggtggagacatatcgaaggtcagtgaagtgaggttttcagagacggaagcttttccttctgaaattcttgaggttttggtttgagaccaagccactaatgctctcgaatcatgctcaggagaagaaaaatcatgatatttctatggttcgatattgtaagaatcagacatatataggttcgaacaaattaggggcattttatcaattgaaaatacgtgctaactaaaatgaaaataatttcataaaagatctatttgattcgtgaaaatagaattttctaagaaaattttgaaaacagaatttatcatttttcagaatagggcaggccttcgcaaatgcccactgccacacatgcccattgtcaccccgtgccatcactctcttcgtcaaggctttgccgttacgatttgtttgctcctaccaaagtatgtactctccctccgtctcaaataatagagagatatagaggaggcatagcacaaccacataaggaaatctaatggagttatagctgccgctagaggtgagttttgcggacaaacaaaagttcaagtttggagggaattggtaaattttttacaatttcagggttgccatgcaatggtgtcaaaatttaaaggatgatccataacttttttaaaaacaaaaaaaatgggcttgaaatatcctcattttcttaaaaaaggatccggaatggacattgtttcaaataagggtctaaagtgtaattactttctcaaataatgacataaagtaaatcttatttcaaataaaagcctgaagtgattatatctggtttaaataaagactagaagtgattatgtttgttttaaataaatgcctaacttttcgacatttaagagtattttcgtcattaaccattttttccttttttcttcttttctctttttcttggttcttcttcttcctcttcactagtggctagccggctggccattagtgatgcccataaagggctgggtgagggtcgtcctcgctcaattcagcgagggccacccatgtcggccacaagcaagggatggcctcgcataggcaaggtgaccctcgccctgtgggaggccgcccctcgcggccacttgtgaggtcggccttcacttgcgattagtgagggcttggtgactttgctggctattggtaagggccagcaagggctcgaccaccctcgccagcatcccgtaagggtcatcgagaccttgttgaccccaagtgaggttgacgagtgcttacaagcccttgccggcctttgttagtggttgttggccaacgctgaaaaagaaaacagaagaaaagagaaaaaatagaaggaaatttgcatgaaaatacccttgattagttagaaaatttgccggttgatgactggcgagatcaagtctttatttgaaacaactaatgtcattttagaccattatttgaaagaatgcccattttagaccttatttaagaaattgaaggtactttgggccctttttcaagaaaaatacggggtagggcttaaaatgaaaattcgaaagcccagcatggcttggctcaaaattggaaatttatttaatttcttatatttctaattatatctcattaatgattttcatcctaaataaaaaattgaaaactcacgagtgaattatttattttgttacattattgaactgattatgttattcttgataatatgaaacttttcacatgaaagatattaattaattaatattgagaaatttaaaattctaagctgagcctagcccaaaccagacaaggtcgggcttggtcagattctgagatcgatttcgggcttgtaatatccaaggccgaaaggacaattcaatgccattttttttttttttttgggtctaatactcaatgccacgttttttttttttggtcaaactcaatgccacggtaaaaaaggaaaaaactgccatgtttagtatctttatttatattaacctaaaaataaaagcacactattgaaagacccaattttcaaaaaggaaataaaaataatattaaaaaaaagactcatcgaattttaataaaacttacacaaatcaaaatttaatgtataataatttactccaaatcggtagacctgtaatgaatttatctaaaatttattttttaaccataaaaaatttccaaattgatatatttatgataaatacactctcataatgaaaaatcacaaattacatttcattcaacttaataatttgactgtaaaatttaacgaaaactaataaaaaagtaaatttgtcatttttagtgacaaaaaattaatttaaaataaatttataatatctgtactggattaaaattttccagcggagaagatttttccgcctgtgaacttctatgcgatttgttcacgctatctcaaccagttatgcctaccagcggagaagatttttccgcatgcatgccgaatacaggaatggtcaatgccgcctgatctgtggttgtcagcaaatgagttgaggcttccaactcgtgtctgtgtcatgtcaatactcatggtagcaataagaattctttataacatacatggttttggagaatgggagaagagcctgattgatcaccaagatatgtcttcaacatcaagtgatcaagttggatctgaaaacacagggggttccagaatgagggaagatgttgaaaatggttttggttttcattctggtgctggggatgatttagatacgagattggaagcagaagcctcagatggtgataagtctgagtttgatgctaaggagcttctacgaaacctcaatgctagatacaatgacttcaacgactcatatggtactcaattgcattttgataatttaacaagattgtttaaaatgtccttttctttcccaacatgctttgaaaggttttttgggctcaatgtggatgaaagaatgattagtgtacaattgtgttaaatctttttgtgtggacagagtactgcaaagacttgcccacctacctccagtattgcaaagatgttgtttttgctggtctagaaccttgtgaggtctacgaggaaggagaagttatgaagcagctgtggaatttttatcaggagaacaaggtaacttatgatataattgcatcatcaattcttacttggcccgtgaagttaatttttacagatttatgatagaagcccgtcttggtatttgattctcttacctttattcttatttaaggggattttggattgatgtcagg

SEQ ID NO: 9710 - DNA, 3330 bp, Eucalyptus grandis
  Intron number 19 from transcript Egrandis_v1_0.000130m (lo cus Egrandis_v1_0.000128m.g) derived from phytozome v7.0 ( chr-ID scaffold_3; pos 77302819 to 77306148)
tgattctttctgacttttggcgtcccttataccaggtgagatcttaatatttgcgatgtagcttgtttggggcttccttctttgcatgattaccttttctattttcttgttcttatagtatattttctgtgtcgacgtagttacctcgacattgagtgagttattccacttaatactttagatgctacaccaacttttttttatctttttcaatcatttatttttgcagtacttttctgctgtcttttgattttatgagattttagattatctcttttaaagcaaatttaacttttttttttcagaacaggacagtggaaaaaattattattattttttcttttggtaaaattttaattttttaattttttttttggtaaaaatggaaaaaattattttatatcttaaaaagtcaatatttatatgtcatgaaagttttaaggtattttttgtttaaagtcaaattgtgcatatcccaagatttgatattgtattgtggaagggtttttagcttctaacaaattaagctactatatattggttctgataaatctatttaaagggccttttattaaagcgtatatatggcttgaagcacctagagtgtttacaccctggatcattttcttttttaagggcctctttgtttacacttaaaaaagagcaaaaagtaatcttttacccagccaaaatttgaaatattatttgatttcgaaagttatgaaaaattacatgtgaatctacatatcaacgttttagtgttgtgaaagtttcaagagtttcagttgggctgtagatttggattgaaaggaaaaaaaggaagtaaaagtcaatccaaatagactccaagggtccacttgtttgaaggaaatctgttttcgggaaatggttttccaactttctggtgtttggaagacagaaaattagttgatctacggaaatgttgttgatggattgaaaacaacaagcttagattgggggaaaatgacttttccttttggaaagaaggatatcactttccctaaaccaccagaaaaatgaaaactaactattttcctcggacatgatttccatggaaatattttcatttatcatgaagttttcagtgaaacaaacacatcctaaatctgatttcatctttaaaatatttatgtggtaaattaggaactcgttgctggatatatatggaatgaggtactaaagtttttttattgtccctattctctgtaaatattgctcttatggatggtagttagaatcgcgattcgggtcatgatatagatgattttactggccaaacgatgaagactgagtcaacttgcttcaaaagattttatagttaaaatcaaagtaaaatcatgagtggactcagtaaactcagtaaaatcgctagttgactggctttgaatcgattgctgaatttcttctgtgcagatgcaattcacctggatctgggcttcttaaagctgaaaagcttattaagctgaaaaaagcccagaagcttttaaaacagaaagtatctaatgaattatgagttcaatgcattctgtttagcaaaaacacgaaaaaaatcacttattcacaaacctcgtgtggggctaatagttttcatttcacatctcatggaaaatctttttcgctccgcttagccctatccccctctggacgatcctatttggcaaatacctagtgacaaactcctatgtacctttcattacagtatttctaaatcaatgaaatgcaaaataaataagaaaaacaagtaaaccgctaacaagtcggggcacaaaattaaagggctctctctctctctctctctctctctctctctctcgtactcaactccatctccatccatcttccatccatgactattttgagattctctcttacttttagatgtaatatctccttgctttgtcacaatatttcatcaatctttcctcttaaattattaaagaaaagagatttagaaattttgttttcattgatttatacctaataatctaattgtactgcgaatatttaccatgtaatttgcttttacggctgaatttaattgttcaaaatattgtaactaattcataaagaaactgaataatttccttgaataatttaataaatttgtgaattcttacgatttgattttaccaacgactcatcaaccctaggtgaaaatgtgaatttgacaactttgctattatgtattcttgacgtaagccatttaggtaaccttatagtcgtttctaattcactatttgtctctcttgcaagcagaaaatcttaacatggtatcaatggagaaacattgattgggaaaaggacacaagtgctttaacttttgcaaggtgctcacttgagtgccataactttttaattgcttacttggatgttataactttatagaaacattcactacaagtgttggaaatttgtcgtggcatggcacttgtggtgaacattttataaaagtcatgacactcaaatgatggatcaaaagttatggcgcttaggtaagcaccgtatgaaagttatggcatttttggaagtatccggctcattggttaagccaatatttagtgattaatagaatgcaaaaaactcacgcgtcgtgagaaaactgatcaagcaaaaatttatgtttttttcttttttttcttgttcattaccaactgtatctcaacaagggccataagtgtgctagttaacaatttcataaaaactacggcattcatgacctggatgtaatttattgtaccactgtgaagatctgtgggaatctatcctttttttttttttttttttttttacaattggttactttcccgcctcttgtggtaacttcggatttcttgtgtagtattctctcttttttgcacatttgttcggtttcataatgcctatggcaccatagaaaagcccaatgtcgaagcaacttagttttatgttctgtttttttggttttggtagattgttttacatagatgagacatctagtgaggcatgcaaagagtgtcagatatttgcttctgtacttgggatctttaatatgggtactttctgaacctagactatcagctttctacatcaagcttgtgcttgctcagttaaatttgggaagtgggaaatttaaaagagaccgctgagcttggatgtctagatgatttttgttagcatttgactaaagaaagtctagcattatgaaggagctgttgcttccactagttttttaaaattattttgtgaccttgtgaacgccacctagagctcattgttcagccttaatattttgcagcctttggacattattctatctcaagaccataatca

SEQ ID NO: 9711 - DNA, 7572 bp, Eucalyptus grandis
  Intron number 3 from transcript Egrandis_v1_0.023625m (loc us Egrandis_v1_0.023669m.g) derived from phytozome v7.0 (c hr-ID scaffold_1; pos 31526237 to 31533808)
cggagataatcagaattggaagatcaccacgcattgtaagttccttagacgcagaggagagaaataaccttttttacaactagacactcgtttctttttctttcatttctgaactataccctttgatggttgatgcagaatacatgggggaagagtacctgaatttggaggttgtcttatttgcgggatatgcatttggtggattgctatgcttccacgcgagtttgtgttgtgatctcgaatattgcttctatctccatgctcgattaagactcgactgctatcgtgtgttacttttactttggattttatagcattatcattttgtgtgttatatcacaccgcagactatatatatatgcctgataaattggtaatcctctgcattaagctgttttagatgtcgcttgtggagatagatatactatatcatgtatgcgttgcaagcgcgagaagagcatgttctcatgttgccatgcgctgctacatcgcaaagtgacaaatatgacaagagcagctgttaattttacagctattgtcctttttttcttagaatcaatcatgtccatcgttttcctcagctgacttgatcgtctcacgtgtttacacatccaatcgcccaccacagtcttgagttcctttggacttgatttcgtttcataattgggttgagatcagttaaaaattaggctttcgagcattgattctgggagttggacatcaggtgttcgatgtctcacagagcttctatcttctatcttcatcagtagttccgaggatagactctttagccataattagaggctgcgtgtccgtttggtaggtgaggaagtacattgctctgttgctaaggcagagcgaggctttccttcgacgactccatcgggccgaactgtgcaagtccgagttcaaggccctaaaagaaatttctgggtccgaatcctaaaccaagacagagtacgaaataagtacgcaagtccgagttcgaggccttaaaagaaatttctaggtccgagtcctaagccacggcagagcacgaaataagcatgaaatttttagccctttaaatttaattggcctaaacatcaagagttctagtactaattgccatttatatactatttcaagtggacccgcatctaagtttcttgctggattttggcctgcaatatcataaaagtaatcgagaattttgcattatatcaacaattgaaaaggacaaatggtggaatacgtatgtagagcactacaataccgtcggtccattcgattttaagtttctatactctctgcgtttggccggcagttcgaaagtggacgtatggtgtgatctcttcatgtcaagtgaactccacaaagcatgcaccgggcaaaatcatcatcatgttcttggacttgcctccccgggtatttattgtcccaaagtaaaatctatcttttgctcaatgtccacttattcctcaccaagttgcatgagaaaccagataaaaagtcatctgagcctcttcgtatccaagagacattgacggagagcacgtggacgaccaccaatcatcatcgggatcgctaacgcaagtcgaaatatgctcagagccctcgggcatcttacacttcatgttgactatgacaagtacgtgcctcgtttctgattggaaagatttttttttgcttttaataatgtctctttgcttacatggggaaaatattgacttgtccccttactgacaccggatccaaaagttgggcccaaatgtaaagaaattaatgggactcaaccaggccatgacaacacactttatttttaaaaatgaattgcttgacaagctcatcgatcatcaattatcaatggataaagtttaagtacatgacatttgattaactcgaaacatgtgtataagttgaagattgagtaaaggatccgttggtcaagaataacagtagctaaggattagggtatagttagaaattggccctagagtatgcacaaattaagatagagattcttattgaaaaatagtggaattcagaatgaaatcgcttatttaaagatacgagaagaatcaagaaaaatacatagatagaagcacaacgcttcaaatttcgactatgaaaacatgaaaatgtgaatatcattcacaaaagatcaatctagattgattttgctcaagtgtgaaattgaattatgatagaaattagatttcttggtttaaatacttgtctttgactataaaagctttccatttgtattttatgtgtcttttactttctctacatactccaatcatcttcattagcaatataggtttggtttcggtcatgaagaaagtgtaacctccaagaatgtaagccaatttttgaatagctaaaatttcatgcgttgttgttttcaatttattattaatgcattatttagcaatttgagttttggcaaagcccttgagtctttcatgcatattagattccttttacttttgatagaaataaaatttatcaatatcaatcgaccatcaatcacgttcaatcgaactttgatcacttctagaaagggaaaatttcacgaataaaaataaacttattgcacttatataaattcaatctagtcaatttaatcttaaacttttttgataattttccaattgaattattctaattaattttgactggaaatcactaatattgatgttaatttttttacttaacacgtgcaacgctaatataaataatttttttgtaattttttaaaaccgttggtgaggcccttgtaccaactcccttatttatttatttttggtctaaaacgatagtattattaagaacacaaagagtaacaaccgttcgacagtgcttcagaataaataaggtcaataaaatgctgaggaggagatacagcccagttcgttggaaggagagagcgctcatgggctttggcggcccagtcggcaataacatttgcttctcttcggcagtgatgaatcttcaaattagggaaacatggccacaacgacgcattcagcgaacagagctctgttctcccaaggtgtcaaggtagggttttgcatggcttccacaagaacggaacagtcaaattccagcacaagatgatcgtttgatttccctttctgcagcagaaatttaagtgtaagaacgagcgcctgcacctctgtttgcagagctgaggaggcaatgacggtgcaggtaaagccgtcggttaattggcctgaagagtcccggcacacacgccactgagccttcatattgggctgatgggtaggcaccatctatgtttacctttaccactcccgaatctggtgcgcatcatctctgctctggatctgattgttgtaaaccctttttcggcttcgtttgattgcagcatcgaatggatccagcatttgctaaagccacccgtaccacctgtaccctcgatcaaactcaaattctcgaccgaccaaaaaaaaactcccttattttatgtcatcgaatttgacatgacaaccgtgcggaggacagagtggggatgcatcacccatttctatgtcaagctattaatatttcatgtcgtgtttggctccccaacatggagggcacaaaagcctccttccatttgccacttctctctttactaacgataatgtcgagatgggacctcagctcataaacctcgtaccaagagagtatcacaagtattacgtgaaaaaaataaagaatttaatttcagaattttttttataaggcatttgttaaacaataagattaaaaatgcgtcatctctaatacgtgaaaataataagacacttagttacatttataattaactacttaaattatatataattatttgattagttcaacacgtgctggctatattgagtaataccaaaagtttcgagctaagttctgctcgtcaagtcaaattagccttttgatagaactaaattggtgaaattaaaattttaaaattggattgacacaaatgcaataaatctaagacatagttgataatttctacctagttgaaatcgttgattatatcgctatcataaccttacaacaacccagctaacaactcccttattgtaggtatgctcattgaatttgacatgacaactgtgcgcgagaaagatgggaaatgcatcaccaatttctatgccaaactatgaatattttatgtcgtgtttggctacccaacatggacggctcaaagcctcttgccattggccatttgtcaccttaggaccgagaagatcgaggttaaaaccactggccataaacctcgtaccaagtggcccggattggggcaggcggctaactagggtttgatataatcttttgtcaataataaaatgaaaattccaattggctaaacatttataaaagaaaggagaagtttcccgagaggtttcatgaaacacttcgctcttatgtaaagataagaattatattatctttgcgacaaatacgtgtacttccttatgtacatagaaagaaaaattatgtattatatataataatttcttatgcaaagaagaccccatttgatcaccggattcgatgatctaacaaattccattccaatcgtacacatcctacttcaaagtatagttatgagacaacgatattcataactaaattctcataattgagaagtttaggattgaattaaccaccgtataataaatttacgatttttttggacaattttctctattaaagcacacatagataaggaatattgaagtattgcacatattacatggaaaaaaaaataatgaatttaatcttaaaatagtttctgaggcatttattaaataaccagattaaagatgcatcatttctaatacacggaaatgataatacatttagttatattcataattaactacataaattatatataattcttttgattagttcaaccggtgttgactatattaagcaatacaagaagtttaaatgctaagtttcttttatcgagtcagaatcactcttttgattggaaatatattcaactggacctaatttcaatatatcaaataaattataatcgtcgatcacgagggattcagatgtggcgatagatcataaaaaacgaagggagaaatttcccctcgtaaagtgctccaaacttttgtagcttttgcaaaattccaaaaaagtcaaaccgtccggcctcacttcataaagctcaacagccgttcggacgatcaacagccgttcggacatcataaagctcgccaccttgagcgatcgtgcgagagatcgagtgatcgacaccgaccccgaagtggacgacaatggagttcccatatggtcatcacactcacggacaccaccacaaacgcgacggcgacgacggctacgaggagtcccgaagaaacctgccctacccgccacccggagccaccctcccgccctacgtctacggccagcctccccctcctcctccgccgtccaacgtgtaccacacctcgcactcgcctcccccgtccgcttatccctccccctaccctccgccgcctcagatgtttcctcaaggatcaaccgagtattctgcttacccgtacccgccgcacgtggctcacggctgtggagctcttgcctcttatttcgcctacaagctcacttacaacgttttctgcaaggccaaccccaattattctctcgctatcaaggactcaaaactcgttcttgcaccctccgactccagtgatccttatcaagtatgtcgttttgctttgctttcgcctgtcacccccgaaccttgatctttggttctgtagaatatgttcaacttgatagcctttttttttacgggggtttggtctgatctgcctaatttgagcgtttctgagcttgtttgagtgttgtttgactcttttttttccgtcgtgtgagtgatggttttcattctttaattcttttggtgatgtggagtggcttgtatgatttgatttgatcagaaatggtacaaggatgagaagttcagcaccagagtcaaggatgaagagggttctccctgcttttctctggtcaacaaggccactggtgaggccatcaagcactctgttggagcctctcacccggtgagtttgtctctctagatattcaaatctgaaacctctgcaattataggatacccgttcgagctgcaaattaggataggaagaatgatctattcgcataatctgggctgtagagcagaagaaaagctcatgagactagtcataagccaaatatcactttcgtgcgagtcgtatttcggtgaccatgatacttaagcccatcatcaatctcattggtcaacagagctgtcaagtttgttctccttgttcgaccaaaagaagattgcagtcttccaattattgtcggctctgatagccaggaatcatgaccatggatgttgccttgtatcaacatgcatgatcaactttgaaaattcaggcattggattgatcaaattactagtcattcgttttagctgcgccgtaacttctgaattataatttttctgtagttgtctagattctgtgagtgacttcacgaacagaagtgtgccattctctaagttttccttagtttttgaatgacatagaaactaaggtcagtctcaaaatggcttatcgtaagctatatctgaatatttgtttatcttccgttcagttgttgtcaccacgatcctctgcttcggttcatttttggtaactgattgtcggactggttgtggttccaaaagaattcttcttgtggcataagttgtttttcattctggctgccattttagtacctttttcactgcctgaacattttcttgcgtttttgcctttatgagtgctaacgtggacactagtgaaaaggtcgaccgccctctaaagtcagcaatgtttttcagcttctgtgaaaaagcctgttagcactgagccttcactttcattgcctcaacctgagtttcatctcaacatgtgtatttttgagccaattgttgggtttggttcaactccgggaggttctcatgatttgtacataatgcacgcttcctcagcagaaaatggacaaagggttgatatatattctggattaggataaatgcacctggtgatcatacattaatgagggacagacccactttgaaatctaaggaacagcttaatttaagccttagctctctgaaaacatcgttcttatcagagctgcagatatttgtcagatataagatttgcacttttggtaatctgcaggtgcagctggtaccctataatccagagcagcttgatgcatctgttctgtggacggagagcaaggaccttggcgatggttacagagccgtaaggatggttaacaatgttcacctgaatttggatgcttttcatggtgaccaattatccagcggcgttcatgatggcacaactattgtgctctggcagtggaacaacggagataatcagagttggaagatcaccacgcattgtaagttccttagacgcagaggagagaaataaccttttttacaactagccactcgtttctttttctctcatttctgaactataccctttgatggttgatgcagaatac

SEQ ID NO: 9712 - DNA, 1214 bp, Eucalyptus grandis
  Intron number 1 from transcript Egrandis_v1_0.012373m (loc us Egrandis_v1_0.012373m.g) derived from phytozome v7.0 (c hr-ID scaffold_2; pos 46863846 to 46865059)
ctcggcgaatcccgagggccctctcgttctttgaggcgagtcccgagtcccgtcctcgatcagctcttttgctctgttttcattgccgcgcggctttcgttgttgtttgatcatttatactttgtagttccattttcgtttgcttgaaccgaattgatgaggcgctgcttagatctcgctttccgttcgtttctttttagcgcgtgattgtacagagcgtcttgtttgtgatggctttggagtgtaatggctggtgagtagagtgaatcgatgtgtacactccaatggtgggtcgtcatagttgagtgccagaattcttggtcagcttgtgtgctgaatcggatggggttgctctgtgcgtgagtattgctggtgtatagtcattttcaagtattcaagttcgtacgcttgatctagtgttccccaatttgctttcgcttggtgatggggagaactattgttttgccgatgctcatccggctagtgttgatcaaagagcagctatattgccctgtgaatgaatgagcgtgcttgttggtgtatgcttgccatgaattttctatttttttttggtaactgaggactccaccatggaccccattgcccgaacggctcctaagggccgggctcctatacctcagaggagactagcccaacaacccactaccaggcccccacttaaatcgctagcaaccgcgggggtcgaactctcgacctatgtgatgagggagggactctcaaccaacgcagctacccacagatggttgaattttatctgttgcaagcttgattttgttaatttttatccggcataagactgtgctccattctttctcttcgaacctagagtagatattcatatccattttgttggcttggcttggcatatcttgaccttggttttgatttggttccttcctccctttttgaggaaatgaatagttgacttgtgtatttgtggaaaaatagtttggccttgtcagaatttgtcaggcatgataagttctaatgccgatgcttctcatgacactaagattgtgttttgagactgtccgtctattttcatcccgtctcacacttaatcaatcatgatctctgttttccttttactgcgttaaatgatttttgatggttgatggctggtgtgtgttattccttttcgttaacaagcgactctctccttttcccagctgttaattcattaaagtttcact

SEQ ID NO: 9713 - DNA, 1084 bp, Eucalyptus grandis
  Intron number 1 from transcript Egrandis_v1_0.032720m (loc us Egrandis_v1_0.032720m.g) derived from phytozome v7.0 (c hr-ID scaffold_11; pos 37582425 to 37583508)
acgcttgcgcttcaatcataggcaaacccgaaaatgtatgttctctctactttacactgtatgctgtcactatcagtgcaatgaaaaatgttttgcaagcggctcatccattatattaaggggttgtaactactcgcactttcgttgaactccaaatcaatggtgggtgaaacgcctgtgaaattttatgcttacgttggtggtgtctccttcatctttggcactgacaaattactactgggtgtttcacttttgactattgttataaagataagcaatgctaagtacaccaaatctgatctgcaaaaatcattatactaattgatttgttgaattgaaagcgggtgtctaaatacatcatcatatcatgtcaaacacccagtagtaatttgtcacatatcttaacatatcgattttatctagtgttgcagcaaagcccggcaatgacctaattatgcagatgtattcagcaaattggtgttgaaaatgacttgttcaaatatccacttgcgtcaattatctcacttggaaagctaattttgtagatcaatatttaagggcccacatgacgaaatttttgtttttctatttctttgtttttttgttcattgtaacaggttcgaaataaaaatccatttaattacgcaatttcatttttctatttctggaatagatttttattccaaaaatagtttggagcagaaatcagaaactaaaatttttagcttttctatttctgaaacaaaagtaataaataaaaactcttattatcattcactcttatcatcacccgccgcccaaccgctgcccatagaaatagaaattttattctgttattaaacaattttccattccaaaaacaaaaattttgagtggttatcaaacacgtctctttactcagaaactcatccagagaatataaattaaggaatcaatttctggctagaaattgatttctgttttagaaattttgtcataggcgccctaagtatacctagaattgttctctgtatgtttttttttcattatttagggatataaatcattgcttaaagttttgactgcatgcatgctgtagtacata

SEQ ID NO: 9714 - DNA, 7824 bp, Eucalyptus grandis
  Intron number 13 from transcript Egrandis_v1_0.002140m (lo cus Egrandis_v1_0.002128m.g) derived from phytozome v7.0 ( chr-ID scaffold_3; pos 53813633 to 53821456)
ataagaaagtaagtacaggcagttatgtggacatgataatatgttgtcttatgccatagtctgataatgggatggttaaatttctggattatgcaggctgtactgtggtatgcagatactttaaagccgaaaacaactctggaggaacattctttaatgatcacggatgttcgatttagtccaaccatgtctcgcctggcaacatcttctttcgacaaaactgtcagagtctgggaggctgacaatgttggtgaacataatatctcattgacactcatgttttttagatttttgaattctttttgtattcaaagcttcttgcaacagccttctgatatactgaactacaggaggtgccagcctgactttaagtactgatgaaatttcaaaacttttttccacaatgatacaagtgcttatgatgcaagtgtgtttttccgggagagaacaatctaatggaagttgttgttttacataccctggaaagttacgtagaacatgacctacacttgtagctccaagcaagcagatgtacgggcatgagttaattgacaggacgctgaatttgtagttaagtgcatgatggtgaagggtgaagaagtaggtaatctgtcccttagagctgaccacagaagattttgttcttttagaggaatggagcaggactttcaagtaaagctggttacctgttattactcagatacttagatattcctgtctttggcttgttgccacttgcaacatcaataaaaaatggctttgtggtcgattttagcttcgtacccctaataggagtcgccattgttttaaaatctgaacattgaaaatttgggaacatatactattttgagttgatattatgaatttattgcctaactgtccatgtgaatggttttgcaatctgactcttgttcaaaacctagagagttgcttcagtatgtaagttctctgaatttccacacttgcttacatgagatgatcgtctcctcttattacccttgaagccggaattctagaggctgctgatattgataaactctgccatgggtactctcccgtgataataatcaagtgaagatttggctacttccttcatagatcattttgaaagcattctcttcggagctcaatgaattgctgtttttggactgcagacttctgcggcatttgttgtgtggcttttttatgaaatggtgtctgtgactatgaggattgtatttatccttcttggctcttatgcattattttggcagctcaatgtcgaggttccttcattttaccctgataatgatcatgtttcaagagtttcctgtttcggtagttgttggtcaatgtggagggcaaattcacatgtgaccttgctaagatttatttgaccgtctctgttttgttcgctcgtgatagtacgcatttagcttcatttttgttggctttatgtctaatgtccatgtgcatatggtatcatcaatggattatttgttcatttcaggctggttattctcttcggacttttatggggcattcttctactgttgcgtctctggacttccacccaaataaagatgatcttatctgctcttgcgatggggatggtgagataagatactggagcattaataacggcagctgttcgagggtattcagggtacaaattaatatgaattgtcatgctaatcttgttgctccttgtggttttaatgagatggtgcatcaagtgcatctcgattctctaaaaatgtataacttatgttgctcgtgaatcagggtggcacagcccagttgagattccagccacgtcttggaaggtatcttgctgctgcggcagataatgtcttatcgatattggatgtagagacacaagcgtgcaggcaaactttgcaggttgaatttttagtaacttcctcctttttattcggtctagttaagtggggattgttaaaaggggatattgttgctgagtgaatgattgtcttacctctagtaggtatgattgaatgatgttgtctgcaactacctttccagattctatgccattgaattgtatgcttgctactgatggctttagttcatgctctgttatcgtgttgttattttgaaatgactatgttttatttctctggttagtagaacaaaagctattatttcatctctctgccaaaatcttactgtggtgatgggagttgttttgttttttatgctagggtgtattggtgaacctattggcttgctggatataccttagtcaccttgcctaaataaagtagcattttcccaggtctaggtttaaggttcaatctagttgacagataacagtaggaaaaaagtttgtcatctaagcttgtcatctttttatctgctgtatctaagcatatgatgttcatgtatgtgtcaccatttacagatgctattttaatgacacaattagtttcaaggtgtatctcatctttcagagcattttatggtttgcatctatcttattgaaattgttactcattcaattgcacggccttttagttcaagttggcctttcttttctttgagattgtcacaattagtatttttattctctttgtttcctgcttctagtaacatgttgatcgttcccacatgaatctgaattttgataacaggggcatactaaggcaatcgattctgtgtgttgggattctactggcgatttagttgcgtctgtcagtgaggactctgttagagtttgggcagttgggtctggtagtgaatgggactgtgtacatgaattgagctgcaatggaaacaaggcccactcctgcgtgttccacccaacttatccttcacttttggtgattggctgctaccaggtaaggcgcacgtttgaattatttattttagcatttcatgtgaattctagctctgtacataggagaagtgagatataagtccatgtttagatgttcccaaattttgttaatttttaggattacataagaaattttgagcgagcttcttggggatgctaatcaggctcatgagtttctaaaatattaagtattgcctagtataaatcaggcgactttctcactatcctctgaagtagtgaaggtcgggtaattggcaacttcggaatcataacttctgaagcaggctgtataagagccatggaacagcaaaagctatgtgccttaaagtacgagtcatgttaataggctctttggacttctattgccccataagatcttggtttaattgtgctttggtctaagctaatcgaaaattctctgcagaccctggagctctggaatatggccgagaacaagacaatggctttgccagctcatgacggactaatttcagcattggcagtatcaaatgtgacgggcctggttgcttcagctagtcacgacaagacagtgaagctgtggaagtgatactttggcatctccaggtatttttcctaagcactcagattggaagactgaattcgctgttcccatcaaagtgcatgtatcttgtccttgtatcagttgcctcagtacgcccaggtggtgtcgtctcactgatactaatttagagcttatgatgagcgatgggatttaactttgtgacatttgttgctgttgtacatcaggtgatgacttcttttgtcaagttgaagctttctgcgaatgcttcagtgacatgtaatgtttggcctttccttagagaaggaaatgttctcagataggactctacatcgataattgccgtcttctctcgtttggtacttatgccatgtctcttgaacttcgatgtcatttagttttctggtcggattgaaattctaattgtcggtttcattctcatcaacttaaagggcgaaaagaaacagatttcgaggaacccccccactttttagctgttaagagcttgagatggaatgaaatatgttctggttagatccctaggaaacaagtggatccatcaactctaagaatggctgaaggtaaaggaaaaaggctgcgaggactgctaaaaaagtatccccctgctgtagcctttacttgggtattatttaccttttttgtatggattaatgccagcacacggatgatacggaatctgagcctaagatatagtacctcccttggtgattccatccactgggtgattattaaatggaggctttcatactagagttattgccttggaagtaaagcaagatttaccgtgcgaaaaatatagtggacatgtggagtggcaaaatctcttttctcgtaataactgtgtatatgttgcaatcaaggggttccactaaatcactgtagtaaacatgttttgcacgatgcgataaatgcactgtcggcatgattcgtattcgaatgtacgcggtggtgctatatattgtattgctggtgagtgaaaaagccagaagcagctgtaaatgtaacttgttttgagcgggattgaggggaatttgcaagtatgcgtggctcatctgaaatgctggtctcacggtgatatcaaattctccgctggttctatgctcttcatggggccagaacgcaccaattgcctgcgctcacatcggctttcgtcatatcatttacggcaaggcagatcctttgccgcattaggggcctcatgttgcaagttccgttctccctcctgcccggcgaagtgcataataccatcgtcggtctcctctacccgacgcgccgaccggaggttctcggatctttgcttatcgtgcctacccagcaggttatgcatgcgatgggctaaaggcagagtcccatcaaacatgatcagcctcgtctgacgattattgactgtagaaattcctacatctgaggagagttctagtccgatgatgtcgagttgatctgctgtgttcctctatcgtgacagaacatgcgtttgcgttgggcaacaaagggtttttcttttaaacaaaattcaatcgagagaacacgggatacaaaagccatgaacttttatctatctcaaaagttagaaacaaatatgtatatctatagataaattgatatcgttcttagatatgattataataactagatacaattcaaaatgaggttctatttttagtgccatacttattgttgattcagaaaatgaattgaaatgaaaagatatttcaaaattcgggaatcaaagttagaagtcctgagttcgaatgttttaaggtcacattcgtctcttcaattaaattttcatgcttagtaccaaacagaagactgatcaaactaagcgtgaaggtagtgttaggatatttaaataataagtcgtatattcatctaatagtttaagcttttacaatagttgacagtgcaccacaaaatcccacacttctctttagatagttttgttcggtctcgagatatagtaaaggtgaaaaactcacatttctcctctttttaagtataataacacttcaaaggagaagagaagtatgagggtttacagattcactataaactgttttaaaagtttaagcgattagatgagagcataacttattaattaaatattttaacactccttctcatgtttaatctgatcggttttctatttagtactaagtgtaaaaatttaattgaagagacaaatatagggtaagttaccaatgagatctgcctttggctaatctaacgaaaaggtatttaaaggggtagttaaaaagctgtaaggctagcttcccctttcccaatgggaaagaagccctttgtttctttcttatccaaaagcagagggccaagacaggagcaagaacccttggatccatcgagaaacaccgtgccatcccctgaatttggaggcgcaattattacatcttcatgcatcacccacttattccaaagattaatccttaaaagaaagagattgatttctatttaaaaaaattttaaaaaatgacttacgaaaaggaatgagtgaatgaataatttttttttcattatccatgaaaatatttacgcataatttgcttcggcggctgcgaaatctttggtaatttttatttgatcggaaaatttgtgataattcagacacaaaataaaggggcgagactatcagccgtggtggctctactgggtaggctcctacctttgaagggaaacgtcaagtgttcgaaactcttgcaattgcaaggaggttggtagatcattaggtgtattacgcgtggcgccctggtggtggattctgagctagcgtcacttggggtttacgtggcggctgtcaggcaaaaggttcgctctagtggtgggtcatgagctagcgtcacttgggtttacgtggcggctgtcagccaaaattcctccggccaaaaaaaaaaaaaaaaaacaaaggggcaagattttttttaagaaaagacgcacgaggcaattcaattcctgctcctgtgtgcctcgacctttctttgtacggggtttctctctccggaacattcgtggcacgcgtttcttggttcgttcctttttctcccagtttggacgctcacttccggagagatcgttcgtcattttacaccgtggagtgcccatttttttttccttgaattttcggttggaagtcttccatcgccttcgagtaaattggtcagtcaggtttagactttgtttttggctgatgataatctcttagcatgaattcagttatattgttcagtaatgatctggatcttcaactacaggcagatactgttggtcgctccatggatgttagcaaaggtgcctgagaactctacattaatggggaattttggtgacatgcccatctttaatcgttgttcttgaactagaattatgtggcgtgtgctattctatatgctttagattttctagggaaacgttgtcatataaattgcaacatatatatttgttcactttgttgttttctgctccaaatttagatctattgtgtgtatagcagggaaagaaatctgttagtctcatatatcttgtagacttcgataatctattgattcacatagatggtattgggattttcctttgtccttcagtctgaacgactattgccaattcatgcgctctggtgcgtcttgagcctttttttttttcctttctgaggatctgtaagatttcgtccaccatgagctcagagtttgattggtcgaaacagaagggaaccatacagaaaaaactactgaaagagtttcagaaggactaacctttgagcgacaacggagaaacgtaagtggtatgagcagaaaaaggaccaaaactcaataaactaagttacaacgaaggacaagactttcacgacaagcctttgaataatgcacagacaagataattttgtcatttctcgctatcactcctatctattaagaaggaaatgaacccaatgacaccagttaacaaaggatgataactagcctgcctttggaatcaagtgtaactttccttgaggtaaattttatcaaccgtaaaatcctgatgaatatttttagttagttaatggaagaactttgcctttagatgtccttcttcgttattaatttagactaccattctcaggtctttctaattgaggtttgatgcagaatcatttccctagtaggctgaatgatgaagtgtctttcacagtttcactcatagtgttcaaattgggtgctacagaattctcatttactgaagtgaatactattcgagcaagcgccagcaaggttacctgttgccacttctcatcagatgggaaagtacttgctactggtggacatgataagaaagtaagtacaggcagttatgtggacatgataatatgttgtcttatgccatagtctgataatgggatggttaaatttctggattatgcaggctgtactgtggt

SEQ ID NO: 9715 - DNA, 3788 bp, Eucalyptus grandis
  Intron number 1 from transcript Egrandis_v1_0.032163m (loc us Egrandis_v1_0.032186m.g) derived from phytozome v7.0 (c hr-ID scaffold_3; pos 13204344 to 13208131 reverse strand)
caagaagtggaacgccgtcgccctctgggcctggggtaagttttccgtggaaagaaagcaaaaaagaaaaccctaatccgagccgatggtgatcctgccgcgaagcctcgagcgctccgagcgcccgcggtttttctttggatcgtcctcttgtggtcggatggcgtcgtgatgtgatgcggcgtttctcctttgcagatatcgtggtggataactgcgcgatttgccggaaccacatcatggatctctgtcagtagctaacctgctcgtttctttttctttttctttttaaattttttttacctcgatttgtggatgttggtttttcgttgatttcgtttgtggcgatttggattttggatggcctgtactgaagattttttgagcaggcatcgagtgccaagcgaaccaggccagcgccactagcgaggagtgcacggttgcttggggtaagaatccagtgaaactgttgttttgttccttgttctgtgattcctgtacatcgattatacatagaagggcccaattgtgtcaatcggatcggcttttcggagtttttatatgttttgtcatgctgtattgtttttcacccgtagccctgttgcgtgtgctgatggtggaaggaggttctaattgggctatcaagtgtccattgagtgcttttcctctctcttcctagaagttgattcgtttgactcataatgcggacgtttatcaaatttcagtgagcaatttataggagagacacattctcattttgaaaaatcttgacttgaaaagagttcctgttttaaatcgaggggttagagaggtcctttctagtagaacagatggatgaacaagtctgcatgcgctatacttagcatcagcaaaatagagtacccataggagcaaggtgaattcttatcgcttagcagtcaaagtagtgtgcaaaattaaggattacattttgacggtcagagctggtaaactttaggggacaattctgggaatttttttttttacagtgcattgagactgcagtttcgatcatctcctcgaggctttgatcattatgaagggtcaatctgtcaaatgttctcttcctttcctcttgcgatccctatcccacactattaccctgtctctcttcttttctagtgtttgggtctctatctgtctttctactgtaggaggcttcttgatgatggagttttcatggcttcttcacaaattattgttttcttttcaattgattgaagtagcctgtttgtttccttgcataatgagtaatctaagtgtacaaatctcccttttgcattatacaaatgttcttttcactttatatgatggaggctccttgatatgctttatcatcttcatgaataacagaagggtagttttgttttcacatagatttatatgagtgccttgtttgcacatagattcataccaagtatagagagactttttctatctgagaccaaaattatgggagtcctcaaagttttctgaatgcgctctggtctatgatcatgtgacttctcatctttagttttctgtcattattaagtcttagtgcgttctgaatacctggctcgttaattcgtagattttagtgatgatagtcaagcccatctttagttttctgtcattattaagtcttagtgcgttctgaatacctggctcgttaattcgtagattttagtgatgatagtcaagcccatttttcacttataagtgagaatgttgctgggggagtttagagcacatctcctaatcatttgacttgcgaacatgttaacttcaactgcacgatacggtggcggtaagataagttgaaaggccttagaagaaattcagtggccgtacttctgaaatttccactcactgttatctgtatacacgaagcacaaacaagaacaattgattttacaaagacgagtggataaaagaaagagaaaaagagaggcttgggcttagagtccgacctagtggacatacttgacgagtcttcaaccaacgactgatgcagtaaaagtgaaatgcatggttgcacactcctataagatcaaaagcacattattttgtacttttaaagccaagcatactaggtgcaggagacaaaatgtgacaatatgaacccattatacgggggagtagatttgaattgcgtccgtggtccaaacaagttgactttcggatttgaagcgaagccgctcgattttttgctcttcaatctggtcattcttagatgaattttggggaaagttgggtgaatatcatgttacatttgattaagttttaagtgatttttgatatgggaaactaaacaaatggggacgaacggacgaatcgttgggccgattggaccgagctatgtctattgcgactaaatggaccgcgacaaatgaagtctcggtacttcttagcaaaaggacatccatttttcgggctctccgcttccatggattcgttctgagcttggactccatagcccctcatccgagagagagacagggaagctaattaccacctgaaaaaaacgagggggaaaacaaagacaaaagagtgaaagtacaacaaaaatatggctatctttctgttacttgttcttttttaattacctttttggtctttacatttgtagcgagttgatattcctactatttcaatttcctaatttatagatttgactaaattgaattaagaaaacgtgagatacaaaagactcggaaactttattttaaaaaaatcatggacaatatttatattaatatgagcacgagaaacctaagcataaattaatattgtggttaaatattcttaatgaaaattcttatttttagaataaatagagcatattgatataactccaaacgacattgcacgtcgagctaggatttaagaattaatctatatcattttcccttactttttaccgcaagccgtatttatattaatataagcacaagaaacctatgcataaattaatatattcgttaaatattcttgataaaaatacttatttttaaaataaaaagaatatcaaatcaatatggcttttaacggcatagcacgttgagctagaaggtaaggattttccatgctttttaccgcaagccgtactcagaaagccaagtccaaatttgctttttctttacccaaaaaattaattgcgtcgtgccgataatatcattacccactaaaattttcttaatcactcgcatataatgagtgcacttccattttaatatcaaaaaattaacgactgaaatagggggagtttgaaaaaaaaaaaatagggagaaaaaaatttaaaaaaagggggtaagaaaaggtaaaaaacccgaataagttggcggacttccgtcgaccttccagaacggcacggtaacgaggaaaaaaaaaaaaaaaagcgaagaactgtctctctctctctctcttcgcttcgcagttcccgatcggcgatggcgactctcgattccgacgtccccatggtccccgccggcgagggctcgagcagcggcgccgccgcatcctcctcctcgtcgaagaagccgaagcggttcgagatcaagaagtggaacgccgtcgccctctgggcctggggtaagttttccgtggaaagaaaacaaaaaagaaaaccctaatccgagccgatggtgatcctgccgcgaagcctcgagcgctccgagcgcccgcggtttttctttggaccgtcctcttgtggtcggatggcgtctgatgtgatgcggcgtttctcctttgcagatatcgtggtggacaactgcgcgatttgccggaac

SEQ ID NO: 9716 - DNA, 8264 bp, Eucalyptus grandis
  Intron number 1 from transcript Egrandis_v1_0.044949m (loc us Egrandis_v1_0.044949m.g) derived from phytozome v7.0 (c hr-ID scaffold_8; pos 27954729 to 27962992)
aatttgttgattgcgataaactgtctattcacgtgcgaagttaacgctgcgatgaaattggtctatgtgaagcttaaaaaaaatggtggagatctattcgtccacacacggtcaaatttatgcaacaaattaccctttttgtgggatctaaaagcctggttaataaaatgggagtagagtttgcttcaatgaatgtcggttgaggattggctcagacgttactcaatttgctgaagttatctataaataagatcaagaaaaaagctaacaaagaatgttgatgaagatatcacatagagaggaatacatataaaagaaacccccgccccccaaacaaaaaaagaaaaaaaaaaagaaaagagacttttaaggcacaatgttgtaccacataccataaaaaagacagttgttatattgaggggagaggatcttcgctattaaatttgagctagttgcaattgattatgcacatgatctatcagtccacccattagaaaatggatgtgaaatttgaaatttgacacagtaaaagtcatattttatgacgttttacaatatcatgctcttggttatgacggactgtcgcaaatttttatagaccgtcgtaaataaaaaaagtactcaaacttgcggcgttaggttattagttacaggggaacgttgtagacctttgggcaccgaagcgtagatctaaagttgatggtgaagatcctggaaagaagtaaagacagaaggcatgacatattggatgtgatgtggaattggaataatgtatgacgacattatgtttgattgacacatttggcttttctggaacacggaaatattattgatgtttggattggattatcaatatgatatttacctaataccaatttcaacaattttataagggctttctttaccctaagccaatcaattaaccaatcagaaatctagcctccaatccggattttatgaaattattgtcataaaatttatctcccctgatcaaattcatcaataattcagttaacataatcaacattgaataatatatgtatcgattagacatctaactaacatcataaatgcgatatgtaatgaagaaaagtttcatgtgaaaatcattaactcttttaggcaaccgatatacaagataatattactaaagatcttataatattctgtgttttagaaggcaatcttttttaaaatccttcaaaaaataatcaaattcaaaaaatataattccaaataataaataacatatttgagtgatttctttttaatagtcaaaattaaattagggttgacattgacctaaatccatgatgttttaggatagagctgaaaatttggttcatgtgaatataatgtgtattagtctttccaagtcgtcttagtcaaaatcatggctagaaagagttgcgcgacttttacttccctaggaaagttgaaaaaacattaatgtcgaacaccactacttgtatttaccgagctcatagactagcatcttccactaaaaggagaaaggtggacttaattagcttctttgaatacttccatttttttcaataataataataaaatgaaggatagaagaaaatttttcaaatttgatgtgggaatgcacttggatcaatgcaaccgaagttagataacgtgaggaaaatataatattaacaacttggacaatacgatgtaaacatatgcagatgactctcaatttgccagcaaattatctttcttcgcttttcacttcttccttttatctgaaagtgacgagcaaatattcacttggctcttagcgaagtgaaaaaagaaaaaaaagatatgacaaagatcaagctaatacaagtgaagtataatgtcttaaagtctaagcatgtattacgcagttcaagtttatccaatatggatcaaggtcagagtgtctggttgatacaagtatatatcaattcaggtaatgttcgggggcaaattttggttccaattcttaccgcatctcattttaaggggtgcttactatcaacgtgaggaacctgtaacagatttatcaagtaagctcacgattttatattaaacaaaataaatcaatgactgaagaaaaacaattttgcaccttagagatgtcaagatcaaattgaaggaaagtgggctggaaggtgattgctagtgtggcttgtgaaataaattcttagaattaaagacctttaagcaagtgtgagtggacaaattgtgaccatgtaggttctgcttcgttttgatatcttccatcattttgttgattgagaatttctgttgtctaaaaaaggtcaaagataatctagatgtactttagtgtctattatacaatcacaaaataatttcctaccttctttccccatgagaaatcagtgtaatttgacaatcatgtgctgaagagttacgccctacattcatgttgtctctaatttcacttccttgtgtgacgatagaacgacttccatgctctagcagaagtttctatttgcaacttgaactttaaatttcatgtcttcaataattttttagcctgaacccaatgaccttctttttttttcttttctaattataacttccaacgcgtatctgaatatgcatgtctctgaatatgcatgtcttgttcagtttgacatatttatcgaggataaataatatatggcctatcttttggttggacttcaagtcacgtggtataaggttatcattatatatagttggagtgtaaagttcagtccaaattaaaaatccaagttgctttggtaatcatatctagagtctaacacatagttcaataacattcatggaccccttgcacttcacatttaacaaagattcatgcacgtggtgccaccacagatctcatagcgccttttttcagtataatgacaagatattaattgattaatgaattgattagtgtatagtcgactaatcttaagatacatcgatcatcactcacaaatttaccatatagccacagtgaagtgtttttttaataagatcaacacttcattatccatataatagaaagaaaaatgaagggtcgaaaaataggagtcatttctctgaaaccaaaccaatcaatcaatcagaaaattggcctttaactaggatgggatgatactatggtcatagaaatctatcctatgttgagtagtcaaatttattaacaattcaatttagcaaaaaattcaacaatgaccaaagatatgtggcgaagacacatctaactaatgtgacaattgtgatctatcatgaagaaatctttttttttttggcccatccatgaagaaaagtttaaggggcacattgtcaagactcgtacctgaagtgcgctccaatgctgaggtgtcggctcatccttaagcacttttcttaaaatattctttgtcgacccacacgaaaagcaagcaatgcatctgaatatcgaccgtatacagagaagatccaatggtgaacagactacgctaacaaagtaccaaattttagacaactcactgctcactgttaatcacttccgtttcccgattctaatgacttctttttcttccaagtgtaggagtcacgatgtcttcctaagtttcaaaggcgaggacgtccgcaataactttcttggtcatctcaacagagctctagagcaaggaggaattaacacttacatcgatagtgagaaactggggaaaggagagcaaatatcacctgcacttattgaggcaatcaaggaatcgcaaatggccatcgtagttttctccaagaactacgcctcatcgaagtggtgtttggatgagctggtagaaatcatggagtgcaaggagaaaagaaacctagtagtctttccggtgttttacaaagtggaacctagagaagtgagaacaccagggaaagggaaaggggacagacagagttatggaaaagctatggccgagcatgaggtcaactttgggaaggattccgagaaaggggacagacagagttatggaaaagctatggccgagcatgaggtcaactatgggaaggattcagagaaagtaaagagatggaagaaagctctttcagacgttggtagcttgtctggatggcatgttactgaaaatgagtacgtgacaactcttctactacttcaattagtttatttcttttgacaattgattttctctaaggtgtgggatcctataaggtaatttgccccatctctcttgcacgagaagcatgctcatcaaacagtcacacagcacagagaaaacttaacacaaaacacgaaacagagcaccatgtgcgagccgttcgtcctctctgggcctccactgattctcgacatgccgtccgattgctcacgtcccaacaccaccccagccgcatcacctcagcccctctccatctctctgtgtcaagcggctttaacctatgatctgtggtttcaagcccagatcggtggtcgctacctggagcggtggtcgcctgaggctggctcttatggttgagactttcctgtcttccatgtcagagggacaagaacacagaaagtgggcgcagcggtgatgggcacgtcacggtggcagggacatgacagcggggtgaacgcgatgacagcggccagagggcagtggcaaattgagatatttgttaagaagaaaagttgcacaatattcaaatataataggtttcttcaatatcaaaaaccacaatgctagatgacggattcccttaaaaaaaaagattaactcaaaagtctatagtaagtatattttcgtggactttggctttccaattcggacaagcagtaagaatacgaagcttgcactcccctgttccactccatttactgtcagttggagggtctttcgtactgctgaaatgcctctgctccttgttgaggtttcgagttatcactcatcacttgcagaccaagactaaaatcatttagagattaagaattgtaaagaaagctttctcttcttatttcgcctctcctttcaactggagggatccgctatatacatacaaaagctggtgcttgtaggatgttgccagcttacttctacatttacaagcggacaaaaacacaagtgagctgccttcgcctatacatataatatcccgtctaacttacggggaatttcttttctgcctctacttgacaaatttcattgatgtcaacattttttctgtaaaatcttgatcatccaaatttcttttctagtggttttgtacccgttttgtccatttgaatcttttcaatcttatctgaacgcttctcatccacgcattttctcttcttagaaaattagtttttttcacgtctagtgctgctgacgtaatgggtgacgtagtaaccactccatctggaggttgaccttgggcctcttcttccaaattgggcgtgattatctcgttccctttttctcttcaagtcgctgatcttgggtttgggagatcttccagacttcagaatcatcagccctgaaacataagctctgttctctaggccagaaacttagtgggcagatcgattactccctcattttctctcttggacttctttttatttaaagctcctataacccttgagaatgatgatgaattaccacgcagatgatacttttgtttgttgcctattgcgtactctaggacagctttaaagaattcgatttcagtggctttagtgataaaaataatgtctcactgcatttttatgtttgtcttggttttgtttggttctgcaagttgttgagtacccatttctgttaagacatactttatttcctttcatcatccagttccgttaatcgtgctggtaacaatcactgtagtatatctaggaccacatcctaggcagcttcaagcatatatttccaacggatgaagttcactaacaaggtgtgcatagcctctgtcagccttgattgagtctgcataccctgcttctccaagtgggagttcagttttcacttatgttaagtttctagcttagtcatccttgtcattcccaatggagataaggatttagaccagagaggtcttaaagaagtgtctgtctcttgaatctattatagttttcttctttcttaacgtcaaatctccatggagtaaagctttagtcatggcaagaatacataccttagcttttcattatttgaggaacgcttctccatttgttttgcaaaaattgaaactcaatttctagaatctttaagtgtgaagcaggatcttttaggagaaatgtttatgtgtctatccttaatccacttgagactacaaaaaaataaaaaataaaaaaaattataaatggttatggggtctactcatttaagaatttgtgtctcattatatactattatttttacagtagttcaaaaattctagcaaaactcattcttttaactctgcatagattttagtacctttcccttgaaagccgtgatcaagtggaatcaactagtagatatcaaaatttaacatttttcatatttttcatgttcttggttttttagcacaagattcaatgtcaagttttttaggaataggattatgattctcagggatcttttctcgtgatttattttatttccatctagtacaaattttccgagatcttctccccgtaactttattcgagtcttacgctcttcgtccttgattatcgttaggattttccctacgttgttaatttccatcacacgtattgctttgctaagaaaagtaccggataaatggtaggcatttggacaattgaaggaaaaacaagacaatttcaatgaacgtcgtgaagagatcaagacaatgtcaatcaaatataataaatccaatagttaagtcgagtcattattatttacaaaatatattatcagacaatatttagaataacaggaaacatagtctttgacccacgtagacacagacatctttctggttgaactcatttgggcattcatctatatttggattggtttcttactcagcgatcctctttgaatatttattcatttctttggattgctctaaaagcaggtcaactaatttttccttgcagacatgaagcgcgtcttatagaagctatcatacaaaagatatcaattcaattaggtcgaacaccattggaggtagccaaacatcctgttgggatagattttcgagtagaagagattaaaacaatcttagatctacagtctaagggcaatgttcggatggtgggattatggggacaaggaggggtggggaagacaacccttgctaaagccatctataacgttgtctttagagagtttcaaggttctagtttcttggaacatgttagagaaagatccaatgatttggttcatttgcaaagagaattgctgtcagaggtattgccagggaataaattaacagtctacaacattggtggaggaagtcgattgattcaagataggctatgtaataagaaagttctcattatacttgatgatgtcaacaatagacaccagctagatgctttagctggaaattgtaagtggtttggcaaaggaagcagggtaattatcacaacaagagataggggtctgttaacttctcatggtgtacattcgcgtcatatgtatgaagttaaagctcttgaaaatggtgaggctcttgaactttttagaaagcatgcttttccagagaataaaaaaatagaaataagaagcgaccttgttgataaggttgtacattatgccaaaggcctccctttggctcttgtggtgttgggttcttttttgtatgatagaggagaaaaggaatggaagggtgctttgcaaaaacttgccaaaagtcttgataaagaaatcaatgatgtgctaaaggtaagtttcaatggattggacaacaatgaaagagagatttttctcgacattgcctgtttcttcaagggccagagtaaagagtacgttacaaaagttcttgaaagttgtggttttgagtcgattggggtacaaattctcattgagcgctccttgattagtgaagagaaagggaccttacaaatgcatgacttaatacaattaatgggtatgaatattgttaaagaagaatgccatgataatctcggaaaacgcagcagactatggctttgggaagattttcttcgtgttctctcaggaaatgcagtaagacttgtgaatgtataattattcatattttattctcattattgattgtgtttactatgttacaaagtaaactaattatattcaaatgaatatataggtaacagaggcgataaaagccatagttttgaagcg

SEQ ID NO: 9717 - DNA, 763 bp, Eucalyptus grandis
  Intron number 2 from transcript Egrandis_v1_0.017595m (loc us Egrandis_v1_0.017551m.g) derived from phytozome v7.0 (c hr-ID scaffold_7; pos 50336000 to 50336762)
cacgggtaattctcttccctatctaggtagattcttgggcgttcaacttaggaaggaacgcattatcatggtcctcagggatttaagatgatgttgatgttgctagttataggatttaggatttggagttttgatgcgctgttgggattttttatagatggatataagaagtgcttaaactgttgtttgagaatcaatttgtcagatatatgccaaggtcagatatttctgttagcttttatagtcttcactggtgtttcagtatcataattattgaaaattatttggattgttacaccgattaagatacttggggttgtggacaaaacacgaagtacctttattcctcaaaggacatgtcatgggcagaatttgagtacagtagtgctctgcttgggcatcacttcttttttatcatcatgttgatgaatgattctcgaacaaaatcattcgtaaaatcataaggacagatctgcttagtttcaagtcattcatagcttgacaaaagtttttcttgcgtcacttggtagttggtatgatgttgctttttgggaaatcaggtgcatattatttatcacctacatcagaggtttgtaaatagtactcttggccaacttgaaatcaagagaacgtgggcagaataagcttcttttaaatttgtcgatcttattatatgtacataacaacaagaattgaaaactaagcttatctaaatctgtggattacagacactttcagctcctgatctgcgtgactctgaaat

SEQ ID NO: 9718 - DNA, 2126 bp, Eucalyptus grandis
  Intron number 3 from transcript Egrandis_v1_0.044803m (loc us Egrandis_v1_0.044803m.g) derived from phytozome v7.0 (c hr-ID scaffold_11; pos 24690799 to 24692924 reverse strand )
aagtcggaccttgactacatctttcagaagctaaggtacattattattatctctggttgcattcttattgtcatgacatgctggctaataattggttgtctggattttttaagctttaagttatgatatgcttcattttaaaatttcttggacaaggacttgataatttgttgtccaggagtatcttcacttctcagggatgtttcaattgtgtgtaaacaactattctttttgtagttaattgagggtatactgctgaaatgtctccaaccaaaaaaataacaaaaaaagcaccataaggtgattagtcatttggttcacagctgatatacatattgcttgacaaatcattgggaacacatgcctgctgtacttcattcggttctttgctttgttgtatacgtcattttatcctggccatgtgatctaaatgtttgctaatgttcatgctgggagtcaatttcttgtgcctagttatgtctgctcctgatatttccactttcttttagtaacttgaagcccatttattgatgaagatggtacttcacaatcactcaaaacacatttaataacttcacatgacaaatcaagcatgtttaccataaagagcctataaactggtattcctcatcatgattgctatagtatctgtgttatatttgctcacttttacgactttgctgtcaacaaattctgtaaagaatgcagatttcatcagactattttgggatatcttcttgaaattgctagtcatgttctttaaatgaattgctaggttatgatcaaggtactcactctggtctaacttcctattgacactaaagactaaagcttagattttctacttagtgtcatttaagttgatcaacaaaacatacatgctgggatgggaagagctgaccatgcctaggcgttctgtatgttctgccttcccaattttcaaggaaacaccagttcacatgtctgtctgtgcttccacagtgaagggaggcaacggtagagttgatgattaaaattaaggctttgtttttaccaggtaatgatagggtttcatctgtttctggatcgaatatctgctgataacttggggatttgatgaaagtgcattgtccatccttaaggttttaaagaagggattgataacgtaaaaagcatctttgagctgagataagttgtttatagtacaatactaaattaaaaagttttgaaagaaaaagcttataattgacagggaaaataaagttcattttacgtgatagtctgatatgcaaatgccactatattggtatctaagtcgtactccacttttattaagttcctggatctttttagctgtcattcttctctcttaggtgctgttgattgaaggtagtggagtggaatggaatggaatcacggtcattggagtggggttctttcaagtaggattcttatcgtaaaatccatgtttaccttgcataataataggacatgacttctttgtttgattttcaaaaatttcatgaggagcacaagttcacagttctcataattaataatgaatataagagaacttgcaaaatttcacaatgagtatgaacatatagggggcagccaaaattttgatgttatctttgattttatttttttagtggtaactgatgaaatagataagctagataaacagtcatattgaccttcatctgaagtgtgcagcaatttacgatgactacttgcccctttatacttgaattcctactgtacattgcacatagatttggttggagcttgtcaacttctttctgcaattaaaaagatgaaacctgttgtattttgatatgagagaggagatttctataatggaattacgtaatatcttcaggagggcaatctgatctcaatttttttgtaggaatcccatttataatcttagttgctcagcacatttttgacttgtgattgattattttgggaccttctgtgtgtgcttcatatacctagaatcctctcagatatgttaggtaatgtttcttccccgattctatggaatggttgcctccgatgagctcttgaggttaaattaaagatcgttttctgcatgtcaatgaactgatctaattttcttttctttttgtaacgccaggagt

SEQ ID NO: 9719 - DNA, 551 bp, Eucalyptus grandis
  Intron number 32 from transcript Egrandis_v1_0.000231m (lo cus Egrandis_v1_0.000231m.g) derived from phytozome v7.0 ( chr-ID scaffold_5; pos 67363085 to 67363635 reverse strand )
ttgaatcaggtgaaatagtgtcatctttttaatgcaatacagtatgtgggaaatattctggttctcctttgtcccatctgtcaatgtacttgctcttgcatgcatatttgctgggggagctccatgtgatctgtttgagagctgttatttagttatgttctcatggttcaaagagtatccttgacactttgtgacatatcatacatatgattgtctaacaagatgaatatgtcagtgctcaagcaaaaaatattctttgtattacatggatttgttgcctttgggattaaaagattcttgatcttcttctgagagtggacttctgtgacaatctattgctacagtcattatagttaaatataattggagtataatagttctgttcaataagttgaatgctcagaagagattcatgttgcagcctccatcttgtgcagtaaactattagttaggttaagtagatctggggaagaaagtaaaattagcttttcaactacatatttgaacataaagaatcatgtatggtattctaggtaactcagaagatccag

SEQ ID NO: 9720 - DNA, 1130 bp, Eucalyptus grandis
  Intron number 2 from transcript Egrandis_v1_0.049647m (loc us Egrandis_v1_0.049647m.g) derived from phytozome v7.0 (c hr-ID scaffold_4; pos 26114249 to 26115378)
cgcagcaggtatgtcatttgtttttgagatattggtgcatgtatattatgtgagagtataataggacgtagaaaaatgggataagtaatctttttttgagatttagttttccagaataactacgacaaacaattatttaatttttcaatatggaatggatatgtgatatatgaatacctaaaaacatttataagcagttaattacacctcatcttatttgtgttatgctgtcaacattgttaaaaaagcactgtacgatgtatatttttttttttaaaacaatctagaagtatatcattgctttaatgggaaattcgaatatgtatacttaaaacatttatggatatatttataagttgaaggaagtatataagaccttaataatttttaagacctttatttgataatgaatggacatatgtagaattgtattatatccgcttgattaaagtgaaagaaagaactaaaaaaaaatcaacaggtgaatctaactacaatgtgtcaaataacatccaatcaattacttcttattttgcaattataatcgtaagtacatgagcattagagtagtttacacgatcacatgttccgttatactcttatttgttagatgacggaactattatgcgactacaaatgaaaaatcgaatatagtacgataggtcaaattgttttctaattcatgtaagctattggaccttttgtagtgatcaaatctaccccaactcttggttctcaccacttttctaatattaccagtagaatttatgtgcgttgcacgtgtgtaaattccttttttgtaataaaatattgcttgaaagtattatttagaaacataattaacagtcatttatgcactgtcgctttgatttaacaattgctttaactgttcggttagtataaataagaaaaccctttttttcaaattattttaaaaattatttttatcatgtgagccaaattgaaaaagcgtgatgtcaactaaaatcgtatgctgaattaagcatcttttttcttggctacatatataaaattggccatagctcccagagcagttttgtgacttaagcgggcgcgggaggggaggggggtggggctcggctggtgggttgctgggctagtctccactg

SEQ ID NO: 9721 - DNA, 1153 bp, Eucalyptus grandis
  Intron number 8 from transcript Egrandis_v1_0.014066m (loc us Egrandis_v1_0.014066m.g) derived from phytozome v7.0 (c hr-ID scaffold_1; pos 3670076 to 3671228 reverse strand)
gaagactccttggatagataacccaggtaacttcctttttttggctagaaattatcgccggcttggtccatttgtctctgaaatctaaatctggaagagacaggagaatgtcagcatgtgtcagataatcctaaacaaccacataaacattggatcctgctagtcatattgtggatattctttctacctttctataatatgtttgtcttatttatggatcctaatttgagaattgtgtgctgagcatagttctaaatcccacccctatcacagcgatagtgctggttgcaggcattattggggctgttgcgcaccctaataattcaaacaaaaaaagaaaaagaaaagtatgaagaagaaggaggaagacaagaagacaagaagttcccactctagagagagagagagagagagagagagagagagagttacatagactgtcttcccaagaaactttcaagcctcgtgtccgtctaattttaacacttacttttccactccacttctctcagttgacttaaaatatagaagaagatctttccttcaatttgaacttactttacgaataatcataaacccaagggtcaagttgtcagcccatctcatttgaagtcaaaattcaagaaaggaagcgttgattgtctcagattaaagaaagtcagttcaattaccatgtagaaaagttgtacatgctcaaagatttgtctagcctaattaatattcgacatataaagtttcaaatccatataattcaacttttggcattcttatatgctttgaaaaacactctaatattcctatatgtcacaaatatagtaatattaaagctacaaaagttaatttgattctatgataattgtgtaaacattatgaaaattcatgctgctatgaccacagtcagatattggatggccactatgcctgcatccacaactatcgcagcatgaccacgaccacaatttaaaaccttggttctgagcatcttgtgttttgtgtcgacttctgagctattattttatgaatgaccaaataaatggatccttctagtccgtgtagctttatcttttaaaatagaagatacaattaagccattccatttattatttattctatatatcgtgattctctgttgttactgctgcagagtttgaag

SEQ ID NO: 9722 - DNA, 2990 bp, Eucalyptus grandis
  Intron number 2 from transcript Egrandis_v1_0.025466m (loc us Egrandis_v1_0.025466m.g) derived from phytozome v7.0 (c hr-ID scaffold_4; pos 31675076 to 31678065 reverse strand)
aggaactcggagcaaacgattcgcagtaagtttgttcgctttactttcatctagtgatcatttgattcttggacccttaatcatttcgccccttgggtcttttcaaccattacagtatgcacgatcgcgtgtgtttgattgatagtttgtcctgtgacatgtgcaccacgtggcgtcgttttatgtccagccacccagtcgtggctggtccacataaaagggcgaacgactgagattgactactaataatggccgtccccttttgctttaagttggattccactgcttaaagaaaccgtacagtatggtttccacttctttccacggggaaaaagagtaatgcctataaggaccgattttccgcgacactaggtggccgataaatttggattggagggcacgtcttatctaattaatagcgatgcgtttcatgtgttggactttgcttatctaagataagattctcttcacttgtaaaaagaatgaatagttcgttcttctaaattttgcttacaacacttaactatctagacagtgtacgagtacaatcctgtgcattatgtttatggattaggttttgagtgcgctcaatatatgtcgtctcaatccaaatgaactattagatcaagcatgtcctgtgcggggtcaattgatctcgcccaactgtacgtgcgagcttatctctagcatggcgaatatttatttccacgtgggtgaccttttctttttgatgatttttgctgaccgtactggtggataactttagacaatagaagaaggcatcaattttacacattggccaaaagggaaccgagtcattttgcgttgaaaaatcacagctggtacgagcgctctgaatctttgataagagccacttctttttattcccttgaaaagagcctgacgagagacgcatgttagatgggctcactatatataaagtaattcgatggaatatatccttttctcgagtttccgctgttcttacatgacactttattattaattggcgttgtttaacacaaagaagatgcgaacagggtcgggacctttcgatgccaatgttcaaagtcaaacgcaaagagagttattagtaaccaacgtttgttatatcatctaataagagcgagtcggtaactactttaaatgattctacatcagtaactccactaaatgattctactatttgattctttaaaaacaaatatcttcccgtgttaataatttttcgtattagttaccgatcatcaaattttttggtatcttattgtaaaattatggtcacttttatgaaatttccaactcctctttacaatacctattttcgttaacttttaccatcttttacttatttatcttaacagcactttcaatttaccaacccttatataaatttactagtcattatttgagttgctctccgacttttatctgattgaatttgtaacaaatttttaattaccaactattattggagttgcctgctaattcttatttgattcttttttttttagtaattttttttttatagtttacctattattttctcttctttaaacacattaaaattatcggctttcacattatattcattaactattatatgaactcacaacttttcacctatagcttgtttttttaaaagaaatgtttgtttaggaaaaaacataaaactgaaaaaggtagaataatggagaaaataaaaaagaaagcatggaaaaagccaagttgatcggacaggtagtacttggtaggttttttttttttggtagatcaaaattacttaggttgaaatgaaagtatttgcatatatacaagaaaacctagaatttgacttagatagccggttacatgttaggaagggtaactttctcatgagacctattcaatacaataacttttctgttgattaagttccactttgattcctcattcaattttgtaagtatgaattaatcagatgcagatactaattttttttcttgtattaaaaatgtcaaatttttaaaagacaaataatttttgataattaaagtcatttcgacaactttaaaatattgagatatatattttccccggggtaagtgatttttgggtgatttttgggtttgatacttcgcgaagccaagcatgcaaaatattttatacaataaacttaacaaaacatactcaaagagaattgaaaaagttacatgagttttaaaaagtgaaactacgttcaacatttttttctagatgagtctattattaaggaaaagagaagtgaatattttaaaatgaaggtgaaataaatacatatatgaagagtagaaagtgtaacttgcaattttcctaaaagtagttaaattgttgatctaaatggaaaataaaccaaaataatatatgaggtgaattgcgaacataaaatgaaggaatttatgacataagggcttgagtgagcgaggcatatccactcccaagaccctcctttcatctacctttatacagacatacgcacatgaagatagtttcagcagtcaagtctctctacatagtttcagcagtcaagtctctctacacatcaacggctctaacatgattttaactgaaattatagaaggaaatcctcttcaattcctgacattagctaaaggaaaaaagtgcatgtcgtacggcctcctttttgtgtctcaataaagaatcttaaacattgatttataaaaataaaaatatatcaaaaattaagatttgtttaaatatgaaagagagcacaatacaagatagatgatctcatttaagaaaattaaaaaccgatttcttggagtcattttttaatgactgttaacctttagatcacctaaatttcacttgagatccatcaccattaacaattcgcacctggttcgcacaagaatttctcttttttctttattcgagcaaagctggcgtagcgtctcttctctaaccatgaatatgacaacaggtgttgcgtgtgcttgggagagttcgaa

SEQ ID NO: 9723 - DNA, 1034 bp, Eucalyptus grandis
  Intron number 9 from transcript Egrandis_v1_0.018327m (loc us Egrandis_v1_0.017099m.g) derived from phytozome v7.0 (c hr-ID scaffold_6; pos 52297129 to 52298162)
caattacttcaaaggatctaataagtgtctctggggtagttattatatacttaactttctgaattcctggtcattcattatcctttgatatatgtatcccaatagcgtgctactatcagaaaccaaggttatatcaaactgaataattggatgacaatcatgtgctgtctttaaacatgaaaagggaagtgttttttcttcaggaaattaattttgattctctttttccaaagtgatcctggactcctttgcctttattctggtgtaacaatcataatttgcttgtgattttaatatgaaaactaagatatttgttcttcaaatgagtaagctatgtagttttgtttgtctgagtcttttataaaccatgcgcccaaatagttttgtccccacaaagcatccgtggtagctgcactttcttcatcctaattggtcaaatggactttaaagattgcttgaagaatacaaaggatcttggtttatgagtattgggtccgattctatgacatggttggaagaggcctgagttcaaggcaaaggatctccagcttgtataatggaatcccgcatgatagtgtagtcctacttttggtccctcttcaatccaatttgggaccaattctgtagcattcaggatatttctatgctagctgcatcttagaatagtattgttttataaactggatatctaagcaaaagatttccttttcaaatgggaacttaaaatctgggacaatatagcagtgatcctttgctaggaagttgttttccttttcattttcctttttgaggtgattatagtcttctggtcacgtattctagtattaggatttataactgctggatgctagacagattggttttagctgaaggagagcactttctaactgttgccttcttgtttttattctttcgagacttattatctctgtttcctttctttctcatttttccatctcagaatcacttgtatatgattcctacatcttaatttatcaggtaatcccacaggaggttgtcggggcacttcttgc

SEQ ID NO: 9724 - DNA, 1005 bp, Eucalyptus grandis
  Intron number 1 from transcript Egrandis_v1_0.027135m (loc us Egrandis_v1_0.027135m.g) derived from phytozome v7.0 (c hr-ID scaffold_5; pos 3471508 to 3472512)
aatccggaatagtaagccctttcggttatcctccatcccccccccccctttcaaatcgaaccctcgacgacggtcggtcgtcggtcggtcgattatcttggccccttcttgctcggtcccgcgcaattcggtactagattagatcggcgatagcttagatcgtctacgcgagctggattttccggtcgcgcgttgtcggtgatgcgatttttggccgacggttgatcggcgacggcgttctagtgccggttcggagatcgggaggcttcgggtttcagatccgttgacctgatcggtccatcctaggctgatagaatcgtgcaggggtgaggatgttttgtcttcgatcgtctaggttgcgtgagatcgtgtggcgattgattgaattctgtgaaattgtgggggacacggtttgtgattagaaggattccggctgcgcgcagctgggattgcgattggctcttggtgacgatccttcgaagagcggaattgagattcctggcttggtttttgccggctgccaagctgctgaagtacttgctattatattgataagctttgctgaactagaacatgcggctaatctgcgcgtagaagtggccggtggctgagagctcaggatttatggacatgcatttgggcattcttggcaaattagtccacgatgctgatgctttgatagaccagatatttgtccatgattatgattggtttcttccagttttgtcacccttgatgcttatctgattcgttacatcattcttcattgtgctgagcacttggattgacctttgtttttgtagtttatcgtcacgctagattgggagtggatgacattctttgatttagagttctgcacgtgcacagttattgccttggaatcgcgcacaatatatgcttgtgtgaaatggactgatctctatcttaaacctttatatatgtgcttattctcgtccttgttttcatgcagtgactatttgtttaagcttttactcattggagatt

SEQ ID NO: 9725 - DNA, 1873 bp, Eucalyptus grandis
  Intron number 1 from transcript Egrandis_v1_0.011845m (loc us Egrandis_v1_0.011102m.g) derived from phytozome v7.0 (c hr-ID scaffold_6; pos 30334974 to 30336846)
ttcgaagggcctcttccgtttcatcttgaaactgggtgagtgggagtctagtgccgatccacgaggcttttgttgatcatgcctctctcgtcgctcggaacgatctgatccgatcctcatgaactaaacgccaatggtgtactcgagtgggcgagtgctactgtcgccgttgtcgatatagaattcctgcgttgcttcatagacctttcattaccgtccccaccagaccaacacatggaacctccatgctctaggggatcgtatgctatttaccattagtaatgacccaactacccatcccaatccacatgagccaagtacctaaaggaagtatcggtggtgccaaacgtacttatgaatcattctccattctcctccactacaagccccatgtagactacgccccaaaatgagtattcaagtgatgacatctaaagttcagagtgattggtttcaaggtgggtcgacttggaaactaatatctggaacataccctattatagcctataggtcccggttttgaaagactggaacaaggaaccaaatgaattatacctggaaacaactcagaaccgaaccagccagtatcacataattgatattatacattatttgttttggcttattattggtaaagtcttattagttgaggggtcttcgatacctgctccaagttggaggcttggattcacttttcctttgcatctttctaaatgtttttcaataaggtgtataagaccgattcgagacaggtacaaagaaccgggcaagttcttcccgactcggtcgctcaccctattttgaacgtcgtctctacttgtgatttgttatttactgtgtcgcttcccgtgaataaattgggtctcacatcaaagcactcatatgtgtcttaaagtttttttcttgatcattttttatgattgattctccttaggtaggtgcaactatgcatataaaccatcacattaatttcgtggatcgagtcacacataagccatattcaagtgagatcgctgagcatatggagttctttttatgaggtgtcagaattaggattgagtaattgagtcggtctaacctgagaattgaactaaactgacgttacccaactggtcaaaattgccgtttaaatggtcctttttaagaaatattgtgagatgcaattaagaagaatgaaatccacaacctctagtttgaagtaggcacacaaggccactcaattaacaagactttactaattataggctaaaaaagtatcatctaatatcaattatgtgatttttataaaataaatccagttcttgatccacttatacagtaggtttgaggttttagtctcgaaattaatccaccttgaaattgatcacccaagtttgaactgtcaaacttctgtcatgagtttaacccacacgtccacgttgattctttaattggtacacccaccccatggattatctctgaatttttataccacccaatagttttacattttcaagaaaaatggggtttatgatgcttaaaatgggtcaaattcatcattaatcgagcaacactaagcatactaaaattagtctacaaaatgaatataccaagtgatgtggtaggctgcaacaaacatgtaaacaaatgagcctcattccacacttataacaatctgccacatcacttaatatgtcaaccacgtattattagtgtagataacatttcttctatttgtgcaatgttatcgaaattatgctgttcatatttctcattcgatcgacatgcctcgatcaagctcccaacgttgacttcattaagcctatcgctatgccagaaagcttaacgggtgcagacttgatcaatatgaggtgctttccccattgaatcaggt

SEQ ID NO: 9726 - DNA, 752 bp, Eucalyptus grandis
  Intron number 1 from transcript Egrandis_v1_0.025653m (loc us Egrandis_v1_0.025653m.g) derived from phytozome v7.0 (c hr-ID scaffold_8; pos 1467468 to 1468219 reverse strand)
cagctcgattctgggcttcagttgcagaaggccaggtaaattttctttttctcctttcgggtcctctttttcttggtagatcgtgggaagattgtgtagtttggccggggagtgctggtagacctaattgataatggagcatttctctttcccctgtccagaatggaatgaagcccactgtcggatactgcacctgttcctttctcggtgcagagaatagctttgcttgtccttgttttcctgatgatttgacctttggaattgtatttaagattcaacggttgtgtgtggatcgtgatagcgcggcttatcagttactctgtccctgtggatgattttactgtgtcttagattctgcttccttgcgcaaattgacacttgaagcccccattgtccaagagtgagattccaaatggatgccattgccttctgtgggagtctaatctgaaattgcatttggattcagtatgctaagcaaaagaagaagaggccaaaaggatctgctatttctaaggcaaattagttcccatttccaaacgttctcaccagagtattttagggaaaatctcgagggcctggtctggcacttcgactgaggttctcaaaagcacccgatgcaaaatgtagttatgctcatagttcagacataaatcaaaattttgcaccttcttaatttttacttgagcccgattgcataagtacttcaacgatttgaaacaattctttggttttgatcctgcagcttttaagga

SEQ ID NO: 9727 - DNA, 1254 bp, Eucalyptus grandis
  Intron number 4 from transcript Egrandis_v1_0.008616m (loc us Egrandis_v1_0.008616m.g) derived from phytozome v7.0 (c hr-ID scaffold_3; pos 28932077 to 28933330)
atatactatcagctatcttctcttcagaactttcggtttgtattttcctctaaaatggtgtcttttttgccttgcctgaaaacaataattcctttgtacgcttctgtgtccattacatgttttcattatgggagtaactgtttgtgttgaattaatgatggatggaccatgccctgcttattattttgatgtgggaattggatgcagaatgtggtgcttagtttgacagtattagatttggataaatgcacaagaagttctgaaacttgtgtctgaaatgcaattcagttctacaacttttcaaatagccaatcaaatccttaattttgaaaagaaaattaaatttaagaaattgagtcctttcattgcttctgttagttaaatatgaggagatcctggtggcacttgaatgagtaaattcttttccaacctctagttggataaaaagatccatttctttgagaaatggatttcttattggtcaaatgtaataaaaatttcaagctttgtttgtagttaaacattactttcatcaagactcatgtatatggtcattaaactttatctaggatatagaagtcaagaaatctttaatattcttagaggaaaaacgaagcctaactaaccacaagtctacttgtttgagttgactaagatggactccattgtattgtactcaaataggtatggactgctatcccaggaagaaaaaaaagagctgtgccttaatttttttctatccttttagtttcagaactgtcaaaaagcctcctggaaaaaatgaaaagagatcctcacaaagcctcacaaaaatggctttgctttgggtctcccatattggcatcatgaatttcttgtcaccattttgttaagaggtaatagaatgttttgattggattttaaagttaaaagaattaattgctgctttgaaaattgactagaccgaattgagtatcatgtttcaatttgaggagtttagtgcatttatctcctaaagttttgaggatttgtgcatttacttggattttgcacgattttagattctctgaaaatgctttcatgccttatccattaaacttaacaaatcgaaccaatctggtctatctgtccttggtctaattgaagacaataatgtctgcggccatctttggcattatatatccaccaattatgtaatatttccatctgcagtgtggtgttctgcagagtgatgaaactgattctggttgtgttgggattctcaggcatcgcttc

SEQ ID NO: 9728 - DNA, 2979 bp, Eucalyptus grandis
  Intron number 3 from transcript Egrandis_v1_0.031780m (loc us Egrandis_v1_0.028052m.g) derived from phytozome v7.0 (c hr-ID scaffold_6; pos 43303963 to 43306941 reverse strand)
attgcaaaggtacgtactcattatcttatcttcatctaggatgctgttgcatcgatgatcactaactgttggacatatgtgctgtagcttcattttcccttatgtccttgtcttatattccacttcgagatttctattacgatgaccttataggtgtttttaccctccatgattttcccgttccactagacttttctttacttttttatgtttttggcataggtgggttttaaaatgttcctaggagttactgcctctgtgaccaattgggatgcggatggtacctgttgcagtatagttttggaggataatcccttggttgactttgtcgaacttccagatacatgtcaaggtctatattattgcaacatcttgagtggggtcataagaggagctttggagatggtaagctctaatccattatcttacttaaccttggctcatctcgtttttgttatattaggcgtgaccttatttttgtttacttgttgctgcttttggtttgttcaaaatataaacaaatcttggatagtaaactgagttcatcctcaatcatatttcaatagaaactacaaagaatctcaatgaaattatatctttgttgtttttcctgaaataagagcagccgcttcttgttggtgcttggccttactggttaaagaactgtaatttccgaagttggcaactgaactttcgatctttccttgttgatttccaccaatcagcttgttgttgcctgttgcaatttactggaaagatgatgagttgtgaatctgaagcaggaaaccttcagtcaatttccttatttaacaaacttatgtagtgtatatatggtttttatgcttcaaacgtagtgcccagaaaccttttttatttgtttagagaagattagctagaatgttatggtcagagtatatatcctttagcttttcgtttttgctatctactccaatttcattttttgtttagataatgacactgcaactacaagtacatgatcttttgcccgttttacaattcagtgccgaaacttctttttttgttcaatcaagtacctcaacttttcaaactgtgagtcaatgtgaggcctctgttagaattgcagtaggaaaatgccaatgtggacaccaccaccttcaaatagccattaacagtccatattggcatccaatgtggcctcttaagacaatggcatattaacagaaacatattgcaaagctaaaatcattcaagtctctctctctctctctctctctctctcccccttcctccctccctctctccttatcccgcaacacctaaatgaagttggtgcaatttttgccaatgaagcgaaccacgtcataaatagtgtttagctttgccgaatgcgtgagccacatcagaaaaatcatataacgtggcaatttattagataaatgtctcacattgattcacatttgaaaagttgaagtatttgattgaagaaaaaaaagtgtaggtactgaatgttgaaagggcaaaattttaggtatttgcgggcttatcacccctttctaactcgatggtcaaaaaggatgctatgaaaaggatctgtaatgttttgtcttacattagagctaatggttgaggatctttggaatttaaggcctcacaaaatctccataaccttatttcactcttaagtttctggagatttgtactttgacaagtcccttccagtatatgtgatattactttgtcaggctttcatgcagcatattaaattcccgaaaatccgggccatgtctcagtcctagtgtggctaattatcctctcgtaccggctattgatcatcaccttgataagttgttgcctcagaaattagctagtcagatgtgtgcccctccatggctggatttctcctcgtgcttctcagtctatggggcattagcagttgtttccagcccttgttccctcccaagggcaggttcttaagctttactctcctgtttgccactagaaacaccatgttcggcctgacttgcatgtgttaagcatgccacctgcgttcatcttgagccaggattgaactctctaagagatccctacttgcattacttatggcttgttttttattttctttttccatggaatataagcaagcagctagttagggaaaaaaaccataaactaaaggaagagagcaatgaaacatttaaaattgatgatgaccgggtgatttggtttttccctcaccaagagctccaaatgaatacaagagcacagcgttcaagtgtttgcgttttttaaaagaagcagctcaacattcctcaacagctacatgccattaaacaagtgctttataaatgacagagagcaggcaacacgcctcaacctgtccataattaagaaagtgcagttcctctgtgttctcctgtcaagatgatgcatcactcagtggtccaacatgaaagaagctcaggggagcccttgtctgccaataaatggaatctgtccatgataaaaattttgttttcttgaaaacttacggcatttttgattctttaaaacatagttgtttatgttcttattgagacttcctcccttgacacttggatgctggtatgaggatggatagcatgtgctatatgttatttgaatgccaattgtcacattgtgcccgttagattgaggtatcaaagctgctgtctctgagtttgactctaagctgttccatatcaagtatctcacattagagacaatgttacttcctggatcctggatattgctttggcagattctgctgtatgatatctggatttgatatagatttttctcctggagacttggttaaaagtagcattttaagaggtaggcatggcaacttgagaggagccgaccgtatgtgtttttttctgttgagtagagatggcgatgttactttatgccacacatgttctttttcgttccctcttttctgatggtgctgaacgtgctacctcctttgttaaggtttca

SEQ ID NO: 9729 - DNA, 2626 bp, Eucalyptus grandis
  Intron number 1 from transcript Egrandis_v1_0.046094m (loc us Egrandis_v1_0.046094m.g) derived from phytozome v7.0 (c hr-ID scaffold_10; pos 7370080 to 7372705 reverse strand)
taccccttcttcctcgcgcagcttgcgaccgtcgggtcagtctctctctctctctctctgtttctggcgatcgccctctgcggtgattaacgagcaattaaacgagcgtggaagtagcgaaatctgaaacgccaatgcctccatttgctattgccactccaattcctttctggaatcaagcacatgcatggccgagctgtcgcgtttatccgctgccgattttccatttccggtcgccctcgacattttctcgtgcccttgttctcggggatttcgttatcgcacttgcatcaactcttcttctttttattatacgagaaaaaaaaaattcggcgtccaaaaatcagaaattgtcctgctaacaatttcttctgttcaattttcggtcttaaaaaaggctttttttctttggccaaattattaaaatagtgtcgactcgagcagaagtgcatgctcttttatgggtattttgcttttcaagtttcgaattctttcttccaccaatctcaaaatcttaaaataagagattttgattttaactgttctcgaatcggtgcctttcaaagggcacttctaaccttattttaatcgggcattctttttaataagtatagcgaactcgtatgcgtagaacacgaccgtttttcgaaacgggattctgttttccgaaaaagtattaatcgaacataaagaaaaattgaattttctttacatttctgtactccccggaattttttaaacagtcgattggatccggaattgggtttttaggaacaaacggacaaaggaaacaactagcttggcgccccctaacggtggcgctggtcgggtcttttgtcgtttcatcggcgggagacgtggacgggggcacctcttcgaaaatgagcagaccgctgagtcgctgacgcgagcgctgagaaacatcgatccctcttcgctggaaaaatagatgagagggatggctaatgatgcagaaagcatggataactacgaggcccaaggattgaaaaaaatttataataccggcgacttttccaggattttgttagcaagtatcgcgggatatatcgtcgatttctacttaaggaaataacgtaattttttaattgtacagcccctgtcgttgtagaaaatctatttatttatttatttattgttgagtgctcttgacaagcgtttcaagaaacgctccgactgccgaagaagaaaagagcgagttggtcttttcctccctcgagccgccggagttaccgaggcactttccttccgtcccagctgacgtcagcggggccgcgccagcttggtgcatgcggacgaggatgacggcagcgttaatcgttctttactagtttgtagctagtgccggaaatggaagggcgggaatccgatctacaccacggggcaaccgtcgttgtcgggatggatttttttttttttttttttgtttttttgaacgaggtcgggatggatttcgataccttgtttttttcactccattcataacgttgcggcacacgtgttcggacatctcctttgtccggagcacacggggaacttcgacacgtaatttcacgtgcaattctttggtattgtcgatcatatgataatattataagggagcattagttaattatgttgaacggagaaagaaagatagggaatcgggaaaaggtgaagaagttcgacaaggaggcgaaaatggaattgtagaccatatggtggccggtgggggccatttttgaaagggagaacgacggcgaggatgcacagaagttcagggtccggggccccactcgcctggaccgagagctttagatttagctttagctatgatggtcgacggaggatttccgagcggctgagcgtggggccgagcaacagccgtccgcggcgcgccaccacgcaccatagattctctttctttctcctcctctttttcctttttcctttttccgtcgtgccctctttggaacagtcttttcatgatcattttcgtggtgcggcgaatcattgcttcctgaatttattataaaattttctcctttactgtatagtctcacgatattcggccgtttgccaatttccttttcttttagtttcttcccggggtgggccaggtggggaattattacactcaatgattggggttggggggggggggtgtcgtcctggattttttctctcatatttttggtcccacccgagaaatgcattggaaccgagcgaagttaggcgttcgttacccttgcccaggatctttttggatgtaaaacgaagttggggttatgctgtgcacgaggattgacgacagagagatgtctctgggtaaaagttggagctggggggtgttatgggggagtcttgtttatgtgttagaccttggacaggaagaattctttgtactgccaaaagacgcgcgcgttatcgtcaccaagcttgtaaaatgtaaagaaataaattatactccgcgaaccaatcctagcgtggcgtcgatttactgatcacttgattcgatgtactaccgtaatcttgtctgtttaggatgttgtcatgtctcttccaacacggttgtttttgcgcaatgagatctcattgtatcttgcatttaattgtttattttccaggt

SEQ ID NO: 9730 - DNA, 7449 bp, Eucalyptus grandis
  Intron number 2 from transcript Egrandis_v1_0.021465m (loc us Egrandis_v1_0.021465m.g) derived from phytozome v7.0 (c hr-ID scaffold_9; pos 1004161 to 1011609 reverse strand)
ggccgaaccgggcagccggaactgggtattggaaggcgaccggagccgacaagccgatcggccgcccgaagacgctcggcataaaaaaggcgctagtgttttacgccgggaaagctccgagaggagtgaagaccaattggatcatgcacgagtaccgcctcgccaacgtcgatcgatccgctggcaagaagaagaactcaagggtaattaccgtctttcccttcttctcgctgtttctggtgtccccgcacgtctaattggacgagttcataaaggaacctcgatgattaacgtcgatccttgatatttttgcagcttgatgactgggttctttgccggatatacaacaagaagggcaccgtagagaagcatttcccctccgcgctcaacaaaacggcagagtcccccgaaatggacaccaagccacagatcgtcatgctggcggcgctgaacccatacacacctccacaaatgactgtagatcacatgtacatggactcgtccgagtcgatgccgaggctgcacacggattctagctgctgctcggagcaagtggtgtccccgaacttgtcatcgtgcgagaaggaagtgcagagcgaggcgaagtgggacgattgggagaacaatctcgacttcatggatgacttcttggacgatccgttcccgcaaggacagttacagtcggatcagttctcgactcttcaggacatgtccgcgtacttgcagaaaccattttgaacaagtccgttcagtaacgcagaagtagaatttgcttttataggagcctgaagcattccattcgcgttggtacgcattgacaagatggactgattgctcatgtggggctaatagactagagttagtcctaggatttttgcttgttgccagagagaagcaaagcgttgtgcatccagtagcacggtgaaaacaatttgaccagctctaaattggccaggtgacgacgcggcagaagtgccgcaatcttgataggcctgtatagttagtgtttagcatcatgttacctcctgtcgtctcctgttaatacctgatgaaagtctgtagggaacttgtttgctgtaagattatagcaacattgtttcaatatttcatacaacaaatattattttaattttcattgttgatgattaaatgaagttgaagaagggatagttctatggtctatcaaaagacagatcttcggttgtaaaatattttgtatatttattgtaactcatatataaattgtcgtcacacgcattcatttgaaaggctttaggatggatattcttaggaatatatgcttttcagaggatcatcaaggacatccttcgaaagggattgctcatatttaagatgctagaaagatagtaagtcggcttttaagatcggcttaccaaatattattgacagtctcttgttgggtaattaaaatcataaaaaaaaaaaaaaaaagagagagagaagaaaatggaaaaagaaggtggaactttgtctaaagaaaataaataaataaaatgaattgaagcacacggttcatttcacttggaccgaaccacactttccacgtaaaggagaaatcatatattgaacgtgatgcgatgcttggtggcaacttttcatcgtatccaactcaaaacgacaaggacggccgacatgaacaaatgatttttgcaccgtgcatggactcatgtattgttgaccgagtcccggggcttcatttattatatgaaaaatgaataatttcgataaatattttaattatttataaaaatatttaaatataaatgattatcgataatgaaaatatttcttaaatttattatttcaaacagtacaaataatttaaaatatatattttaaagttttttttatttttcataaaataaatagaatctaaaaagtgctcattttaaatttgaattatcatgggttaaaactaaggatgagggttctctgtatttgctcgtgccctatgaattgtctcaacttgttccatcacaaaacatgtcaactagaagcatttcaatctccaatacatttattttttccgagactttaatgatgcggtgtagtgcgttggatttattaagcacttcccagttctatcattcccgccacatcagcaaaggggacaattagcgaccagaacaataagactcgattgtttcaatcaaatcagttgataaattcgacaatatccaaaaaattaggaaactcgatttagtgatttgtcagaaatagaataatagcatatctttctagaatttattaatggaataagcaattcgaaatttgtgaaattgaaaatcgacccgcttaatcttaaaatcaaattacaacaaaaaaaaaatcttaaagtcaaattgatctaagtcgattttcgggtgggttcaaaagctgctgatgatatctttctttctttctttttccaatttccttgtaagacttcatatgttacatagtttagactacaaaaggaatgttgctaatctaactaattgatagcttagaattagagcggggagatcaagagttcttaattgcatcaatgaatagtaaaactcctagaatgacgaagcatgcgtgcaagtccgcatgcgtgcaagtccatgcgttgttcatactatgtctaagagagaacaagctcatggttagtacgcaactcaactttaagaaatattttgtaataataaaaattgttaaaaaagaagaaggtattggtctattcccaatggtccatcagaaaattagaaatcggatcgattgtaactggtttcaaattttaggaactagaaattggaccaatttctccaagaacgattaactcagtagattccattgctcactctggttgaattaagggatgagacaaaagttttgagggttccgacgattattagtaagccatccctgcaagagtcagtcgacaaataggaggttattgttttgggggggtcctcgtcacgcgcatccctaattaaggtcatgcatgacgtttcctatacaagacgacaacttcattagtaccacaacgcgacgcttccctgcctattttctctttctttcttgcttttcttttttaagacaaagtttagtcatatttatctaattaagagtaagggtttgttgctagtgcttgcatcatatatattaaaccacatatcttggatgccttattagcctttactctcttttttttatacttattccaaatcttaccgcttacgcattttaattctccttaaatccgaaacacttatgttctcacaaaatttatattttcatatgatttgtacataaatttgagggatgtatgtattagaagttctgaaacttgttacgaaaatgccgttaatttctaaaacttttaaagaatgcaattaaattctaaaatttatcacgaatgtgctattaagttataaaatattcaaaaagtgtaattaaatcctaacacttatctaatttattttatcaagtccttccgttgacaagttttaggatttaattgtattttttgaaaattttaggattccattgtactttcataataagttttaagatttttaatgcacttgtctctaatttcaaaatttcggcaaatattttcaattttggttggaagacaaaagattgtacattttctcttcactcacttctaaacaagccagcccattattccttttttgtgacttgtgactcatgagcaacgatgtatttcactaaagaaccacttcgaaagcaactagtaatcatgctattgatgcttcatagcacgagcaattgacactttcattacccaaaatttgtttaatatatatttatattttatgtgcaaccgtggtcaaatgctgtcaaaatcccactaccttctggcgtagtttgaccttcaaaataaagcttattaaaccatccctgctaattcgccggagagactacaaaatcgacctttctttgacttcattgctatctataaagtaggtcatatagccatttgtgctttgatgatctataatctatcctatatagccgatttggcaacaacctagtgaaaataagacgattggccaaaagacaaagttaaaataaggagagaaagaaataaagaaaaggacgcatgtacaaatgcgtttcatgattgtgagttatgccactaaaatttttagtcatcccaaccgttgatgcaagtgaacgtaatttcattttcaaaatttgcgatttgggtgtaccagtacatacacaatacgggtatgggaatacaagatgttcgacaagatgaattcattttattaatatactttccacttgccactccatgaatattgtggatcagaaagttttttaggcatatattaatgttatttacatatttaaacatagtcccttcaaaggttgagatcaggaccttgggatgcatggcacggcattattaccaaattaataatgttacgcttgatagttatgataaaattcggaacatgataaaatttattatatcctgtgtttggtctctgttgaagatagaataaaatcgaatataaaatggatataacctagataaaaatatctcatgggggtgaattaaggtggatatgatttctctcatggtatcaaagctattttttgtcaataaacttctcaattaataaaattaaaataataattaatataagtaatatatgaattctaataaaaacggaaattttcatttttatcttttcctatttttatttatatatttgatattctttctactttataatatatgtatataaattatttgtatttatcacatatattaggtatactaatatagtttattatataatatttatataggaacgatggatgggaataaaaaagaaataaaaaaagagatggaaaataataaaaacaagtaaataaaaatgaagtagaagaacccagattttaattgagtaaattcaaatttgaaaagaatcttcctagttcttgacgaatgagaggcaattagatttctaaggataacctaccctctccatcttcttttcgtccatatctctaattcatattgaagcttcatgattcagatgtaattctttagttcacgtccaagcttgatgaaagcgacaagactgtcgaagctccttctccttcgtagttctctaattcatgtcaaaagtccataaagtcgcaagagagtttcaaactcattctcctccgtagctttattttcacattgaagtttcatgatagcggtgagagaattggagtcgatattttttggaatcgctaaggtggataatcatgttttctctcttttactaagattttgcattcgttggttgatctattttgttaatgttattgtaacccgtttacatttctcgtcataatcgaatctatgtctctataatgctttagtgagctattttactgttcattatttagatcttataattgttatgaattgattgatggacacactatcatgttgttcatattagtaatgagtgattttaggttccttactagtttcatgaagaatctagaacttgaaacctacttgttggtataggttcttcattttttggaaccaaaaacctatcctatcataggttctaaggttagttctacagtctaataggctccttcatttttgtttcatttttagttaagcaaaacgaaatgaacgcatcaacaaaaatgaaagcttctcatttgtcaataacatcaattcataaaagataaatacgtaaagtaaaataaataataaaaagttcaaaacatgtacataaaacctaaattatagaacttaatcatcaattatctacgaaaaattgctcaaaattctaaccagttgaaataaaaagaaacgacaatcatacttaatcacttaaaaatagttttaaacaaacttaaataattatcagaaagcatcaccgcatatattcattccgcttcgactagtaaactctatttattgatgataatctcattaagacaattcatatctagaagaagaagaagaagaagaagaagaagaagaagaagaagaaaataaaatatacactcattagatatttaaaaaggaattacaatatatagagatagaaatgagaagtggaaacaaaacacatcgtagaaaacaaaatgagtcgaagaacataattagggattttagggttcccttcttggttttggttctcgaattgggaatcaacggttcctaaaaaaaatgaaactacgagttagaccatcttttcttataaactagaaccagaccgatttccactagtctaaatttatcataatacgatacttgcccctattttatatgaagcaatagatatgatatactatgaaaatactagattttattattgtgattcatcaaacagtaagtaagtaagatatagcaaaatttattattttagcatattatcttattcaaatctattctcgttagaaatttagttgattaaacgcagcctaggggttttaactcaacgaagaggcaaaagggcagtgggaccaccgttcgaggagacccgagagatcatttaattaatgttaccgccgctcctctctacccattcaccaagttaaacaaatcagctgacgtacgcaatgacacaaattaggaggacctcccacacgtgttggcctgtgattggacaatcgactcaaatgtcatggccgccgtcaccacttgttgctgaagaagctggggttgttgcctttcctgccctcctctgtaccttttcgatccagatgcagcctgtctgtctacctcacatgtctgaattcattcccattggcagagttcgtgtctgtatataaacccctagtcgtcttacgtttctgtgtccattcgagttcgagaggtgaacaagttcaaggcttgggagaaaaggtcgcggaggaagacgaacagagtcgagaagagagagggagagagaagatgaagaaggcgcagttggggttaccagcggggttcaggttccaccccacggacgacgagctggtgaaccattacttgattcgcaagtgctcttctctccccatctccgcccccatcattgccgagatcgatctctacaagttcgacccttgggaccttcctggtactttcacacgctctccaggctctgttcctgatcaatttctgtttctgcttgcgttcattttggtgaatcatcccattctgggaaatgggtcgacgagttttgccacttttttggtgattttcttgtgaaaaaatccattatttatttggatttattaatgtaagggcatgatttctgatggagtttggcttcgaattgcagaaatggctctgtacggcgaaaaggaatggtatttcttttctccgagggaccgcaagtaccccaacgggtcccggccgaaccgggcagcgggaaccgggtattggaaggcgactggagccgacaagccgatcggccgccccaa

SEQ ID NO: 9731 - DNA, 1022 bp, Eucalyptus grandis
  Intron number 4 from transcript Egrandis_v1_0.022300m (loc us Egrandis_v1_0.022300m.g) derived from phytozome v7.0 (c hr-ID scaffold_8; pos 51078582 to 51079603 reverse strand)
ttgcactggtatccgtactatcactcttgagtcttctaactggtttttgtcgacaactaaccacaccactcgacttaggaaagaaattcgctggtgaagctacttcatttatcaattgacagttaggccattaagtcattttggtagatgcagctaacaagtatcttttagtaatgcattactgagaatgagatgaggaaaaaatggatgtcgaatcagatgaagcaaggacgggtttgaaatttgaagttgcactaatcagtcctaagcaccacaggcttttcttttcagaagaattatgacctacagaaacttcatgttcaagccacctacactgaaattgcttctaaattaagtagtttgtataatcatttgctgatcaccccataaaaccttctcatggggccttgtagttgtgcctctttatgagttgcgtcaaaggaagcggaaatggacataacatagaagtacatttgagtcaagttgacaaagtttgtgtcttgaactcaactgaattaacgagtactttacatcagtttgattgagcttgcttttgagctcagtctacacatgataaattgttcttagatttggagtataatatataatagaaacacatagaaatttcgactgcatgatttaattcatgaggagcttgagtatatttctcttacaaattaatcaggtcaaaaacctctaaagatcctaaccaatgatgctgctcaagattcaattctttcttatgatttagattctgggagattacagatctaagatatgggatgggggttcggaattcaataacaatggattccctacactacactaattcatatgctaacagccttcttgttatctctgaaactttcctggataatatagcttggctgactgtaaggtcgtgcctagaatctcacaattctagatgtttatccattcaattccctctttctgagtttagtgatgtactccatctttcacgtacaggatttatctggccgaccacatttaagttttgattt

SEQ ID NO: 9732 - DNA, 1604 bp, Eucalyptus grandis
  Intron number 4 from transcript Egrandis_v1_0.015278m (loc us Egrandis_v1_0.014302m.g) derived from phytozome v7.0 (c hr-ID scaffold_8; pos 16568369 to 16569972)
gtgacaccttttttgaggcaagccttttactactgtactccttttcctctcctaccttccattggcatcattatctagcaatggccctgtacgctgtagatattgagactgcttagagccttgtgctagagcttgtggtttcttgaggactcgatgcaatacaattatgcagctttttgtgcatatggagagcttttgtttagtccttttattatccatgtaaccttgtcaggattagagtttcctgccgattgactttcaagaatacttttgggtttcatgatgttgacaagtgcttcctagtagcctggaagcaagctaccggttatgtttaaactaaaatctggtcaatcgactaggtttactgtatagaaattttacttctaaaatttatgggagtgttaactgttaagcatgacatatgttggacctgcattcgtcattgaactttgtggcttagcacgctggaccatgtatttatcaaagagagtgattcaattcgctgaagtattctcattacaattgactcaacagatctcttgttgcattctttgtggttgcattgacataatagttcaaaataaaagaaaattttcacctacagtgaataataatttgacgtgcagcaaggatatcataaccgcatgaaaagtgagggagaatgtttaagacctttgttcaagttttctttttcaaggaagaacatttactgctcaatgaattgataagttcccatcttcctaacatttgaggattaaaggaatgtaaataatattttactcagaattttgttgctttgtattttacgaggtgtgaaccaaagggaaaaataaaaccttcgtgttagccaccatgaaaataacaaaatggatgctaattagttggtaaacatgtcaatgatattcaaggagaaaagggattaaaaatcaccaagtgattgggggggggggggggggggggaagggatctggtaataaaaaaggaagaagttgattttaaaaaaagagaggtctgacaagttgctagctagtagctaggctgttgtgttggagagagaaatatggcttctcattttttatttttttgggctgaagagagacagttggctttgatattggcaacgtgatggtacagtaatgtgtgggctgcaagttgggagggctgagaacctaattgttcaaaatggaaagcccaattttcatttgatcacatggacatgtaaaagaatttctttaggttgagtggcccatggccccttccagcctggccctgcatcaatcctttgcatacatgtgcttatgtgattccttgagtgcgtgctgtttgctttctgtgaacgtactcttgtcatagtcatatgttcttgggagttgccaaagttatgctaatgaaagattataattaaccttgacttttgatatccgtagaatctacaaagacatttttaatgtactgcattccttaaactcgaagctatttttattgaacttttctggactatcagtgggcagttctgttttatattcattctgttatgccatgaatatttaaattgtgttgctgctacaggttgttttcacaggagggcgtacacagcctggcac

SEQ ID NO: 9733 - DNA, 893 bp, Eucalyptus grandis
  Intron number 6 from transcript Egrandis_v1_0.043130m (loc us Egrandis_v1_0.043130m.g) derived from phytozome v7.0 (c hr-ID scaffold_8; pos 55507036 to 55507928 reverse strand)
ccttttctctcagctttattggacagagcggtccagaatacttttctaggcacctgttgcacagtcccagaaatggtacccaatccaaattcatgtctcattgattctcatttccatgacaagtggtgattcttgagagttgaactttactgcagagtctgattatacaaatgtttgtgtggcctatgatacaattataggttgcatgaacttttgactataccttttctcaaagtattggtagcaagtataatatcttctcccaacacttttaaatgatttaaaattttactttgttttctggtttcttgctgaaaattgttttgagccaatggtgacatcatgcctatgcgccgtggtcctttttaagatttagtttctcctttgctgtttatggcagtaagttttgtagttcagagggcattttcaccatgaacctaggatgtttttgttattaggaggatgtgactcaccccacaaacatccaagtgcttcttggggaagcaattaattgcgcctcggttgtaaatttatgcccaatctcactgttacatattattaacaccttttttttaattgtgctgggggtgggtttggttttgttgtttgtggggtttggtgttgggaaaattatggatgggatcttggcagagttgacgctagaccttcaaccctcgtggagagaaagggctattctattgttcacctttgtatgtgaaatgtaatatatggttgttgattcaaagtgttttttcctccttttaaaagggccattgatatattaatattcaagtaatttggctgtataatcatgtgtgctgaagctggattttccagactggcatttgcttgatttacttataaaaatgaaacagttcatttccaggtcaatc

SEQ ID NO: 9734 - DNA, 5512 bp, Eucalyptus grandis
  Intron number 1 from transcript Egrandis_v1_0.016968m (loc us Egrandis_v1_0.016968m.g) derived from phytozome v7.0 (c hr-ID scaffold_9; pos 31366869 to 31372380 reverse strand)
gatttcagcaaagtccatttcaccaaacgaaccaggtgtttgaacactctctccctcaggcgtattctgtgtacgagctgttttgtcttttcttttttcttttttttttaatgaaaaaagccgagaatgggccatgaagtttgaatcacgaaaacacaacaaaactgggataagataggatgctgctgagtaaattgacctagatgtatgtacatcatttctctgtcatactgataatcatggtggaatcggattggaagctggcttttgatgctgcacaccaaccgttttctcaaatgcccaaaagaagaccgaaattctttttggatgttggagcttgaaatcgattagtatctacgttcatattcgttgaatcttgtttgatcattcgagttttccttgtttttgtgtgatttggtggaaaaatcttgctcgagttggtcgcgtaaggatttcccacgccggaataccccgccggagttactttccctcgctggcgagcctctgtccatggttcaaggctactcgagtcagcttttctctctgtcttaacgttcttgtgctggtttgtttgctgatgttgttaatattagaagtttgagttccgggtgatgttcatttttatgttcggtggtcgccggaacagaaaatctgaaaaggtaggcaccagtcggtgggaacgaccggtcggtggtgttggccggcgatgatgtagggcggtgaccggcgacgagatggcggtgctgtcgagtgtttctcgacggcagaggcgagtagcaggagttcggccccgttggagggggagcagaggttgaaggtgattctgggaagaagaaggtgcaggggaaaaggataaatagagaaaaagacaaaagagaaagtaaagaaaaatagaaaaatcatttaaaaactagaaaaattgaaaagtatattttttgttttatccgactgggtcagatccgggtttgggttgggtcaatggccggatcgggtaaaaggtctggacccgttccccccaatataatgataaattaaaaaaaattcaaaaataataatactaattaaaaaattcgggaaaacattaaaacatctgaaaaatcagaaaattcataaaaatttagaaaattcggaaaatcattaatgttttttttagaaaattcagaaaatcattaaaaatcagaaaatccggaaaataacaaaaaacttagacaaatcaataaatatttagaaaattctttaaaaaaaattcacaaaaaattagaaacccttagaagttaaaacctaaaattagacaaacttttagagctttagaatagggttccttgttttggattgtcttttctttttagggataattttaggatacttgtatgttttcttttgtgtttataattgattatgtatttcaatacttcaaatattactatcctgctctaaaatggttaggacgaatcttagttctcttttggataggctgtcatgacattagttagcacacaattaaataggtaccaaaagggcgttattcagactaacataattaagtcatcaagtaaatagtaagatatcctctcgtatcttacttgatttctagccaattgaaaaagttagtggcgactccttagtcaaaatttacataagcttaattgattatttttttaaacgtttgatgtcgtatgagatatgggcttaagggaacccaataggaaagcgtgccaggattttgtctcctaatataattcattagaaacttggaccaactcaaaatttttttaggattgtttttacatttcctcattttttgacatttgattcactaagaaaaatgattgaacaacaaattttttctagtcaatgaaaaatctatatttaaatttcaaaatttgaccaactaaaaaaaaattattaaattgattgtcaatttctaaaaatataactagacatagatgtttggatttggatttgaaacttgacacttgggcacaaaaatctcaacggtagttcttgaatcttgggcgtccaagaccaagtcttcgacacatagacctggtccatcgaggtcaagcttgaaaccttgctggctaagccccggttcgtgatgccaacgcttaagtccattaaagttgggcctaaagcctcggtcctcatgcttgatgccagcacttgagcctaggtccaccaagatcgagagtgggatcttgatacttgagctcgaatccccaaaacttgggcttggatccacaaaggctacaaccaagttcacaaaggctatgcttgagtccattgtggctaggtttggggccttagtggacatgtttaggtttatcaaggttgtgcccaagatcccagtgcccgtgccttcatcccgacacttgggttgagatccctcttgtgcttgtactcgatttccccgggtccccgattgcccatacacgagttactagcatctaaataatgtgtttatttaaaaaaatcaaatcggattttccataccaaatgatggaatatttttcagtttattttcaggtttaaaccaaatatcataaaatattatcattttcttgtaaaataacttcctacaaaataatttccagaaaaattaaatttttcatgaaacaaatagagccttagcaaatgcaacatttttgaaattgttcatgtataatgatacgatttacatcctccaattgggtcaggtttcatccatgatctcaaactcgataactattctatcccttggcctgatgtttgtagcaatgctcatttttcatattggctctcccgatacttgggagaattaccaagaaagtcctaaatctattgcaattgtgtcaattcagttctaaattttttttttggccaatttagtcctaaactttttacaattataccaattcagtccatccggctaaaattggctggccgacgtgtcatttaaaaaaaaaaattcgaattttttaatttttttttcaaaatttttaatattttttttattctttattctttttttttttcccatcatcttctttgcctcctggccggcttgcgtcggccggaggcgagggccgacgaggtcagcctcgctggccactggtgagggcaaggccctgctagatccggcgagctcggccctcgcaagattcggcagggcctcgcccagccaaggcgagggtcgacctcgccagtggccggcgaggcgaccttgcccatcgtccacaatgtggtggcgatcggaagccgcgagctcacttgcactctggaggcgcaattgcaaggcacggattgaggcggagagagagaacggttccgagcgagcggcgaggcgacctcctcaatcggagaatcttcgggtgactatccctctccctctctctcgtttgaagtgatcgagcggcggcgacgtagcagacggcgacggggcacgcggcgcggttgtagtaagcgcgaagtacgctcggccaatcgtgaccgagatgtggcggccgatagggtttcgggggaagacaacggtgacagatagcagggatttgtctccgggacagcgtcgaggctacgctgaagtagatgctagagggtgatagtgatgcggtggagatctggtgcagcgatggcgtcggggggttcgggcaacgtcgaccacacctacttcctgctcggatctggcccccttctctagtttctcttcctctcttcggcccctctttgcagatctggaactcccttgcccagaactcctcccctccggccagatctgagatctccgcctcgcccttgccaatagccaacaaggctgacctcgccagatctggcggggtctcgctctcgccagtggctggcaaggttgacctcgttggacctcgccttcggccagcaggggcaagcctcgccattggctggcgaggttgacctcgctggccctcacctccggccaggaggtgaagatgataggaaaaaaaaagaaaagaaaaattcaaattttaaaaaaattttgaaaaaaaaattatttatttttaaatgccacgtcagcatttgtcggacaaccggtgtccacgtcagcgttggcctgccaattttagccggatggactgaatttacacaattgtaaaaggtttaggactaaattggctaaaaaaagagtttatgactaaattggcacaattgcaatatgtttaggacttttttgataattctcccctcgatactttgattggcactattcattgtagaagccgaatcaagctctagcaaattcgtatgaataggcttcgtgaaatggtgtccaaatgaattagaagaaaaggttgggtggctttctcgaaattagaagaaaagatgcaagtgatgatccaccaaaatatgggccttataagtgttggatagacaaatcaaacaaaatcacactcattgaagtagataaggcgagtgctgtagtgtgtccaaaagaacaaggtctgtgtataattgttagtttgaggtatatcatgaacatcactgccatatgaaaatgctaaaaatccaaagtaagtccccacttgccttaagttttcaattttttccacccaaagtcctttgagaatgaacgtctcgatttttttttcaagagaagatattgaaccaaacgcaccctaaattagatagagacttgtctcctcgatgaaaagccttcttgcgcctaagtctcgagcaagccggccaacgtgggaataaaagtcaaaacagattgccgtccttcgacttgtccagacgtagctcccacgtttatccaatgtatctcccaagttcgtaagtcctgttcaatgcacggacagaagacttcatagcaaatacttttatcaccatattttcctatatattaagggtgtatgtgattcggttcagattgatttttttgaaaaaccgaattgaattgaattgataaggaaatttattgaaccgaatcgaaatccgatccaaactgtagtagaattgaatcaagatcctggtttggttcgattcggttcggcttttcgatttttacttttcgttttgttttatttgtttcctacaggcacccctttcaataatttttttattttctaaaaaataaaaaatttaagttatttttattccttttctttctttttcttcttcttcattggccagtgaccagctagagacgagctgaagcctcatcataggccggtcatcggttgccaccgttgtcggcgactggccaatgaagaaggagaagaagtaaaagaaaaaaaagaaagaaagaaaagaaaaaaaattaaaaaaaaagatttagtaaaaaaataaaaggaaaaaaaattggattttattggttggttcaattaacaaaaccgataaaaaccgaatcagttaaaaaagtttcagtttttaatgagaaccgaattgaaaaaaataccaagcttgtggttcgatttggtttggtttttgattcagtttttgatatccttgagtgtatatgtggccacctaaagaggacgaacatcatccaacacaggtcatc

SEQ ID NO: 9735 - DNA, 4766 bp, Eucalyptus grandis
  Intron number 1 from transcript Egrandis_v1_0.036534m (loc us Egrandis_v1_0.036534m.g) derived from phytozome v7.0 (c hr-ID scaffold_9; pos 38549406 to 38554171 reverse strand)
cctgattttctcggcatcaaccatacggtgtcttggtaagtaatcaagccgaagtctgatttttttctttttccaattatggaaccagattaaggtccgttcgtttcgccaaaaatggaccctttccggaaaatatttttccaaaaaacatttttcaagaaaatgacaatattttctagtgttcggctaaaatttaaaaatgtttcgaaaaatataaaaatatttttcggtattcaataaggaaaatattttccgcttaccaaattaacgagcgcgagcgtcgagcttgaggctcgctagattgacgagcatgaatttaaaatcgatgagcttgaggttcatttggtccaacgactagccaagaaagaaatggaaaacaaagaaaaaaaagaaaaaaagaagaaaaatgaaattaaaaataattcgaattaaaatagaaaaaagaaaattcaaatataattcaaataaaaaaaggaaagaagaagaagaagaaatgagaggagaaagtgaggatttgtagaggtgtgagataagagaaattatgtgaggaaaatgttttccattttggaaaagtagaaaacattttcctcccttttagaagatttttctcctttgacggaaaatattttcttcaaggaattcattttccagaaagcgaacgctggaaaatccggaaaatgttttcccggaaattatttttcacaaatgaatggaacctaagtgcttaattaagtctcgagaaattatgcttggctatatttaaagagatagtgagtatgcaaacagcatttatacaggattcgaaattttgaatattaaaaggaaaatgcatctaggccttatagaccatttcaataaggagatatcctcctaaccttgggggaattgaatttggtttgaccacatctcctttactcatgagacctttgctataagcagactgatgctggagtgcaacgttatatgttttttttttttttttttttggtaaggaattgcaaggttatatgttaccattcactgagtcaggaaattcacagctggggattctgctttttagtatatatataccactaagattaatcacattaagattcttacatgtggacattcttgtattcgagcttgtgaaatgtcctagataaatgcctttgaatcttctacccttgttgccactagcagcatatcttatcactttgctgtaagtgtgctcattcttttagatcatcataaactataagcatttgttgtacctttggccttttgtgtttctggacaagattcatcttcagttccacgaagctgaagtcaggaagttagatataatatcttaactacagccttgaatctcgagttattgaactcttatcaaagtataactaatgttcatcagagtcccattgcagtattagaaagcaagcaaataagtacctaggtctaggtatttgtatcaacggttcaggttcaaattttatccaatacgtacactgtatctagcttttcgatatgatcaaatcaaaagaacaatgtctaatcttatggtcttgtagtaattttcttttatcaatagtaaagcatactattaagttactactcgtggatttgtcctaggaaatatgtttggggaggtcttttgaggtgaagatgtactaaatggcactaccttagttatcaaattatgctaataatgtaaaaaaaaattgcagagatgataagaagtagctctttacttcaaaattggataaaagagtcagaaaaaacaaacccatttcctcaagcccaaaagcccatgtactcaccttagttagtccacagttaccatcagttcacaataacacctcaattggcccaactacttttgatttttttggtattgaaattggcccaactaatttaccctcgattccccgaacaaataataataataataataataataataataataataataataataaatgctcgacatggaaaaaccctacaaacttaacaaagatatattaccaaactagcgtcacagtgaaaatttaattttcgaaagaagtaacagtcaatcgtttacatattttttccatacgatattttatagtattcaacttcttgtcattatatatttctgttgattaattacacctttgtcaagtaaagagacaaattgcacaatgcaaattccgaaatatatacctattggtgccatattatcgaaacgaggctctatatttccttctatctccaaccggttcttgggctcgaaaatgcttctgagtttttgaacaattgctgtcttgggatgcaagaaattattgcgttgatttagtatacgtaccgaactgaataaggcttacaacgaattcctctttattcttattaaactattaggagcatcagcttgactttatccagctgattttaatttttaaatataggtttgaacacagaaacacaaacatcagatccaccaattgccaagtcaaaacaatcacaatgttagtataattacacacgagagaaatcaggggaaagagtgagctttgaaccattcgaactagtgagtaataaataaaatttggtgtggtacgcatgccaattccgcacataatgccttggacaaatacattacaccaccccagtgcaccgcattcgacttcaattgcaattgaagctgagcgcttttgcgtgctttttgacaatgcgtagtttcatcattcggttcaccacttgcctcatgctagggtgatcacaaggtgagctctcgatacattgcatctctgaccttgtgatcttaggtccatccgaatagaatcccgagttcgcttctaggctggcgtgcaccaaggagcatttcgtcttgtcatttgaccccgagattttctcctaatactccttggcccagtcatcaggacaaggtccgtgtgagtacttatagggcctcaccgtaatcaaattaaggagaacagccccatatgcaagcacatggctttctatcaaagacttgaggttagctcaagtgcagaaaaatgaaacaaagggaatcacgagcgaaaccctttcaaaaggaccgacaatctctcatcactggccattcaactgaaagaagacaatagtgtgcccgaggccaatctttgaatgagactactcttaacgagagctccatttttacagtggtaccactctaaagtcaccataggacaaccgacttgaatgtcagttgtactcccaaatcttgttgatacgaggaaagcgcctgaaccaactgaaaactttgatatagtttgaacaggattcaggtaggacctcacatcggtgtcaaccaaggaggatatatcaagcctaaatggtctgtttcgtcgcagttactattagataataatccctgtcaagtgatttattaacacaagttttttcttttttctttttttctcattaagcatctaatagcaaggttcagtagcagtttgaaaattaagcgaggggcatttctcaaagagattaactcgatggtcaagtcttcgatttaaatttgattattcaggcttaaattacaacagtttcattcaaggtaaaatagaaaactatatcttccatcgatacacatagacatgaaaatgggggaccatcatttcatctttcgaatcgaattttacaaacaggagaactagtaatcagacttctctccacaaatttgcaatgctgactacttggagattttttttttcttttgggtccatccatcccacattccagacgctttgcttgcttcaattagttactttggcgtcggaccattgtttcctttcttgagatgccgtgtctccattggacgccgatgaattgagacatcaagttctttgttttttgggtcttcgaatctgaagagttgctcctatgcgggagctaagatggtttgcgtgaatttatgtgcttgcggttcgaggatctactattgctttcattggaataagagggtttgagttcgtgaccccattagcagccgagattctccaccattccttcgttttacgaaaccctaattatgtttcttcctttacatgcctgtacaagctacgaaaccctaatcagtttctttccttatatatagctacaaaatattcacgcttctaaaacatttatagaaacatatattgtatagatgtaatatgtatacaaatagtctgattcagtaacaattctgaatctggaagcatttatttaactataagcacttagaaatctattatgtatattttattcttgcctttttatggtaatccctaaatagttacaaatactaacaggtcgaatcgaataaagcatatcttatctcatgcacatatatatatttgaaatttgacatatcacgtaaaaatcgagatgatgataaagtctcgaattgaatatatatcttgcactcaatttatttttagtaataaactttccatttattctatccaatcaaaaaaagacatcgtaggaaaatattatcttgcctttttgggaaatttaaacttagatttcaatgacaatatcatagtgataataacaataagtttgctagtttaaaaatatacaagattgtcctatgatgagattgtcgccaaccgatatctttttggattacattgttgacgtttccgcattctattgtcattctcgtcctcctctttcctttggctagagattcaccaaaatctacatttatgaattctgaccttatctctgctatagcagctaacagtactgttcctttcttgcccttgcaacaa

SEQ ID NO: 9736 - DNA, 3195 bp, Eucalyptus grandis
  Intron number 3 from transcript Egrandis_v1_0.018677m (loc us Egrandis_v1_0.018677m.g) derived from phytozome v7.0 (c hr-ID scaffold_5; pos 37016773 to 37019967)
gctgttttaattgcttcccaggtctgatttatgtactctccttctatatcagttctaatacagttaaaatatgttgatctggaaactctagtgatgcatgatcatttgccatagtacttctgctctctaatgaggcaagagagtgggaaggtttatcgagtaatttgtacttaccttaggcgtagcaactggaatatgtgttccttgaaaaatacggaaaaaagtgcagcagcacagttttttgttcctttgtttttgggtgactagagaattgatggatttacaagtaaactaaacgttgtcagaatccttgcttgtattgtcatgcctcattagagttcctctcttatcattgggttctgaggaagatttttatttccttgatttctgatgttcccttcaagatcatatgtttctgtggcttcctatgttacctaaggaaccaagcttgtgtcccacaggtttgttctcgagttggtacggcctttatggacctatatctttaggtcttgtcagatagaacttaaattttgatggcgctcaaatcaaaattaaaatctccaatgatgaagacaacatctgaacaatcttaccttataattgaccttgaaatgatggattgagcaaagaaaatcttggccagtggaacttcatatgggtttttcatggtaaaatcctcatgcatcctgggatttagctttaagagatgaagaattagctggtaagtctgtttattctttcaattccgaaattatcaagagatttatacaaggaaaatgttcaatttgtcagatggagaaattgatcttttgaagattaagagtgaactttctcctaacaattcatggagctaacagatgcccttttgcattcatcctcttctcaatcttagtttccatttagggaattcattctatagagtacaaagggctatagatgctatttcataaaacaatttcatgcctaagcttttcaagcagagaatcccatgaagtgatcaagagatacatatgacatctcaaagatttctggcattgggctctttcttccccttttccatttctcttttcgttcaacaaggtcaatcaatgttggggctggctatgttcttaggtggttggtgcctcacttcacgtaactttaaaattgagccacctttatggcctagcataagtctctgagtgatgcagaatactctatcctacactttgaggattgagcttagtcagtcttttgcatcaatactgctagaagtgtacccttcattttagagcaaaggctgtgactttcctgcaaaatgtttgattaaattatcagattacgttgtttgaagccgaagaatcttacaccctgtctaggaccttacagctgcacatctggcacttcttgcttgactaaaacatgtctgcgtagtgttattgagatgctgtaagccagatgttcaatttgcgctgtgcatgtatactagatttacagatgttttatacatcccaaatggtcacggttatgaaaactgtgatctaacacctgagagatcatgtgatgcaatctcacgatgcaaagatgtgtggacattttgacatgtgctcaaaattgctttcggttgggattgagttgagtgcattagtcacctgttatcactggaatcaggataggcaagggtgtttaacaatacctcagataacctatctcacatgaagaaaatgctcatcaaagttgtaaaacatgaaccagcagcacaagacaaacttagctttgttgattccgactctgtcaatcctaacatcaatctctatgatggccatagctctctctctctctctctcaacatgctaattacttgtcaatgagataacttccccatgtagagattttttttatggtaaaatgtaattcttctcttttttgcaagaggtaatacaaaagggaaaaatcttaacatggtgctattgccaaaaaattcctccttttcccttccagatgatgttgtgaatctgtggctttggccttgataggcctgggtttaaatttgagtctcacagatgcacaatttataaccttgtgttgtcatttcaaattaaagtaacttttaatagctgtaagcttgtccaaacacttgattctgtaactctagataattctacaactattattaatttatgatggttatcgtctttaaaagagaatctagatgattttcttttttctttttccacttggttgatacatgttcatttattttatttgagatatagatctattattcgtgttttcgtgaagtttgtaaaatcttgcaatttttcaatttgatcttacattcaatttcatggacccttactgcatctttcttggaaaagcgattttgataacctagctatgaatgtaaacatacttttccatgctttaataacatgagacttgttaagccaccacttcggtctgaactggggcgaaacaagaagaagatcaaaggtgtggtttgtagtttcagttgatatattggtatcaccatgaatttggaaaaaaatatagggaagtacatcgttgtacattcttaatctttgtgtgtgccacagttgtcctcctagcaatgtgtaatcaggtgttaacatagcatcttttaattgggcttttatatggatagcctggatatcaataattaagatccatactttatatatctgtgtgctgttcagtaggatttgacaacttttgtgcaggcgaatggaataggaagatagttattcatggtaagtagttgcgaagggagatatgagattagtgataccttggggagaggtaaaaaatgatccatgtggtgatcaaatgattgcttctatgcagtttacgtgtttatgctgcaagcaaatatgagattagatgaaccatctgtctaggctagtatagcctgcttatttttctacctcaactccttccaaagatattcatgaactgcactgctgaatttttctttttaattctgtgattggtgatagtggtggcaagagtttatagctttgttaggaaatccttcatgtgacttggtagtgccttagcaacatggtttattgtcgttgtactttttgggttgttatcctttttttcccttttaaagttgataagatccattcactggtatatcttttttggctttaaaattcatgggagtgtctattaattgcaataaagcaggaa

SEQ ID NO: 9737 - DNA, 1985 bp, Eucalyptus grandis
  Intron number 1 from transcript Egrandis_v1_0.008642m (loc us Egrandis_v1_0.008642m.g) derived from phytozome v7.0 (c hr-ID scaffold_10; pos 16976092 to 16978076)
taccctcgaaggcgtcaacaagtgctcctcattcggtaatgtctcgttcctcgcgtcggtgttggtttcgtgtggcaatgtgtaatggacctggacatcgctagcctttattgatccgaatcggccgggattggattatttgacatttacattagccacttcacgtgtttgaattcgtgcgggtagatttgaatattctttgcgcgtgaatttgcaataagatatgctatgccgacgttgtcattgaaatgattgtgttattcttgatgtcctgtatatccatcaagttttcctctctttttttttttttcctgttcatgtctttgagatgtgcttgtggagcagaatgtcaattcagctaaatgcatgtgtagttttgtttagctctctcttctatcccaaattatacgcacctggaattgcacatgcaagatgatacttacttctaacttcagattttgttctgtttcacatgtcttttgagaggacttatggtagctcatgaataagttcgtatctgtcccttattcgtggaactcatcatatattgtcaattagagattaaatttttaatttcgtgaacacactgcaccttgggactgtacttccattgaactttaaattgctcttacgtagtttcgcaacttagtttcttgaaagaaagactaccttgaattctctagaatttatttaatttgttaggttaattctgagatcagttcagtttattgtactattcagatacatgtacgaggacatgtatagtgcatgaacatctagttttcttgaaattaagtaaaagagattagctatataaggaaaaaagggggcgggtgtttattctttgttgagttgtgagacaaccacatccttcaatcatcaccctacttctctcatgatctctcaaatggttgagagttgtaatgtacggaacaaaggtttcattggttcaatcgagaagagccactctcctgagcataagacatattctggccttagcgtctatgtcctggcaaattttctcaaagttgattgaagttggaagatccaatgttgttaattaactattcttagaggatccttttatgatgattatttcagttgtagacttgtagtaccttgacattggctttcttttaatttttaaaatccttcctgtgagtttctggggaatatgaatttaagaaaaatgagctcatgtaagcaatgaaagggtttcttatcattagcatggaggaaaattaatcaagaatatgtttgcctctacctatgatgtggaatgaaccccaccccaaccacaagtgcaaatttaggtggaactctcgtaaagtaagaaagtagcctgtgcaacatgttgagttcagttgagtacttaaattgtgttttggtataatctactatggtcttatttcaaaatcaaaggttgtgttattggggcatcaacttcaccatgcttgaattgtgttttctactttccattgttgcacatggacaagttactatcaactagcctttcattagtggatcctattttaagccagaacttggttctgtaaaatcaaaccaaattaattgccttgtattacttccaactcttttgacttacgttgtaactatgaatttaccatttttctttagcagttgacgagatggctgggggcctttggttcctttaagttttggttgatatactatgtaatgtttgtcttggaaaactttcttgattattgttggtctcctaagtgcatcctatcaaaagagggggaaaaaaatcctattgagtgtggatttggaggatggctgaattacaatgacgcattataagttttccagaagattttttatttttattattattattacttttatttatgtgacctttcagatctcatgttgattgcattgcaagtgtcgtacttttgatgtgacttgcttcttctcaagtttcagattgtttaggccggcggtttggacctagaattctt

SEQ ID NO: 9738 - DNA, 3468 bp, Eucalyptus grandis
  Intron number 6 from transcript Egrandis_v1_0.018737m (loc us Egrandis_v1_0.018737m.g) derived from phytozome v7.0 (c hr-ID scaffold_10; pos 33607736 to 33611203)
ttacagtttcggaattgtactctttgagttgatctgtcacgccccgaacctcgagcgcgccaacatcccactgcggtcgatcaaatgcgacattcccaggtagtgtcgccgaccccattcatttattaatgcgcaagcggaacgtattataaaacccctgacaataaaatacgggatagaaaaggaggaaacaaaccacaacataacactttcataattcaacagaattacaaacagaagtctacggccaacagtctacacaagaccggctcttaaaaaggaattgtcctacgacctacaagtcggacacgttctccaatcttatgccttcacctctgcaactcctcaaggccaaccaaagctatctggccactccgtccatcagggacctgaaattttaatcccacaaccgggatgagacgatgtctcagcaagttcaaccccctaaacccctattagaaagaaaatacgcccaagggtggcctagccacatcacacagagagcttacctcgcctcaattcttccctgcaggttagcacaattcaaatcgctcaatcacagatagtaataggaacttaaacaaccggaacgcattctctttcatataaccaacaaccacagggggtcctgattataagactaaatcgttatgacacgtcccattccatgccacacaattccgtcccataatctgacacatcaataacactcaacatgcattccaattgatattcactgccacacaagggcatagcctactcgcagttcggctatctactgacactaatgccaggcatcgcctcccccccatggagcgtggcttcgtcattacatcgacggcattcccgaaggagcatgggtccagtcggcctagccactactacgacccaagccacgtcactctcctgacagcatttctataagaacaaaggtccagtcggcctagccactactgcgacccgagccacgtcactctcctgacggcatttctacaagaactaaggtccagtcggcctagccactactgcgacccgatgccacgtcactctcccgacggcatttctacaagaacaaaggtccagtcggcctagccactactgtgacccgagccacgtcactctcctgacggcatttctacagaataaggatctagtcggcctagccactactgcgacccgagtctttcaaccagcacacaacaattcaataatcaattgcacaaatcgtcactcaatttgtaatatctaatcatcaaattcataatctgaatacacagcagcgatcagcacaaaattctgagaatttagggtcccaaaataattttcggaatttatttaataattaaatttattccgaaaataattaaataataatatccatatatttcacgatccacgctcaatttataatatccatccatcaatttcgaagtccgaatgcacagcagcgatcggcacgaaattctgagcaatcggggtcaaaaataatttttccatttttttttaaaataataatattttaataatttcggaatataatataatattataaattccagaattcgaaatcattaaataattcaaaaataaaaccctattatgtcacatcaaggctttatattaaaaataaacatatttaactttaaactaaacacactttaacttaattaaacatcataatataatcctcaaccaaataaactaatctaaccacataaacttacttaacttagactaagcacacttagggcatcattaaccgtctaatcaagatttagtgagttaaactcaccggattaacgagccgagcggaccaaaacgacgagggcgacgcgaggatcgactttcctcaaagcgggccgagcatccgggcttgggaaggcagccaaaacggcccacgaaggggctgccatacccattttcttcttctctgcttgctgctggttgggggcgaaggagggcagatccggcgccggaggaacggcggagaagcggcggctgcagcttggcgggcaaggcggcgactccggcgggactcacggtggccggaggtgactgaatcgcggcctgagccggccgaacagcccccgggacgcacgagcagaggcccacggagacggctgggcgtcggccaagcgcgggcgagcgcgggcggacgggcagcgacggcgagctccggcgaacgggcgacgagcgacggtcatggctgcagcttcttcgacaagctcagatctgatgggtcttcgagcaagaacccgagatggaggagagagggcgatggtgagcggacgcgcggctgcgcgcgcgaacggcggcgacaacgacggcaccggcggcgagcgacgagcggcgaaggaggcggacggcgagggactgcttcggcttcttcctctgcaaattttctggtctttcgcacaaagaagatgaaggagaaaccaacggaagggagaaggagacaagagagaggagagagaaggaggggggccctttttattttctttttctctttctttaatcccacacaatggcccaccatgacatcatcaagtgatgtcataccccactatctccaaccccctcacaacctttttccaatggttgcaattccattttccgccggggtccaattcttgtacactaatttctccaattccattcaattctcttccaattgagtccaattgaagttcataaaattaatccaatgtcaccacacttcaattcacatcttcacttgtccatagaaccaacttaagtctcaaaagcgcgaccaaaagcgggcctactaatttctcgagccaaattaaccattttctgatttaattgctgaaaaactcggcttgcatgaaaaatcttccaaagatgagttaatgatcctaaaataatttgtgacacacccagactttcaatttctgaattccgactcaatttcacggttaatttcactttggcacgatactagcgtggcccaacctatcgggtagcctttagaaattttcatgcatttgacctgtggttgatcatctcaagccacaatgtacatctttgaaacattggcgattttcggttgtcggggtaatctcaaggcttcaaatacgaacacagggtacccaatcgacagaaaagtcggtccagtgccgatcgataagaattgtgcgatttgatggaatcacccacgctcgatcacacgcctctgtcgtgtcgacctatctccgatctctaatcgatttttaattgtgccgtaatgacccttgcagattagctcggtcgaaagatcgcttcctggtcaaattctcgagtctgatgcattagaaactcttaacagcttcacccgatagactagtttccacatgagtggccaactcaaggaaaagaactatatgcgtgccaacgaaatgcccgtctcaattaattgaaaatagaatcggaaaatcgggatgtcacatgatcacaggccaacgcgcaaca

SEQ ID NO: 9739 - DNA, 4531 bp, Eucalyptus grandis
  Intron number 5 from transcript Egrandis_v1_0.009187m (loc us Egrandis_v1_0.009187m.g) derived from phytozome v7.0 (c hr-ID scaffold_8; pos 40970336 to 40974866)
tggtaagaccttaacctgcaggaatttcttgcttactatactagtgattagctcttaactaatattatttagccttagtccattatatctacaatgttagatagaggatggcttatgaaccattttttgttgggttaatgttctttgtagtttaatttgccagagcttggatcacatatgatgcttctgttatataggagaagcataactctaaatttggtttgatcaataaaagaagtgggtagattgagcaaattggctgctacttcgaagttggctccaattgcttttttttttttttggttcggaggttccaatttttttaagttctggtaaaattgatttcttggatctaacagttgaagtcatgctattttaattgatttaaccagacaaatctgatttttccattgatatgaagaattgttagatatgaactgctgcgggaggctttgaacactaaacgcatgaaacgctatgtaaaagtcataactgagagaagtaagcattagataaccaacatgaccttgtagctgtagattgatggatccttcctgctaatagcgggaaagtatctgcaatccctttacatgtgggttctgaggaagtgaacttcccttctctaggaagactaaatagccattccttactgaagaaaagaatccgttttcttatttctcatagagtgattacaatgagtataaatacatgaacagagaacctaaattaggtaagaaacctatttagataaatatcctaagttgcctctaatatctatcaatatctaatttacagcaatcagaataaaaaacaaatcacataatatcatgtaatataatcacgtaatataattagggagaaattctagaagatttcctaatacattccaacactccccctcaagctggcttgaagatgtcttccatagacagcttgttcactagacgaatgaattgccttctatgtaatctcttggtcagaatgtcagcagtctgatcatcacttgaaatatacggcatacaaattaatctgttatcaagtttttctttgatgaagtgtttatcaacttccacatgctttgtctgttcatataacacgggattatgagcaattgcgattgctgccttattgtcgcaatatactttcattggtatggaacttggaatttgtagttcatctaagatacatttaatccacataacttcgcatacaccatgtgctactgatcaaaattcagcttcagcactacttcttgccaccacactctgctttttactcttccaagtgactaaattaccaccaacaaatgtgtagtagcctgaagtagatctcctatccatattgcttccagcccaatctgcatcagtgaacacctcaatttccagatgtccatgtttttcaaacattagacccttaccaggacttccctttaagtagcgtaaaattctatataccgcttcaaaatgccttggccctggtgagtgcatgaactgactcatcatacttacaacaaacgatatatcaggtcgagtatgagataagtaaataagtcgaccaacaagcctttgatacctttctcggtctattacttcttcagccttggcaagttcaagcttcatatttggttccacgggggtctctgccgctttacatcctaatagacctgtctctttaagcagatcaagaacatatttgcgttggtttataaaaatgccctttttggatctcgcaaattctattccaagaaaatatttcaaggcacccaaatccttaacttcaaactcctcagccaacttcccttgcaagcttttcaactcaactttgtcatcacccgttaatagtatatcatcaacataaacgattagaattgcacgcttaccttcctttgagtgcttatagaatagattgtgatctccttgactttggtgatagccaaatcttttaaccaccttcccgaatcgttcaaaccacgctcttggagattgtttaagttcatacaatgacttttttaatctgcaaactttgccttcagtttctgcaaaacctggtggtaaactcataaacacttcttcctccaagtcaccattcaagaatgcattcttcacgtctaactgatgtaagggccaatcaaatgcagcagccaaagatagtaaaattcgaacagaatttatcttggcaattggggcaaaagtctcctgatagtctactccataagtctgagtgaacccctttgccactaaccttgctttataccgctcaacactctcatcgggtttacattttacagtaaatacccatttacagccaacaatctttttttcttctggtgcatcaaccaactcccacgtgccattcttcttaagtgcaagcatttcatcctcaacagccatcttccactttggatccttcaaagcttcatgaatatttctaggaatagatatgtgagacagatttgacacaaatgctctatgatgatgagataacttttggaatgacacatgttttgatataaaatgcttagtacatgatctaactccttttctaagagctataggcatatcaagattagaagcattagtatcagagggaaaaagagtactactaggatcacctaatgacgaaggcaagagatcatctctcggggttgtagacggatgagacttcaggacaaagttctaatctgcaatattttgaagagttttccttctagtataaacctgaagctcgggcttgttgatcacattgtgatcttgaactttttctccccctatccttgacacatcaagatttggcagatgtgttttcgaagattcaaacaaaggattaggaaggacaggagagttaatctcttcactaacgttaatctcttcactaacttcgccattctccccctgaagagatttgttagaaaaaaacggttgtgactcgataaatgttacatccatagtgatatgagttttactagtatgtggattgtaacacttgtaacctctttgattaggtgcataccctataaacacactttttagcccgaggatctaatttagatcgacactgaattgggagatggacaaatgtagtgcaaccaaacacccttagaggaatatcagaaaaaatacaagctgtggggtacacttttttgaaacaatttaagggagtagtgtaatttaatacccgaataggcaacctattaattagataagatgctgttagcacagcttccccccataagtatttaggtacatgcattgaaaaacagagggcacgcgatacttcaaggagatggcgatttttgcgttcagcaatgccattctgttggggtgtagttcggcaagttgactgatgaatgatgcctttttctgtcaaaaaactccccaaaaattggttataatattcagtaccattatcagtacgaagaatactaatagtagtacggaattgagtcataaccatttgataaaattttttgaataatgactcaacttcagatttggcgctcatcaagtatgtcgaacataaacggatatgatcatctataaaggtaacaaaccatcgttttccggtttttattggcatgggtgaaggaccccaaacatcactatggattaagtaaaaaggagatgatgcacgacactgttttggattataatgagtacgatgacttttagaaaaaagacaattgtcacaatgtagtgaagaaacatccacatctttgaacaaatgagaaaacaaatgtttcaaatatccaaagctaggatggcttaatctatgatgccaaaccattatttgttcttgaataggggaagaactgaaagttccatacgcctgagcttttttattagagacaaactcttcaaaatagtagagaccatccctcatcctagcattgccaatcgtcttccccgagatctcactcgaacgaaaaaaaaattgtatgtattgaagatggtaatcgatacaggaaaattagtgaagatggtaagaagaactagacattatcagaaaattacaggaaaattgtatgtccgacatagtgatcgaacgaaaaaaaaattactcgaggtgaatagatgaaggactttgggctctgataccatgaagaaaagaatctgttttcttatttctcatagaatgattacaatgagtataaatacaagaacagagaacctaaattaggtaagaaacctatttagataaatatccttagttgcctctaatatctatcaatatctaatttacagcaatcagaataaaaaacaaatcacataatatcacgtaatataatcacgtaatataatcagggagaaattctagaagatttcctaatacattccaacacttacatacttgcgggatgatctattgagggttgagtagttttactggaaattgcattctaagaattgttgattcttattttctccatattgttgccagcggcagttggttattctgtcgagtttcaccaatactcatatatttttgctgtctttcagttggacataagttctcaagtggttggtcaaaagga

SEQ ID NO: 9740 - DNA, 1571 bp, Eucalyptus grandis
  Intron number 2 from transcript Egrandis_v1_0.045233m (loc us Egrandis_v1_0.045233m.g) derived from phytozome v7.0 (c hr-ID scaffold_7; pos 27411596 to 27413166)
caaggttcgccctgttttttttggtgggtgtttgttgcttgtatcggtagatctttccgggtggtgaagtcgtggtctttgcagtcagcgaactggatagtggtgcacagagcgataatggcgatgaaggatctggacgccctgttctcttccctggatcccgagtactacaacatcctcatgaagtgagtgttgcgctgtcttttccctgttttccgtacccgtctgttgtcgatgcttgttctgatttattgcttcgtgtttgcttagtaatctttaccgtggaattgaaatgtttggagtgatggtagcaatttaaggcacaggggatggttttcttgtttccattaagtttgtagcacttgaaggcacaagtgacatcaatgccgaaatgccactatgtgtggggggtttgtgaagggcttaatcttttcactcaactgtcttgttctttcaatgggacatttgagtactcctgtagtcccttgatacagattaacataaggaccatgagctcattgggtagtgacgattatgcctaatgattatcggttgtgaagggcttaattattgagctgtttgttgtggctgcagcttttggtagagatatttaataaagatcaagaattcatgggtgatgtaatgagtagaaatagcaaactgtctcttcagttcattggtttatctgtgtcatcagggttggcatgttaggatctctgaagacttcacgttttttttaccccaacgacttagtttgatattcattttcttatttctggtgttcaaacctacaaataattgggtgagaataactcaaactaatgaagtgatcttggaagaattaccatttatgaaatttgaccataactttgctaaggaatagcctaccaccttggtttacgttatcagtttctcaattttgcttatgaagaataggttgcgctagtaactactattaattgtatgctttggctgatcatagtctatctatttaaggccttgttaaaatgtttgtgttgttgtattgtgaattcactgaattatgctacttgtgattgctctacttatttgttgacaccccattttttgaaggaacaaaccttgtaaaactatgcaaggcagtcaagttagagtgtatagggattcctattcccaaagaaaagcccttttagaggctatgctcagactaagctggactttctttattgctacaatgtgatttgtattaggcattctagttgcctcttcccaaggatcggtaccaatgcttcgtttgggaaggaggggaggggaaggaaaattggggtaaagtttgaaactttggcgtagagaggacagaaatttaataccagtttggtttgggtatacttacaatctcttcctggaggcttatttttctatcgtggaacttctttggccatttctttctgggggacttcgtgtatccactaattcctatttttctaatttccattgtatgaagcttcatagatgatatgctactttgagaaaagagctagtgaagctgcaacactatgctgcttaagtttaagtcttattttgtttcaggg

SEQ ID NO: 9741 - DNA, 861 bp, Eucalyptus grandis
  Intron number 22 from transcript Egrandis_v1_0.001504m (lo cus Egrandis_v1_0.001504m.g) derived from phytozome v7.0 ( chr-ID scaffold_6; pos 48312692 to 48313552 reverse strand )
atcttgttttgctttcggtcgttggcatcaaggtatacacatcagttctcaagtttcttatgataatggactgatccattttatttcatactgttctggaaaatttattcctccataaactctgaaaaagacatggagccatctcgcaccacttttggagttgtggaagtgtcatttcaaaaaaatagcagcaatttgtgttcttaatattcctcaagtgaagttacgaagctgcttctttggagcagtaattagtttacgataagcacaagagcggcgtgctcttatataggtgtaaaagtttatgcagaagttacttttaagttataaatcgcatttttacttgtaggtcataagttttgtgcacattattctctttgctatctttttatcagttcatgaaattttcctggaaagatcccagaagtatccccttacctaccttattaattgtcagaagcaattttgctttgcaatttgcttttggtctggttttgttgggaaatttggtataaattaaatgatcaatctaacaaagctgaccatttaagaattttataaccttcgattgaaacttggatttcccacatattcaccttttttttctggattctatatttttttagttgtgttttctcattacatctttcatttaccagtggagaagctaacttaaccttactgtataagtcaatgtttgtatgctgtctatttctatttttgaaatgcaacaaatgttacatcggccttgtgctcaggaaaaattgagttcttcatacttcgttataagcgccttttatcagctaacatatctatacatctgcaggatccttgtcgtccaggtgttgaagacgctgttag

SEQ ID NO: 9742 - DNA, 5562 bp, Eucalyptus grandis
  Intron number 3 from transcript Egrandis_v1_0.005090m (loc us Egrandis_v1_0.004393m.g) derived from phytozome v7.0 (c hr-ID scaffold_3; pos 29758444 to 29764005)
agccgtgaaaaagatctcggcaacctcgaaacaaggtgtgtttcttaattgtattatgtccttttagtacatttttcttgaacacggttccctagaaaagatctaaacattacaaaaacatagtggtgaagcaattttagcacattttactttcatttttattcatcgccaattgttgtgaataaagtgggagagagatattctatatattttcaatatatctagaataaagtacttggagtctatttataggcttgaatagacgacaacctagggaaatcaaatgggatatgcataatcataataattaaagaaaatgtccttaatatctctagaagatacctaaatatctctaatactcccccttacgttagagcatagataatagtcacatctagcttattataaatatattctatcctcccattacctagaggtatagtaaatatgtctaaaagttgttcaccagtcgtaatgtgacttggaaggatcactccactctatagcttctcttttatataatgacaatcgatctcaatgtgttttgttctctcatgaaacataggattggaagttatatatgctgcaaccttgttgtcacaccacagaggcatagaaacttaagttttaaagcctaattcaatcaatagctactaaatctacactaattcatgtgtcacttgtgtcatgactctatattctgatttagcacttgagcggacaatagcattctattgcttactcttccatgataccagatttcctttaaccaaggtacaatagctagtggtcaatctcctattatctggagaccttgtccaatcaacatcagagaatcctaaaactctgttatggccatgattttggtaaacaattcatttcctcagaatcttcttcaagtgcctcaaaatccaatgattgcatcccagtgaaatgtacaaggagaagacaaaaattagtttaccacactaattggaaatgcaatgtctggttgagcaattgtgagataatttagcttgcctaccggtttttaattatctctcaagattatcaagaatctctcttcccttagcaaccagattatctccttgttccattggtgaatcaagaggtgttgatcccaacatgcctatcttagtgagcaaattatgggcatgctctcactataatagaacaatacctttttgtgaccgtgtcacttcaatttttaggaaatacttcaacttgcccaagtccttagtctgaaactattgctaagggtagagctttagttcaactatactaaccaagtcatctcctgtgacaataataatatcatcaatatatgcaattaagaataacttgcctccccttgattgtttataaaaggagtaatcatttccatatctaaacattccaaaagaatgttaacttcagaaaatcttccaaaccacgcccgtggggactgcttcaaagcttgcggcttttttaacttgtaaactagtttcccaaatgtcccctaagcaacaaatcccagaggttgctccatatacatcttctcatattcaataaagcattctcgacatcaagctgaaataatggccagttatatgtggctacaagagagatcaaaataccaacatatgtgaacttggcaataggagaaaatgtgtttaactagtcaaccccacagaactgagcataccctttcacaacaattctttcttttaaatgagcaagagaaccatcgggaatgactttgatagcatacacccatcgacaaccaatatcaatgttacctaaaggaagaggtgccaagtctcaagtttgattaacttgtaaggcttttaattcttctaccatagctaatctatagccaaagtcatgtaatgccccggctgctagcttaaggacaaaatattgttcaatagtagataaaaaggattgaaagaaaagagacacggaagagtatgaactaaagtttgcaatagaatattaagtacaagcatgatatctttgtgatgaagaatatgggtcagctaatggcaaatctagagctaaagatgacatagtagtggtgggaggaagggaggagcagtagctacttgaggatgccgagtatagaccttgagagaagttggttcttgtgtaaatattagggaaattggtggatcaattgatcaaatggtgatcacatgtaagatttcatccacctcaaaaatagtaattgaaacatcatgatatgctatagattcaaagaagaaaacgtagtacgagaataacatagaaacgttagaagaataacaatggtatcccttttaagtacgagaataacatagaaacgtatacttgatggccctaggatcaaattttaatactctaggtcaatgaccatggaaaaaacagacacaacaaaaaatacagggtggtaaaaaaaataatgattgattgagaaaaaaattagaaaatggaatacaacattgtaaaacataagaaggaatgtgattaattagatagtatgcaatcggggcaacataaaaaaagaaaaagaaaaaaggttttacaaatcatcatctcaaataacatggacctagtgacttccaataatgcctattctttctttcagttacatcatttttttgtggtgtatcgtaacaggaagattcacggatcatacaaggttgagtcataaagtcaaaaaagatgcgaaaaagtactcttagcattatcaaaacaaaaaaatttaacatgtataccaaactgattatgaatttcggaattaaaagcacaaaatatataaaacaattctaaatgactttccattagatgtagccaagtgactttggaatagtcatcaacaaaagtaacaaagtatctaaaatctaccaaatatctaaatgaactaacgaaaaaggaggcattactagcttaatgactcatggcaagtaactaacacgatgcaatttgccaagttgacataactcacactctaaactagaaagagattgcaaactagaatctaaattttgtagattgtgcaaccaaggatggccaagacaacaatggatttgatgtaaggaagcaacactagaacatgaaatagatgaatcattttcaagcacatacaaccccccacctcatgtcctctaccaatcatcatctttgtagccaaatcttgaaaaatacaagaatcaatgtagagtgtcactgaacactgaaagtttttggttaatattctaatagccataagtttaaacagaaattgtgggagataaagcattgaggataatgtcaatgaagaagttggatgaattccatcaagccccttaacttgtgtagatgaatcattagctagggttacaatggatgatgatggagtaagagacaaaaaaaaataaaatgaaagacctaacaagggacaagatatagctaaaaggcatgtggtagtattacctgttcgtacaagagtagcagtgaaagaattaggctgtgttgaaactagttgtatcgagcaaattccttattagacatagccatcgcgttgccttttgaaaactatggcaaagaagaagagtcggtactagatgcaacatttgcaaaatgtagttgctaccttagtctcccatgtaacttgtaacaagatttttgaatgcgactagttttgccacattaatgacaagtccaaatggcccttgagctattagtggaattgtgggactgtccataaagctcttcttggccttagctgcttcttgttcctacgccttagccaacaccatggccaccacaagcgttatgtcctctacgtgttcctttatcactcccactaccgccactgattcaagactaggacacgagagctatctaccatagacatagtgtcctcagaagactcatgagatacccaaagaactcaagcaaaggtatttgtgagtgatgcaatagtctctctctcctaagaatttggaaactcatagtttctagtttggaccgaaacctccttaaatcccagtacaaccaactattctctctgaagttgctttttctcagcagtggttgaaatagggagaagatgatttaactcctcatacatcttcttaaagttagcaaagtactgtgtaacggaacaccccttcttattagatcggtaaaactactggaatagctaataaattcgtgaaaggttattttggccagaatgcaatatagccaaatgctgccataattatttaattgtgtcaacatgagttacgagatcaactatattactcttcatagaattcagcatctgaccaagaatacgtgaatcaattgcattttaagttgcatcaatactaagtttaggcttagtcaagtgtgtaagttgattatgtctatcgaagttagcttcacaattttcttttattgttgaaagttggcactatcctcaagcttcttattgataattcgattagaagaagaggaaatcaacttggtcatcatagtattactcttctcaaaatcacccattgtttaataagaataagaaaattaccacaatattttccttcaagcaactcaacttcaataaatcaacacaactgagaaatatcatcaatggaccgtcaacaatgttgtcacaacactgacaaccaattgaacaaacaatccagacataggtatagagtacctgtagccttcgaaggttctttaggtagaaagttcatacagcgatggtcattccaactgaccgatcataggaacaagggcaacaaagaccaaattagataaccctcctagatttcgtataaatctcaaagagtcttgcaaagtcaattttcgcaatccaatttccttgaatttacccttgagattccaaacatccctacctctagagaccacaccaattaacttcaccaaactgtgcaatagctcaccacccactcacctagtgcattgcataatgaaacatctcaattagtgcaagctaaaactactagaacattccaatctaatccaatatagctcgaccatcggacataaggcctgatctaggcggtcttggaagacttcgaaaaaatagcaaatagagggaagcaccaaattgaccttagcgaaaagtatgagttaagcccaagaacctatgctctagtggtgaaaagccgaagagagggaacatgtgacatttgacggcgccaaatttgacctaggttagatggcgacgctcggcgacactagatctaggctagctacttttttatttatttatttataagaatttctacaatgggtggcaactctaattctagcgaataaagtgggagagagaaattatgtttaattttcaaagtatctagaaaagagtacatggagtttatacatgggcttgaatagatggcaatctaatggaattaaatcggagatgcataatcaaaataattaaaggaaaaatcttaaatatctttagaagatacctaaatatctccaacagttgccacaattgtgaagattctctatgaaaaagttctctagtatttgttaatgaacttcaggcaatttttcaacctcaaattcaacaggtgaaagacaatatttggcagagat

SEQ ID NO: 9743 - DNA, 5460 bp, Eucalyptus grandis
  Intron number 1 from transcript Egrandis_v1_0.038108m (loc us Egrandis_v1_0.038108m.g) derived from phytozome v7.0 (c hr-ID scaffold_5; pos 6206296 to 6211755)
aaggtgagatttcttttaagtccttcaacaagttctcttctttgcatattaatgtgcacgtatgagagatggggttctcgttggtactcgctcctgggctttcttgaacacttttcttggcatctctccgtctcaagcttcgtgagttatttactcaaaatctaactgggttttgcttttcttcaacttttgcagaagttggtggtgaaattggatctacatgatgacagagaccggagcaaggccatgtgagtagtttctggttttgaaggtactggctctctccctctctgttttttcccttcattctctcaccgaatgttcaaatcgtcactgtaataactaatcatcttgtgcttgatatgttcggcttttcactaacctttgtcacataatgctttccagggattgggtctctaagtatggacccgaaggacagcaaactaacggtatctggcgatttcgacccagtcaaggtggtgaacaaactgaggaaatcttggcatacagaaatcgtgagtgttggaccagcgaaggaagacgatgggaagaaagacggcggcaagaaagaagagggcaagaaggacgatccagtcgccaatctcgtaaaagcctatgaagcataccattctacgccggtcacatattactatgtgccccgagaagagaccccagattgtgtcatatgttgaaattctttgggcttccagaccgaatcaggaatttgtttgtactggaggcgaaaaaaatatatcgtctatgcacgtcttctttttgtttccaagcctatattgagttgcaaatcgaaaaggtcaaattttggatgactccttggtgatggagttgtgaaaacttctaaatagatatcctacatccaaattgaaatctatctagttaaataatctctttctaattgctctggaaaaattaggagattctctaaaaaaatcaagattctgcttctggtggcaatatgctaggaaggtgatggtcccgcttaggggttcaaatcaatatgttctaaaaagaaatatttgaatatcaatctcattgatctcataagtatcatgacaaatcccatctattgaataaaaggcgaggcatctaagtcataaaagtaaataaatattttacattgaatcagtttgttgtactgaccaatgaatattttcatcaccttttgcttcgattttttacattattcctagacacattgatgcctatatgctctttcaccaacatcctaaactcagtactcttgatcttgagcatcatcagatcgaagaagtgctttgacagttatgcacttgttactcttttttttttttttttaaaattaatagaacaagtatgttttttttagtaagccataaactggaaggacccactcctactaacgtactcaccataaatttttcatgaaaattttttttgcgaatacctagctcttacaaaggccttagtatttttgatgaactcaatattcctctctacaacaatagagttctttagtataactttctaaaattgttttgcatcttagaaatttatatccattgacaaagtaggagagacgatggatgaatcatagaaatgaagttcacatttttttctacgcacaactccttgattttcttcaaacttgtcttaggaagtagcattcttgatgctttctttataatcagtctcctcgccaataacagtaacatttgtagatcctttggccttgttaagaacttcatctgtcatttgcaaagctgcaaacctatataacaaaaactccatttgcttttttcataattgtgcaaactcctcatcgtcattatcatcacttaataaattttcaaaagtcaacactttatcgtcatcatcgttgaatttagctacgtcccaatctaatttagtgatggtgacatcacctacattagcatcactttggtgaacaacatttgcgtccttctcctccccctcttatctacttgttgtccttcatccctatcttctgtactagtttgaatactatctcccatttttcctacttgagtgttctctctgtcatcattttcattctcagtatcactattgtactaaacatacattttcacttcttcacaatgaagataatggtataagacattcttaaaaccattattatcttctaagcttttcaaactatctttcaagctctttcaagagacacaatataacaatttatatactttgcatgacaaatagttcactatatctctaacaaatctaatatattgacaaaaatagtgccatcatttcccctctcatactcccactcattctccccaatcacaatgtctccaccgtaataaacaatgatagcaacataatccttattttaagccatttctgcaaccaagaaaaaaacaattaacttttgggaccacatcagcaaagaacaacagacaattgcacatggaggtcccacactcttatagactttattaaagaagaaaatggaagaaatgcacatgtaatttattagaaaaaactaacaagattgccctcctcccccccccccccccccaatagctactttgattatcttgtattcccttaaaatattgacctacaaacaaagattcccacgacatgcacaggtcctcaggatactcatttccacacttcgaattaaaaaaaaaaatgacagaggtccccatgacaactactcagagccctaaaaattgccctcgcacgtcatatttcacatctgacccctaaaattaccatcgcacatcataatatcacatatgaactgtaaatcctacatcacagtagcataggagtcctatattttcccctcgttgagctctacattttgaggccaagtcctaaattaccaatctgagccccttaatcactttagcaccacatttgagctctaaatcatacattagaataccatccaagccctatatttcgtggtcaattcccacaattcccaactacatcctaaatttcccatcaaagccttagtagatgagtctgagtttgagtcgttatttcacaccataggagaagaggacaaactgaggtgagcaacgacaacaagtggcgattgcgagcgatgacggcgagcaatgaccgaccttagtgagcatgaacatcgactgtgaatggcaatagagagaaatgcatgagtgtgagtgtgagtgtgaacgaagagggacaaatttggtgcaagcctaaaagtaagctaaaccttgttgtttagtactaaggaaaaacaatgttgtttaccttgcccaatccagcgtggatggggtgatgtcattttttgttgtccacatgtttttttttttttaattgttgccacctcagtaaagcatgtcgctataaaatgccacgtttgtaatttggctgaattctcttgccgttgacacttacccaattcattttgcttcgattttggtacttaagtatatatttcctaactattgacactcaattgtctctcgtaccaagttttgacactccaagtttctagcttaatagatcctctatctatccatatgaagtagaaatcatgtaaaaaggggattcttatttatacatatggtactttggacttggcacaagtagaaagaaattaacgataattttttatcttttaagttgttcagccggatcgatcgctcaagatctttggtctctaccttgacttgattaaaaaaatgagatcacttcttatggattcattgaaaacgattttgatctagttcatggcctattagaaggagaaggtactctagtgagatcctcatggatagaaaaagattgcagtcagtttgataatcatcgagtgacattgcttctttgacccaaactaaggaatctcttagatatgaggcaaaatggattttgttctatcgttgatcaaagattgctctatgaaaaatacgaattagagtttgaagaaagggaaggagaacgagtccttgacctagaatagatagaagatgacgtattccatcgaatagtttgggctcctaaaatatggtgcccttagagctttctattggattgtatcgaaaggcctaattcattgggatttccttattgggcaagttaattttggggcaggaacttcaagagaatgatttggacttcttacataatggaaccatgtagtactagacagaagatgaatcttccaaagaatagtgttttttttttttaataagctaattcatttgggaccctatagatccatttttttccctatttaaagatcaaccctttatctctatattttcacattgagaattcttcgtagataaagagatgtcaagtgggcttctcgtattccaaataaattcccctacctctatatataaatgcctgtgtatcaagaatatgcaagaaaaacacttcgaattgttgattcattgtcaaagattgtttaaaaattaatagttcattatctaatggatttttttgttctaatattccatccaagaattatcagtatttaccaaatctattcctatctaatagaaggctattggatcaaatgataaagatactattaagaaaaagatgacttttccctaatcaaatggaaattggattcatgtaaagattttctatcgtaaagtctaaagaattatataaaaggggatgataagactagactagatgtgacatttcagcacgtaggaacgtggaatgtggctatcgagaatttatggctaattccagcgtcaatttctagagggacaaaaaaaattaggtccaaaacctatttgtacaactacaaaatcttcacgacaagttacgacgaaaagcttggaccgagtcagttgccaagaattcaagactcactgcttgaaaagtccccgagtcgcgaggggcaactcgcccctctctctctctctctctcatattataaagtcgcccccacactctgttttctgagaaaccgcgtggctctttccctcaactcattgacttgatctttttcgtctcccaattctgtactggtcaatgctctgtcctttgttctccgcatcgcgtcctccgagaaacttctccttttcacaaactcctctcctgcttgccactctatataaagcaccccccttcgtctaccacgatacgtgcacacactcagtttttactttgctctgagtgtccttcgagtgtttttagcttccaaatcaaaagttagagcagacgccaatctcagtacttgaagcccaagagacatgaaggtgagatttcttttaagtccttcaacaagttctcttctttgcatattaatgtgcacgtatgagagatggggttctcgttggtactcgctcctgggctttcttgaacacttttcttggcatctctccgtctcaagcttcgtgagttatttactcaaaatctaactgggttttgcttttcttcaacttttgcagaagttggtggtgaaattggatctac

SEQ ID NO: 9744 - DNA, 3641 bp, Eucalyptus grandis
  Intron number 2 from transcript Egrandis_v1_0.018053m (loc us Egrandis_v1_0.018053m.g) derived from phytozome v7.0 (c hr-ID scaffold_8; pos 17348910 to 17352550)
gttgtgaaggcaatcagactgacaaactaaagctggtaaattacttcgctttgggagagaacttctaattaggtgatattgagtttcttgtcctagaagttcctttccaagctatgcagtggagtagtacctcatcagtgaaagtttttgagtactaggtgatcgtggggctaaacgcaatttttggagtgaaatttaatggacaataataattgcatggcatttcattttttgaacacttgatcctttggtataacatacgttgctggttgtctaaatgaatttgtgccatgatgcctaagcatgcctattacttttcccaaaatgctaagtcaactaacagtttcatagctattgtttagagccttcgtttctagttcatgtaatcattgtattgtacttgatctttcttctatcttttcttttatccatgggactacgtatccagtttgtcatgggtgatcttgaatttggtacaccacatcttctttggtaaaaacaactgaagtttgttgacaataatatccagcttgatgattagtgtgttgtgtatgttagtgcttggatataatctaagaatttagattttctgacttctctgtgtgctcaatttcttcttgtcttagcttccttttttttttggcattcgacattctgtctcacttttcaatagaatctggatttttctgttggcagaagttgacatgttacttttctggtagtttttgacaattaaggtcttttgatatttgctatgcaattggaaaatgagatgggcaagtccgtggtgatgcagttaaatagcataaaccaatgtgccgtgtcaagtagctactaatattgatcttaagtgctgtgtttggtcctgattaaggatgattattcactttgttctttgcctctttccttcttaccagatactgccttataataaaataagggagttgatgtttactgaatgtattgtacctttgtctgatgaaattgaccttccttctctcgtttaaagcagattcgatgtccttgaaattgatgtatcaggaagtggatcttccatcttagtttgagttctactattgattgccaactttctgaatcagcatagaacttgcgtagagttcctcggaatgataatacttgttcgtgtatttaaaggatgctctaatcataaacttttggatcaatttggatacatttccagcaatagaattttttcttttttattttagttttatctatagcaattgaaaatttaaggagctgtttgttatctaaggtttccaaagttaatgcttcatatgatatactatcatttcggctctactttcccagtagcagaaaatacatctacctggtcaggtatccatggattatttaagttgcattgatggacatttggctctgtttttttcttcccccctctggatttagaatgtaaacgatactgggaatgaaaatgccgtttctgtattattcgaaataaacaagaaacatgataggtgtccaagtccttggattggcatactctatgaatgaacctcccacatgcatatcacgagtacaattgtgatttatgatctaaagcatgtcaaccaccatggtttaaatttgcggataaggtgttttctctctgcaagatatgaactttctgttttcactcctacgacagcagctgatcccaattcatttatcagagaatagaaattaggaaaaaaaatttgtcggactcaatagatttaatatcattgtcttctcatgcattcatcagatagcaagttatatgtctcactgtattctatatgcccattatgggaggcacttataagttgccagcatgaatatgtatgaaaagtatttcctttgcactatcactggtctataagttccacgtattggctttgcttctaaatatattcagcatattggttcctctttcatcatcgcatgcagatatggtatactccctgcaaattagcagatgattcaaattaatattctcacatgcttcttttctgaaatgctttaacaacgtctcctttgtcaaattcttaattgttctctaatgaagaataatgatttctttgtggagtggtcactagaaaacattgttgtcagacttcaggccagcaaacttcttatatgccactgagagactgccaaagagaacatttctatttatgtccttctgatcatcaattattttggagagtgtattattgtataaaatgggtctgaatagtatgtttatgacagtgagaaagaacaagttttaaggtttaatttcgtgcatggtgcatccagtgccctagactcatgctctttctttttggctgaagtgattctagtaaataaacttgaattgtgtttcatccagcttttgtggaaatggctaaataattgagacatgattacagtgatctcaaaaacaaggtgtttgtgtagattctgtttcagaaacagttgttaaaacagtttgccacgccagcttgaatctctcgtttcagaaacaagcataaatgctcagtagattcgttgtacatttttttttttttcaatcgattaagttcttacaagtaagtaccatgcctgtagcatttggagaattcacggaagtgtcaaaaaaggcattgaagctaaagcaaagtggtagttatagtacctcatatgttatcggagtctctgtttatatgtctaatttagttatattgaaggttaaataggattcttgagacaaacaggaaaatcatctatttatgacatgggggatttctttcagtgagcgcttgatttcatttaaagtgatgagtaaggaagaatgctttcgctctctgttctatggttttggaagacattcattgcttacactagaaaatagctacatctgttgaaatactttccttggtagctcacacgcgcgccattcttctacatctgggaaaatctgaaattggagcgaaatgggttgttattcttcttatttgtacaaaatagactaactgggtattggtacttgatcatggccctgccagccctgctcaatcctgagactaggccactagtgggctacgccatttcagttgcgtatggactttaccagattaaaatacccagctgtctcacctacttaaaaaattttaatatctttatttcccaatatcaattgctcagtagtttctatttagctatgcattaaattaggttgattgtttctttcaaggtgatattttctttcttattcataagtccgttccatatatgttagatgagatgctgaattgccaaattaattaactgcttggtgatctgaatatgattaattggaaagatttttctgttattttactctctgttcagtgatttagtcattggcatggtttatcctttcactgcatgtttggtattattaactttgttgaagaataagaacccttccaattgctcgagtcgactgcaatgtgatggctatactgtccttttgaagtgatattttccaattatctgtacaaattgctgtgctttagccaatacacggatggatttatacttttttgctcactcggactttgattttgtaatctgattggttaatgtcatgctttctgacagatcacttggaagttcctctaatcttgcaataaatc

SEQ ID NO: 9745 - DNA, 1908 bp, Eucalyptus grandis
  Intron number 1 from transcript Egrandis_v1_0.000692m (loc us Egrandis_v1_0.000306m.g) derived from phytozome v7.0 (c hr-ID scaffold_8; pos 10435538 to 10437445 reverse strand)
gagtttctgacttagatcgagctcggtcgaaagtgaggatgccgtgtgatgatgccgcggcggcgtttcgactttttctcgtggtttttttccggattccgtttttctcggcgggattttggttttgactcgtttcttcagtctaatggagcgatctgtgtggtagatgaatgtttcgaggggggaatgtggctgctcgtagtgtcgtgtttctcgcgtgttttccgggatgtgccgttctactacattgtggtggctcgcgaatctgagtgcggcgttcggtgtttttgatgatgaaagagcggtttgcgtgtgaaaagacttgaatttgactagattagggtggagtggtgatggtttgtcgatcggaatgggttcgaagttggacattttggggtgattatagtggcgcttgctttgctgcattcggccgcagttttgggctgagaccggcaatgaacatccactcgattcattggttggtgaaactggatagattgaagatgccgtgaatttctttagtggaagctggggtttgacttgaattcgtactcgattgaaaggtggagattgacaaattttgacatgaattctctagggaaatgagttcattaaataatgggctcaatcgaaacactacggcgttcttgtctttgtagtttaatttttaacaacatggcttgtttgtcctgttttttatttcatagggaaaaatcttttgtacttctctactggaccgaatctcaacaaaactttgctcatgaaaaaacaacaacaacaacaacaaagccaagccttattccactaagtggggttggctatatgaatccagttacggcagtgggttcgtatttctatccggtctctcgtacggtctaggtgctctgtatctttccttgtcgtcttatttgatgtctttctaagacttctcctgccccttctagcttgattctccatcccctgatcatactggagccaaaggccttcatttaacatgaccacacaatctctaatgagcttatggcttaccctcattggtgccacacctacttttccttaaataattacatgtctagtcctatcctttctcgtgtgtttgcatatgcaaccaagcatcctcacctctaccacagtcattttccataaatattgttgcttaaccgcccagcaccctgtccttgaagaattcctagccttattgcctcgtcatataatattctctttagcttaagtggcatctctggaaaaattgctcacttgttgaaatccagttttagcacaaagcatttgaatttttagtatctctcactttaattgtgtaaatacattgctattcagatgtactgggaagggctgatatttgtaagtgcttctatgccggctggcctctatgtctgttttgcatgtggatgcatttagagatcatgccttctactgcaagtgaagttaaacttcggagaaaatagcttttacaaacataaaaacctggttatctctcccatttggtacctttgttcaactttttctcagcctaggagggcgttctacggagttaaactttttctgatttgcacgttccatccagttataactgattccttttcattttgctgaatcataacaaattctgttaatcttagtctagattttctctgcgtccgttctattttggatgtgctttaagttcattagaactccaatgtcacctttagttggagttctatttgggacctgtgatttgtatgctttaaccttgcaccagctcttccgtgttgatgtgggacacaaggagctcattctacaatgccttaatttatagaggcttcagtgaaccataatcattgctccctaatatttttttgtccatatgcaggctactgttggatcttttgtttggttggaagatcc

SEQ ID NO: 9746 - DNA, 2185 bp, Eucalyptus grandis
  Intron number 2 from transcript Egrandis_v1_0.032211m (loc us Egrandis_v1_0.029787m.g) derived from phytozome v7.0 (c hr-ID scaffold_8; pos 59278745 to 59280929 reverse strand)
aggccacccctgtcagcctcggcaagaccattcaggtcagctccctccgtcctctctcgcgtctcggtattaactcaccgctaaaatcatgaatctttagaggatttgggtgtctagcagcgatccatgtctgaccacattcagatgtgcccgtgcaaggcaactggctagtaattaatgactggtttgtccggagttgaattggcctgcgagttggcagacgagaatcttgggttaggaagcgtgccgtgtgcaaattgataggcctgttaaagttcatgaattgtgatattatattagcagggattttgtccaaaaggttataaatttattgcattttaatcaatttaattcaaaacattttagttttgccaattgagtcataaactatttatcaatttatcaattgagcacgttcgactacttttagctaaaaattgctgacataaacatccgttttatgcggcaccacttatattaacacggataatttttataacttattaatttcttttttaaaaaagcttctattaattttgctatatttcatttgttatttctcctttccctcttttttgcccttttttctatgtcagcgagtcactttcatcccttgctaggtgtggacgagatggtcctcacttagtttagggagacctttctggccagtgagggctgttagtgacctttgctgacactagaggtgatcgggtccaggatggatagggtttagacccgggctctatacccgaccctatttgcattagactctgtacccgacccaccctgtttttccggtctggttccggggtcaatcccgtttccattggaacttgttttgcaatctcccgatatcctatacgactttgaattttatattaatatgtgagaaaataacgtaatcctcctaatttgtatcgaaatattaagcacttataaaaaataaatacatgaaatttttgactaaatgtaaaattaatgatccacagagctaattataataaataaaatcataaggcaaataattagcaccaaacatagggtctaatattaatcttattcctacaactactacatgaagctactcatttatgcaagcataactcctcctacaaaagagaaattatgcgagccaatctacgtggtacacaagaatttggtggcggcgaacatcgtccgtccgtcggacggtgcgagagggagccgatgagggagagaagcaagtgaggaagatgaatgatgaaagaggagtgccgtgcgtgtttgagagagccaagaggaaaaatgctgtgtgattgcgggagtaaaaatagaatttaaggggaaaaaataggattttggacctatacttacaaaacgagttcccaaaccggttccaaaactgattcaggaactggttccgaggtggataatcaatcggacccgattctgaattttgggaaccagtttcaacgggaaccgattcctgaccccgtttttcgggtgggccggttcggttcctaggtatacccgatctggttgcacacccctaatcggcacccacaaaaataaaaaaaaaataaaaaggcaaagaaaaataaaacaaaaaattacaaaaattgtccacatcacctatttttgaccaaaattgacccgataaacttaattggcaagttatcgaaaattttaagatctaattgataaaattgaaagatttataattgaattagccaaaatgtagtaggcttatgacttttagacaatttccccgtgttagctacgaaaataagctatgatttgtcaaacatgtcttttcaagaccaaattttaagtgcgtgaggatagagaattcccgtaatctatcatgttcattagaattaaagaaaattaagcaaatgattcctaaactttacccccattgtatagtgggaaaattactaagaaggtcctgaaaatattatacttgtgtaaatttagttttaaatcttttaatttagcaaattaagtcctaaacattttgacgatttgctaatgaagcccatccagcctattttggtaaaaaaactactaacgtaaatgtcgaccacgtgatacggctaacgttagtgtggacaatttttacattttttttttaataaattctctgaatttttttctttcccttttcttctttctagtttggccggtggccaaccatctggcaagg

SEQ ID NO: 9747 - DNA, 3355 bp, Eucalyptus grandis
  Intron number 3 from transcript Egrandis_v1_0.044981m (loc us Egrandis_v1_0.044981m.g) derived from phytozome v7.0 (c hr-ID scaffold_1; pos 26688978 to 26692332 reverse strand)
ttcctctcgatccatcccgattccgaagagaacaggtgagattagttgcctcgtgtttagtgggttcttctagtgtttgaatttgggggaaaaatttgcttttgggtttgtctgtgctccagcttgcaatgctgcaagttttgttacttgtgatgtttaagtagagtagttaaacaagagatgcagcagggaagttgagaagccccaaacattgtgcatgatttcgtgctttaactgcggaaagtgttggattgtaagcatcttcggtatctggttagaagtttgagattttactgcagtccagcttaattaggtgttgtcatagtattttctgtcttttatgtggtaaaaatttacaaaacattaaacggtctcctgtggtttatatgatttttaatgccaacgacctttctagattcactcttaagttttaagtatctagttttccccaacctttaattgcaaggaagacaaagtggtctctcgtttttttttgtgttgggtgagggggttggaatgtagatcccattatgtccttgcactctatctaatacatgttctattttagccccatatatttttccatagagtctctgcccgggtcttaattaggatccccaactttgttataaaccaaccatagagtcccatcatatcataaaagcatctttagaataaattttgagagcccaaatcatttttatgcctcttctatgaaattattttgtgttgaggaatttatcatgtctttttcttttagatatgtgtcaacatgaaatttcgtctagtgttaaggcacacaatcttataatttgtggaaatggttggattagggaactatttgatttaatttgggtatatgtttctgaacctgttcaatgatgtcaagttgaagaatttcaaaaaatggatgcttggtattaaaatctcccagattaaactctggctactatggattgatatgaataaacagaaaatgcacattggcattatatctctctacattatcttaagagtttgtatctcggtatcacataagaagcagcctcaaaaaaattgataagatttgtgagtgactgttatatcaaaccatcaataggtgatatccagcgtaaaccccattcatagtataaacgggtttgatgtctgaataacaaaatcatgtaaaaaagccatccaacaaaagcacaaagtatgttttgaaaatggtccagctcaagtagatgacctccttcctatcttgatgacaaagtgaatcttcaatacaaaaaagagaattattctatatgtgtacttggaaaaacggttacggtttgaatgaccagctttccaaactgaacccaatgtatgaaccgatggtctattggtggcagtttggacgaatgtatcaacacctaaagatacatcttcctacctgatatttcgtcttgacataatttaaattccttagaattactccttgctgtcaatacccagtagcacttggaaactctaatttagcaacggtgaatttctccaatgacaacttgtttgaaagtgacttcactgctacataaaggttgtgcatactcacttgatgatgttcctatacttgatgtcaacttttgcaacttcttccagtcagcactttgacttacccttgtggtagattttctgcctatttgttcaactttggttgaggcttccatgttatagattaaaggaataaacgaatcataggaaattttctcttagtgaagaacttattttttattatctgtgtcaaaaggtccaacacaaaagcttcttattaagtcaagagagattacattttgtacaaacaaataaaccctatagacatgtgatgtgaaatgcttctttattccctttcatgtgcaaagtggacgaagcactgcatgggaattgagaaacagcaattgtgacaaacaagaacggtataggaaatggaataacaaatggggaatgaataatttaaactgactttgattccatactagaaagtccaatagaaaagcttaaattgttagatggagggagactacatgatgtaacaccaaaattgactcagcacataagtaatatgggatatctcaacaatcaattatcgaggatgtattattttgtttagatgttgatgcttaagagtttggagattttcttcggtagtttgattctaagtgtgattaagtgaccgtataaagtctagactctaactagaatgaagaaatagctaattatttcttcggtagtttgattcagatggtgttgatgcgtgtgctacgtatctgacatgcaacttagggtagcttagccagctgccctcaatgatgatacctctctaattatagttatgttgttcatgatgattaagtacagacaatatgagatgttgattcaaacttcacttttttgtatggttaaaaatgagattcagtagaatcatcttcatgcttcatcatgatgtttaagttcttagctgattgtatcatgtgctctcatgtctcttggaatggggaattagctttgtctttttcttcaggttgtttacatgtgcctgattgttttagcgtttttgtgcacttacattgaatatcgtgtatgtgttactagatggatttcatacatgttttgcattacaacttatccaactccttaaaaagaagagaattagaagatttttcaatggtaccaattatcttgtaaagttgatagtcagatggttacggagcctcgaccgtgtattcgactaagtttaaagaaagatgaagctaccatttaactcgttaaatagacatattcaagtcatggtgcccatcagcatgtgcagagtatggcatggtaataagtctaattgagtgtaaatttttatgattgatgcagttgagctatatgctgcattgaaatgcaatgtaaattgaactaaaaggcaggaatccccttttagtgactctttttcacgattcttttggtaaaaaatattagtcgatggaagaattttgtgaccaatttgaagatttcaatgtcccaagtttcttgtttagtatgtttcattgatttccaagaatctttgtgaagctatctagtcttcagccttgtttacatgattactagaagatggtgtgcaggtaacgtggttgaaatgtaataattttaagagttggtttgttgaggatagtgtttagatctgttctattatttgtacctttggtgtatgcattttcatcccgccccccctccccccccttatgtaagtcaaaataaggcccataacggcactcaagaattctacatttacatatttacactgcaacatacattttattggtttttcaggatcgtttctctcccagacaac

SEQ ID NO: 9748 - DNA, 2304 bp, Eucalyptus grandis
  Intron number 1 from transcript Egrandis_v1_0.018834m (loc us Egrandis_v1_0.018834m.g) derived from phytozome v7.0 (c hr-ID scaffold_8; pos 12373483 to 12375786 reverse strand)
gaagcggacgttcctcacgcaactcagcggcccaagtaagttggagagagagagagagagaatgggagagaaattattgagtgaatcgtatcgttgctacgctgacattgacattttcctttttctcctttttttttttctttttgttattgcttctcgcatttaactctatcgatttaattgatatcattatctccgagaaaaaatacgcatgagattgtttttctgtgtcatggaaagaggtgattagtggagaaaatatgtgaaaaattgcctatcacgaaaataaaaaatatgcaggttttggtttgatgcataatatgcctttttaattttaagaaaaaatatttcaaggatcctctcgtattcaattcctacattatttaagctgagtattttcgtgatattattattagctaagtttcattgaatttttttttagggtgtaaacatagtgtaaaataattttttatttgattctttttttgggcaaagggactcgatcttgaaatatatatttattttattttatctgattacattacaagatcttgaatttttcttattcagagtatatatccatataaaatatatatatttgatactgagacttttttcgacactaacttctagaaaataaattttcggtttataatgatcgttgcaaaaaagtaggttttgtggcatttatttcaattatctttcggtttataatgattgttgcaaaaagtaggttctgtggcatttatttcaattatctcaggacgttcgtacatgtgtagtgcggtgccactttttgatatgacccggcaaaaattgatttagaccggtagataaattcttgaaaattcgatcttaccaaaaaaataatttatttatatacacaatctattatggaaaaaacagaatgttgtcattcgaagtttttgatcatgctgtgacctgattgaggtgaaatcctggaggtagttggtggatcctctgaacttagtccgaagcaatatcttttctattggttaaatgcaaagaacgatgatacggcaacaaacaaatcatatcgtcttgagttgtgtcatgaatctctagttagattgtatgatagacaccgacaatctcatgtgaggcaacccaatgaggattcgataacagattcatgtacctactaatgaacggatatgtatgattcatattgaaaatttcattttgacggcaagacccttatcataatgtttataggaataactatacaaatcaattgtcccgtcctttcactgaattaacactatagaagttgagtttttggcgtttggattttagttcttgacaagcttgtcctcgtggctgattcattgtgggtcaaatcaatgggtctgggtaaggtggctgatatttccctttcaaaacgtgtggagaggatttgctaggttgtaatggcaaagttgggggggaaatattgactacttaaagacttgcaaatatatatgagaacacactaacggttatcaataaatgcaatacctagatatttgccctccataatggggcaactttcccatcaccacacaacacatcaagcaccaaaatcttgctggcattaaaaaaaaaaaaaattgcaaatcattagcagcatgaaaatctggattttgacgaccgtagccagagtcattgcccacccgtacccaaatccgtcccgatccgtttcttgttgttggcttttttggttctttcgaatttactgttttgccattcagttcatcacatgtggtatcatataagttgctaaattgtgatcatataaatgtatggtcacttggccttcctccgtgtcttgaattagattttaagtcttggacagacaagaaggttaaggtttggtcacttgtcattagtagttggttcctccattcaagtgctcgatctcaagctgaagtcgataatggtctgaattaggtcacttctgctatgattcggccgtgtagatcctgcatgattcgatcaatttttcaaagatggcattcctatatgtaatgtcattcccatcatacattttccagatctagtcattcatcgtctcggaactacattttcctctttaaggagtcaactttgttaagatacacgctacgataggagggcccatgtgatatttaggcgaactcgagagcatgtcacattgtttgtctcatggaattgatcaggatatccatcaaatgcattgtgaatccttttgtcactgatgctctatgtcctttgcaagtttaccctcgtcctcctaagaagatgctttcctaaccggcgcaggcg

SEQ ID NO: 9749 - DNA, 1510 bp, Eucalyptus grandis
  Intron number 2 from transcript Egrandis_v1_0.000643m (loc us Egrandis_v1_0.000634m.g) derived from phytozome v7.0 (c hr-ID scaffold_6; pos 47910540 to 47912049 reverse strand)
gacttggtaagttgatcggtgattcctatctgtcatgtttgtattccattcaatgttctacatagtgaaaattcttgattctgaatgtcctgttcttaggttctgggaagtgatttttgtatttcacaaattttctaaagtcactctgctttcaatttccacatctaaaggctggtggcatgttttataatttatgttgtagtaagatcttgtatgtgatatagatggcaagaattcatgctaggcatgagacaaaatcagaatttaagtcattgtcgatatatcaatgaagctatttgaggaccatctgtcgatcagatttgtgattgtaggtagcggatagaaggtaaaattacctttgctaagttaaactgaaggatatttaagaatacatctattctcacattctataaatggtaagctctggagaagctgtagctatgcaccatggtcattactgaaacgattacttaccttcagaataagtacacatagaagaatacaaacgtgtttgggctcgttatcttattactaaactgaaaaaaaaaaaaattgaaagaattttatcaatcatttctgttgaaacgattactcttggtaccatcagcccattaatattatgtttgtaaaaagaggattagattgtgaaactacctttgctgatttgaactgaaggataactgggagaattatacacacgcccttgttgtgctgttatatccattatatgcaatatagaatctgtggctttctatctacagttatgttgcagggtaatcgaccagttttgtaagaactattactgggatactcttagaggaggatacgccagagcagaatgactaggttttgcaatatatattattaagtcaaaatgattacacctgctgaagattctaatttcagttatggctgtgggcatgttatcctgattacctcttttccggattttgttcaacttgcaatatttctatcttgaaaaaaattaaaaccatttttaagtctcaaaaccaatttaagtttgctacttgagtgattggtaatcaaaactatagatatgagtatgagctttataggattatattgtaaaaatctcttcttaaagcactcatttatatcagaacaaaggctgctgcagattgacaagtatgcttgaagcagagtcctcttttgccattgcatgatgtataccagaatttgagttgctatatatatacaaaacaaatcagaggccttgtttttgtagttttttcagattttacaatattgttaccattgtgtaggaaccactttttcctagattgttggtttttaactgtctgctcattcattttcccactcctaatgtatggcaataacatctatgtgcaaacaaatagctttaattacttctgtttctatcttcagaagatttagaatggtgcgaatgtgacctttttcttccaccctctctttgttttatttgcttgtgaaagggaactgcagagagttattgggatcttgcgacatt

SEQ ID NO: 9750 - DNA, 1022 bp, Eucalyptus grandis
  Intron number 1 from transcript Egrandis_v1_0.003456m (loc us Egrandis_v1_0.003456m.g) derived from phytozome v7.0 (c hr-ID scaffold_11; pos 44937772 to 44938793)
tctctctcttctcaacttgctttctctctgctcaggtccgatttcggtctgtttttaccgcttcgattgtggcgattctacttgattttagcactttggtgtgtctcagtcgctggaatctactagttcgagtgtttccgacaacagcgcttgaagaattgggaaatgtagcttcagttatatttgtcggtctctgttgatagcaataagaagatagaagattagttttttcgcgatactttgaataatgctttatggtttattaaaaaaaggaaaaaaagaagaaaaacttgttaatactagccggccaaatattctaccatgcgatattctgcgataatgtatggaatagactatctggatagatgcctcggtcgttgttggtgaccattacagtgggttttagaagcgaagctactaagcatgcgttttgactgacacggaatgagttggaatgctgtatttgcctttacgtgaagtatgttgccaacaagagaatacctaaaggaatccattgcttgttcctttgcttcaacagaatttatctgagtaaaggaacatactttgctcatatgtcagcccatgaaaaaaaagggcattttaaataattctatttaacttaggtaacgtgttccttttactgtgatttctgaagcaccaacttttccttgttcaagctagaatgaccccatagaagtaattcaaataaaaaatgccgttgcattctcttttgaagaactcttgatatgcataaatatgaagatgcctcattacctgagctaagccacgtatttaactaaatggttctgcatattaaaaaggggtgacatgcatagccctccactgttttcattcacatgaagatgaaggagttaattcataggggcttttatattatttctatttatgaactagtctgtaactttgaaaaagctgggaaaacaaatgacccacgtattttaacaggttgttttctttttatgccagggctcccttcatcacatatatacttgtttccctcc

SEQ ID NO: 9751 - DNA, 1365 bp, Eucalyptus grandis
  Intron number 2 from transcript Egrandis_v1_0.033209m (loc us Egrandis_v1_0.033209m.g) derived from phytozome v7.0 (c hr-ID scaffold_2; pos 8487192 to 8488556)
ctagcaagagcatctcagcaggaagaggaaagaaggtatcgcatttttagtcatttttgtttgtatagccctgtgacatgagtagtttaagttcgatgctgtttttgctcttaacaactgtgcagttgattggaactgttactcaattgttattaccataataaagaaattgctcgaggaagaggagaaaatgcggtatgactctcttcttctgattctaaggaatgtcttgaaacttagcagcaattagtaagaagcatgtagaaagcaacaaacaatatagaaaggcacagaatgtccaacgaaagtataacatgagtaagaagagcacgacaaataatgtgtagaaatgattagcttgcgtaccaaaagaaattagagaatacgcatgaaattctcaaaataattaaattgaaacagataaacttttttgcttaagggtaaaaaaaaaaagaaaaagaaatcggaattagtactcataatcatttttatgaacatatgatggacaaggtaagaaaacgtggagcaactggttgataatattgattgcaatcccaaacaagctggaaaagaaaagaaaagaaaaggaggaatacactgattagaagtgaaaatttgtaatttcgaagggtagagatcaaattataattaaatttcatcatcagttggttgaataaatcatttgacttgcaaatattgctgcaagttgatatcaggggttatcaatttattatctaaagttcctcagttttgtatatcacgattaagatacagtgaaaagaaaaggaatagccatcggtggttgttgatataaacctggacaagctgatgtgttgccaaatcacgcgcgcctgttgccccaactatagctataggtattatgagaatatgccttaacgaccaatggttaatttgaaggaaataaaagaacttttgacttgtttgagcattcaataatatcctttcttgcggttttgttgtacatgagctttttgatttaaaatctctcaaaatggatgcatacatatgcaacgacaataacaattggtccttttctcattaattgggctgcatggatcatcttacaataggatccacgtcatagagattcagcaaaaagggaaatgtatatatgaatttgttatacgagtctgaaaaagcttgtatcttgaatttgagctacgggcttgcaattttcgatgtattaccatttgtttagttcagatttatgtatgatcatcagatacctatgttgccttcaatctttttttttttaaacattcgttagggtcttattacatttctttatgggctgttctcttttctttctcttgacttttcagattccacatttggctgccaaat

SEQ ID NO: 9752 - DNA, 4660 bp, Eucalyptus grandis
  Intron number 2 from transcript Egrandis_v1_0.013609m (loc us Egrandis_v1_0.013609m.g) derived from phytozome v7.0 (c hr-ID scaffold_11; pos 44230566 to 44235225)
ggtattcagttgtacatagatcctcttagaccaaggtaaggtcatgtcttctgcttggttcgttttagttattacctgcataaggctctaatgagagtgttcttactttttgcttcacttggtagtggcttgacacaatgccattaaagtccatacatctttgcataaatgtgtgcttctaatatgtcgcaaggtcatgataatcttctaggaacttgcagctactgccactacctccacccaactgtagcatctttttttgcttacctgaaaacttgcatcagatctaaaatcgatctttcaattttaaaaacttaatgtaagcaccggccaagtgtttttttttaattctttgcttggtgaccttgaaattaagtggcatgcaaaccagaaaggcttttgcaatgaagcaaagaacttgatttcagtgcccaatagagtaccgagactggtacttgccttactttagaatgatataggaataattacacaaatgatccctgaactttagcccaatatttgatgtggttctctgaactttagcttaatatgcaacattttccccgaacttttaatttgttcaatgcggtccctaaatttttgataaatgctaccagtgcctggattattatatctctgaatttaatctagtccctggattatctagtcctttgctccattatctcatgtctttactaagtaattatggtgggatccatatgtccattagtattaaacaaaatctttgccattctctcattggtcattattttttattttttttagttttcaatgttttattgcatatcagttattttcagttagcaattatccagaaagaaagacattgtactattgaatcaagttaccaagctcattttggcttgtttcttcttgctcacttctgcagtggagcatcaagcttcacaaaaaatgtgacatgctttgccacataggtgttttaatattatcgactaaaagtcctatctttcaacaattcttcttttagaccaagtccttgggcaaaagatgacaactacaaaaattgatgaattgttgattttccattgttatatggtcctttaaaatgtacttgagcaaaaggaattccgtgccaatctgacttgtctgctttcatggttctgctattttctctgccattacttgcatgcgagcaagctctttcttgtgttttcattggtaatatctacaattatgtttttacttgcttctcttttcatggtctatagctatctttcttgcacgtgttcttttgtttcatgcatccatgcttataaagctaaatcattattttgcaaaagtgatcttcgaagctaactcctaatctcaattttatggaatttactatacatgcaggagctccttttatgtggttcttgcaaactgaaaaatttatacatattaggacttcaatttcttgctgttggaatcttagtagtagtagtgattgctatatgttgtcatatgcccatatatatggatttttgctctttctttgaagcacgtccagtgcacctgactcttgcaccttaggctcttccaagagttagatatgtgtaagtcctgccactgagccccaattgaaaggaacattttttacttaaacttctggtcaattttaagtgcttaagctgcgtcaggcttgcctgctatatcttagtcatataaggatctctcattgatacgaaaagcaatctaacaccagtaaatgcaaggacacgtggggtgtacataacaatttaattgaagttttatagtgatggtgcattatgcttatgcagatagatagatcaaaccattgtaagagggaatctggtcgaaaagctggttatcattgcccttagtttttgggcggaaggggaataatcctgtgcgcattggcatctagagtttttaatgacctacccagatttcttgattgattgatgcctcattaggcagggaagatactgctttctagtgttatctggtgatatagtttgctgtttgttttgtggggcctggttctgctaagatggtgtaggtaccactttttgcgtttggtggccattgattctttttggggcttttcactgtaatggtcactttcttggaagatgattgcaaaatttggctttatatgcctcatgaatctaaagggacaatatgttaagttcttttcatgttccttgaactaagtagtatgatggcattgtatagatgcatgcatgataaagctggaacatttggtaagttgtggtttttctggctcacatgcttgtgtgctcctttaaggggtgtccagaaagcctgatagacccaaaatattgaaccaaaattctctcaccaagtcgaaaatttccagatcagtttttgggcaggttgttagatctgttcggcctatgaaaataaaaatcagttgacactgcccaataggcctgttaaatttaaaaggaactgcatcccatgtgcagtgttcaagtcttctgtctcttcgcacatgcttcctgccttcaagctttagtttggtgaaacaaaaacttttccagcaagatatagcacttatagtggggtctcaaaaaataagtaatttctaccaggcctttgtccttttttgtaaggatttgtattagttggatcttctagttatctttgttatgcttaatatctttagtttgatctgtatatgtcttcattccaccctttattcgagtagtttttgcttagccaaattgctggaggcctatggttttttgaatccaatcatagattttatgccagtaatactcctccttttcctcttagcttggcaagttgttgtaagttttcaatgagatctttagtactgtgctagacatgatttattcggaaaaacaaataaaaataaattgagcaattgataagataggataagtcttacagcatgaatcctcaattcaaacaattcttagatagttgcaagataaagctacccacggtctgcccatttcatcttcaccaactcacttgggatgctctgcctcacattttgcttcagcatttactttgttgctgaattgttttatttgattatttttagcaggaagacgtaactgctatatgaaatggtgctcgtatagaaaagaatgaaataaggaaacagaagatttaacattatggtaacacagaggagttggtggcatagatattgaagaagtttcttttttatgactagcaattttgcacgcagaaaagtgcaaaaattgttagcttaatttcccaattccttaaaccaccagggcaaggggattgccccagtggccacccttcccactagggaaagaagaggttgggagttcgatttcccaccttctcgggaggttggcatggggacgcatgagtgaaggagtaggattttgcaaccgatatacagcacatagcacatggcttgtaaaatagatataggataagaacaaaaaaaaaaaaaaattcctatttccttatacttgatgttaggcaggagaacttctagctttcctgcttaaatcaaggtctaggagtcataatttttatgcaaggctctatagtcggacacatttctttgtgtcttctttgaactgaataattcccaaccctattaatgatggacattaggtattggaacattcttagaggccctaattttctctttgcggcactagcagtgaaattcatgagggatgagaacagagccgatctcttccacattcttcttaatccccaaattccattaagctcctccctgtatacttgcctattcccatccttattgcccatggataattaaccgttgatgcatggtaaatatggatgtcctagcttaagcttcaggtttcctagcaatgctgcagattcaaagttgagacatcaaaattcatgtttgaactagaaattccttttcttcattggagtgtagagttcccgctgcttaaaatgaccgaatgagttggcatcgcttctccttttttaacagatttgaacaaatgaatgctggatacacacacgcacacccaagacttccaaatgaacaccttgcctctggaagtaattgatgaaaatcatccctgcctcactaaaacatttcctagtgagctttctcttgctatttgcttaactgcttgcagactgtttgttgggaaggttgtagttccctttgtcacgcgacaaaagcaattttttttttgggtgccaagatgtgaaaaacaattttcatattgtttttgttccagtgataaatatgtccattaatatgtgttgtttacataagcagaatcttccttgtcagttctttttattaatgtagtgttagcaataatgtagatgagctcatcctttcatagttcaaatgcattgtttgcaaagcaccacttattcgcaaaatatgagtgctagtctttgggggaaacttggatggtgtatcccttgcaaatgtgtcccttagatatccaatcggccaggtttcacgacttgctgtgcacagttgatctctatgatgtacaaaatggtcgaaaatgggtacatttgtagaggtttatcctatggggaatcttattgtgaaattccccttctgttgcttctttcctatgctgcatattcatttagtggtgtttcacaatgtacaggagaacgggtgaagacagtg

SEQ ID NO: 9753 - DNA, 1322 bp, Eucalyptus grandis
  Intron number 5 from transcript Egrandis_v1_0.001655m (loc us Egrandis_v1_0.001655m.g) derived from phytozome v7.0 (c hr-ID scaffold_848; pos 7093 to 8414 reverse strand)
aaagcaagatcaaagtggtgggggaacaatttaaggtgcgtatttacttggttttcattgcttatatttatataattggatgatgtttgttgttgtccctaggaaaacatctacaattactatattcgttatatatatcaaaacatcaaacgtagtctgtcaatctagtaaatgaagcaatgcagttaaaatcttccaattgaaaataatctgcctaactgacaacttgttggttacaattcgaaacacctgtagcaaagatttcatttttcattctcgtacttcatctgcttttctgatcaagtccatgggttttttattttctaaccaatctagtcattcttcttttacaaagtgtctaatcaagtctctctgatatcatatttggccaaatctagtcaatgcgatcattggagtatgatgtggattgaatattgcctacatgaacacctatcatagaaagtggatgagtgcctgcatatgtacgatatttaatccgcgttacagtgtggatttgtccaaaggccacgccaactagattttggctagattcggtattggagagaaatgattagataatttatgtaagtagaaggatttgattagaaaaatcaaaagtacagaaagtttattagaaaaagtaaacgcaccagatgaaataaaacttttccttacttacacaaaaaatgacaacaacgagctcaagcaatcatgattttgagaagaaaattgaaacaaaagcttcttggcttgtaaaattaacatttgagcgctgaatgtgcttaagatataccatgagacttttaatttgatttgtaggctttttatatagttggtaatggtctatgcgctttcaaagacccttcccatgagagaattgagaagccacgtctttagaactctttggatggtaatgggtaaatctctttttcttgttaagtcaaaatattgttagcaatggaatttgacagttacatatgtctctttcaccttttaacccacacggaacgagtttgcacttcagaacagcagaatcgcccctacgtaatttattcaggaaaattgtaaggataatttatttgcctgtgaacaaaaagaagttgttactagttcatccatgttttgggggtaatgcttatgaattgtgatgtgtggaaacttttgtatatagtttcctagtatgtggacataccactagttcttttaactaaaaacttagccagattttgaattgaatatttatcacagttctttctttcttttttttatccggaatgtttcttgcaggacttcaaaaaattgaagttcattaactttagtga

SEQ ID NO: 9754 - DNA, 558 bp, Eucalyptus grandis
  Intron number 5 from transcript Egrandis_v1_0.011019m (loc us Egrandis_v1_0.011019m.g) derived from phytozome v7.0 (c hr-ID scaffold_6; pos 16434621 to 16435178)
tacaagccaaccattcagctcaggtgagattaccacttttgtaccagaggaggatttcttgtttgagtcttacattcttcaattattatcaatttaggcattaaatcccaaggagtcttttatgtttctgcgttgctccatgcatactcttccttaactttttccatttcaactccttccatttctttgcacaaaacatattcgtagagtcttctcaacccagtttcatgatgacatatggaggaaaaacagcgctcttgaaaggcacacttaatttgattagttatttactgtgatttgatatttacgtaatgttatctgctgcttcatctctatacataagcgagctgttgatgcataatgtgtaaaaattagttgtctgttgatctcataactctgaaaaatcctatggagaacaactcaccaattctgccacctttaacataggaagcatctgttggtcactgacttttctcttcttgagtgtcactagacaagaatcctctttgatctattcatgactaggcgcttacactcttgtatcttgccatggccagt

SEQ ID NO: 9755 - DNA, 1931 bp, Eucalyptus grandis
  Intron number 5 from transcript Egrandis_v1_0.011482m (loc us Egrandis_v1_0.011482m.g) derived from phytozome v7.0 (c hr-ID scaffold_2; pos 55529294 to 55531224 reverse strand)
ggccaccctccctgtaagtttgtaactctttcattctctaaatcatgatgcttgggggaaggttctccatgattgttatgtttgtaatgccttgatgctattttgggtaagatcttctcatttacatgcaattagttcatttatgctggctgtcaagcaaaaatggcagaaaatttaattttttcctagagggcttgggatgttgttgctgtttttcaattgttttactggatgggtggctcattatttttcatggctgagttaacaaacctttttggtacacctaaaaaaatagaggaaagattagacaatatgagaactgggaatagcaaaggttgattggggatcgtgattcaagcatatacatacaaataatcatcttacgttgctctctataagtagccagtgagtttccaactcagagctggttaatgaccagataagttcacactgtaggaaagttccattttactgcttttattttctttcattgttctcaactattggcagcaaatatttcctccaatacatgtaaaccttctcttttcatcctatctactataaaatccatctggacaattcctactagctgaggagaggaaaccacgatactttttccagaaagctggcattacttggatatatggaggcttcgcatgttcccaatcctttcaagattcatcgaagatccatgttaccttagtccttttagctaattaaagtttccaatagagtgaataccaaatctgctctctttttcgcttgcctttcctaaacagggtgttttgaaaatcagactgactagccagttcaactgaaaccaccaataggattgtttccttcgaactttcactcaaacgcaatatttggaaaactggactaggtcaccattgacctttgttctatggtaaaacctggcattgtcatccatctatctcttgatctcggggtctctatggctaagaagcacttatggagttgaattgactcaagcaaattgtctggatggaatgccgactttaaaaccctttctgttctttatctagtgattcatcattataatcttgtcatcagtgaaatactgataaacaagctttgggcaggagagagagatggggttttcacactacttttggggtatctgatggatttttgctagataaacggatgtccttaatggtttcacctgtcaaagaattggaggagagggtctaccaggggttgagggtcctctcatggtcttgtgcttaattagggttttatgttgatgaggaaaggcattaaaaaggaaagtctcctaaagtttagaaccagggagttgattcttaagaattaatcatcttcttttcagctagaatttagtcttggtcaaagttctgctgagtaattattgaactgggtctggtagttgaaccacagacctgcaacttgattgttccttgacagatacttgtgtgcagaatggtggttgtggaacgtgtgctaaattgattattgaagatacctgtgtgctacatgatgtggatttattatctttaggatcaagcctatttgagttgagtcacttgacgatgtaatatttggatattcttaacattacctttcattgactctgctaattttgtttgtgtgattgaaagacggaggatgcaattttggttttgttctgactattaacctattctctaagtctccgtcccttttctcctagtcttgctgaagtcgtactttttccttgactagctttcttgttctattgtatttgatttttgaagaacttctattaatgatgatgggacttgtgtctcttgatagtttatgcttcattaagcatttatttatgactagtgatgtatcatctttcaaccagtagtgtatgctaattgcttttctgatatttttgcttctagcacttctgggttgcaatatct

SEQ ID NO: 9756 - DNA, 1341 bp, Eucalyptus grandis
  Intron number 2 from transcript Egrandis_v1_0.011300m (loc us Egrandis_v1_0.011300m.g) derived from phytozome v7.0 (c hr-ID scaffold_8; pos 84568 to 85908 reverse strand)
atcgcatcaaagagatcaagtcccgccttcgagtggtaagaaatatcattttgaagactatattaactcacttcttgcatcacataagcatttctcgatcttttagcattttactttttaaggtacactttcgtctataatcttttgcattataatgatcgccttcacataattagctgaaaagtattattttttcttacttatttgtaaaatattcgtagttctagaaagctagttattcttcttccaaagataattttggcatttatttacatgattttaaatataaatgtctagatacaccattgattttttctaaaacaaacccaccaatcaaacaaaatatttaggactgatatcacaaaaaaatccaaactactacattttatgacaaatttacctcaaattaattttttaaccacaaaaaactcaaaattgatacacccgttacaaatttacccaagactaatttttttaacacaaaaaagcctaaaccagtacatttgtgacaaatttcacatgtgaattccgactctcataccctataaggaagcaaagcaaaagtatgaaagtgagagttacagttggagtaaagtaggatagacaaaaaaaaaaaaattctgtattgcacaaaaaacccttaaactagtatacatgtaacaaacagaagataaaaccttaaattgatagacccttcaattactatgtgtaatccagcttaataatttgacaataaaatttaaatttaatacaaagtaataaatagtaaatttatcacaagtgtatcagtttggaatttttaataataaaaaaaattagttgagagtaaattgttagagatgcatcagtttagggttttccatgatattaacctaaatatttattaaagtgattagttcacttgcttttttcagctttagattatgtctcttttaaaatcaggtcaacatattgagcgtttccttgccttttccatgacaattaatacaataaagggatattagtagatccaacattaaattattcttcgaatttattcacatttaacaagaatgataagacatttgagggagatacatatcaacatcacatgagtggacgggaatcaacctcaaatgaaaaactctttagtagcatccgacgatccacatgcaacattatttcttgaactgctgtcaagttgaaattgtaggtatatttactcttttaccatacagaaatcgattgatactcctagggcttcgaaccaatcgctcacgcaacgagttcgaggccaaaaaactaacatatcatcagtcagtttcacttgaattttttctttaataaaacagactgtcaacg

SEQ ID NO: 9757 - DNA, 1742 bp, Eucalyptus grandis
  Intron number 8 from transcript Egrandis_v1_0.009528m (loc us Egrandis_v1_0.009014m.g) derived from phytozome v7.0 (c hr-ID scaffold_11; pos 45362814 to 45364555)
aaacgaacaaaagaactaagggccctaacagggtggtgagttctttctatgaaggtcaattttttgtttcgtactctggcaaatttggtctgaccacttgtatgctggccttttagatatcttgcaatgagttgtcgataccaaaatactcttctttatatgcccatgttttaattgaatagcctggtggttttccttatcttagattagacatatgagtcaatgcaaaatagtctatgagaatttgatctccatgagtttttttagaatacaatgtagaggcaggagtggatgcaaaatctacttgaaattgtccacaaggaaatgttgaactaactcagttgattggaagaagtacactgtctctaagcggttcaattgacatgaagagatgtgttagaaagtgcaacccaaaatttaagctattaggtggaggggactgcatgtatataaggcccacgtaatcctctggacaagtgatgtgggatactttggcaagatggtttgaatgaatgtgagtcgtagtaaatggaggtagtttggtaattgattaggctaagtagcacttagaatgattctgatcaactcttctcatctattgaatggcatgtggtttgataatattaccatccattacatctgaatatcctagacatggctgaacatctaaactagagcaactgaaagtaatgccttctctcgtcttcttatttagtcattccaagttatatctgtagtactgaagctaagaaatgagatcaagacatgctaggggctgaggtggtgaattgaaactactgattcaggtccttgatacatctagttggcaggccaatactttatattggtaaacgttggattattaagtctgacaaaagagattaaagtggttatgtctcttatattggtacagacatccactctaacagttgctacataagatccatctgatgctccttttaaagtagacctagtcttataacgttaagcgcagcaaaagataagtgaaagtgatgcaggagcataatgcactatactccaattgtatgcaactaggcatgtgactgtgaataagttggatggctgagatttggattttttttcttagataccgactacattttaaaaaaattatttaattaaattctgcttaattcaccattaattttggttcatttctgccatcttttgcttctccaactatgatgtttttaccattgtcctatggaattgtgaatgatttatgcgttttaacgcaaaaatctatactctggggttggtggcctctctttcaggacgtacgatgctatatgaggatataaatatcactcaattcttggttggcatttttccgagtttgttacgttcgaacttcaaaaggctagttcctgcgtataggcctttgctttgtaactttgatcaatcagtttctaggtgaaaaggtcaagattaatgtgtttcccccatatttctttgcacggtaaagttagtctgggtccagaagaatctttcaatgtggtgtgctgataatggggtatgtggaggcctaaacgtttgcaatatttcagctatgctagcatctgacacatgtattagcactgcaccatctactactatgattcggcttaacactactggtgtgatttgaggcacagctaccttggtatgagtgcagacatgactggttgttcaactttctaaacgcaggaggtactacttcagtctatttctcgaactgtcag

SEQ ID NO: 9758 - DNA, 8110 bp, Eucalyptus grandis
  Intron number 2 from transcript Egrandis_v1_0.031783m (loc us Egrandis_v1_0.030430m.g) derived from phytozome v7.0 (c hr-ID scaffold_3; pos 16697393 to 16705502)
gtacgcgtaagcacccttttctctccccattctttctttcatgatagagttctttgatttcgagatcagtcgaccgatcgtgccttatcttgcttctctctcttgaatgcagggatggcgattgatcaaggaattgcatataccctcctgttagttgcccttgcggtcacatatctctttcactagctcctcttaggtgcggccattcattcgatctgaccaagcgagccgattctttgggttggtttcttcccctgcgatggacggacctccattaggtccaattcgcagcgtgttgtgacccattttgggggtgctctgtagtccttgtaattaaagctatgtcttttgagaaattaaattatcgagccattttttgctaattccatattgctggttgatttatcctatggtcaagtgcttatcgaatagtggcaatgtgcacatgtttgagaagaacattggtggcgctaatcaatcgatctactgcctcctctcctgccacacgtagtttgctttaggaaaacatttagaatacacgatgaatacacgatgcaatctcaatcacaagaaaggaaaagaagatgtgaatattattgtaaaagggagtccataaaatgaaaaatggggttttggcttatcaaattgttgaaggtaaacatttttatatgaagtttatcccccgcaacaatttgccaagtctctgtaatgaatatatgtatctcatttgtcattgtttaacaagttctcttccaaccatagatgccggatttatctatctgctcgaccattttggttgaaagagctggtagggatttaacatatttggaaattccgaagaagctgttgaaagaattatagttaccattgaggtcacttcacatgcaatggccaccttgatcacgagagaagggaaatgaaaatgaacgtcacttacaaagcaaagggtgcgaaatagaaaatcgataactttattatttgaattgcttgagataactttttcatgtaaattttctataccttgcaataacctcctggacctccaaagctaatcatgtagccagaataaagtatagtacggcgatggttcatcaaatcataaacattggatctgtccacccacgtcgtcgtcttatccggaggtagggatttgccatccgatcgaacccaatggagttgtcgaaagacggtagcatggtcgattgtaccatcaggcctgtggccacttcccatcggtggacagaatccattgcttccagccatgccaattcctccccaagctgtgtgtagtgagccgttgcgcaagtaccggaatagttcctttggccaggagcctactttaattgctttataggttaaaagcaaccaccaattcccagcaattttatcctaattagaaataaatattgataataagtgctagtaatgcaaaaaatgcataaattattaacactagtttatttaataatgatatcgaaatatgcttggtattaggggccatgataattaataacatggatgattatatgcttatacgaataactttcagtagggtagaatgatatggaaagtttctaaatttaaagaacacaactattagtctctaatatattttagcaaaaatcattatcttaagaaccttgaaaagatcagacatacctgctggatatggattacaatctcatattgacttccaccataagttgaagtaggacctactggattaccaataattattcccctatccacctgcacaaaacccggacatagtacattgtagcacccattgcgatggccatcaccttatgaggacaatgctttggtcaataaatttcaaattatggttcagttaaaaattaactattatcgtcatagctcacctgtccaatatgtgaacgtccgagaaagagtatcgccaaataattgtggagaaacctaggaaaataagagaatttcctcttagatcatttcaccacatattgaacttcttctgttgaaaaaagaagaagagaaaaaacgatgacattgacttactaaaaaaatcacttaccatccaaccaaatgcgatcatgctaacatgctctgggggaccagtttcaatccacatattatgtgcactgaattgatcatgagcaaccgttagattgtagaccgtcacatctccacctcctccatatttaatattttctatcatgttgtcccttagagataccacctacaattgataacttgtaacttagattgctagaaagtgaaggaaaactaaataatctcttgctcacctatgcctaccggtcttactttaaaagatgtatcgattttctttttgtacccaaatcatgaaaacaacatattttgagattgtcataagtggacatttgacatgtggtctcatgaaattcatacgtacataatctcattaaaagatttgaataaaaaatcactaatgatattgtgatatgcatgtgagcatgagaaagagggatagtacatgttgatttgaaaaaacagtattttgtctcatagccgcaacggacggtatcccgggcaaggatcttgcccttatcagatcttcttttgttactcgacgaatgggtactgttccaatcgggcaaggttcttccaacccaaatccaatcgattttgcatttggagaagtttggtgcaagctagtgacatgtagattcggttttgtctacaagaagaaaaaactgattatagaagtatcaagtagaccatttcacctaaattatccgatgttggtctggatatttatcggttgatttaggagacaatgataaatttttacctgaaccttgtgatccttcagtagaggatgatcgagtgccggttgtttatttatatcaacacagtcaattgtgtctccttctttagtcttgataaaatcaaacacagttagtcattcgtcgagtagcaatcatacttcaaagattaacgtgatagattgcaatatcttcgtgaacttcaaatgagactattgcagaaaaaaggtttggagaaaaattaccaaaaaggtcttgatggatggcttgttcatagtcctgacctgtctttccaagtctaaatcatcctcttcggaaatatatgccatttcacacagagaaagactgaagaaaaggagcagcaacggcgcaaattccacattcactttcatggtgacaaaaaagaagcgtaaagtgaggccctctagcggttagctacgcttgtttatatattgcgggaacttttcgtctattatcgcaagggcaagtggtaaaaaggttcgacattcttctacgaggtcataagtttgagcaaagtaaatagatttgaaagatggtaaaagatgaatgttttttattccaaagatgttaaaagatagatgtttgaaagacaagaaaattgtctgtaaataatgcgtgctaaccaccatcctaaaaaaaatgcatgtttgccacttgtcatgcataattactgccataaccaatgttattctcaacgaccggaaaaaaacaattttgcccattaaagataaagacaattcaggtatggcagtaactaggtttgaaagatggtaaaagatgaatgttttttattccaaagacgttaaaagataaatgtttgaaagacaataaaattgtctgtaaataatgggtgctaaccaccatctagatttgaaagatggtaaaagatgaatgttttttattccaaagacgttaaaagataaatgtttgaaagacgagaaaattgtctgtaaataatgcgtgctaaccaccatcctaaaaaaaatgcatgtttgccacttgtcatcataattactgccatagccaatgttattctcaacgaccggaaaaaaaaaaaaaacaaatttgcccattaaagataaagacaattcaggtatggcaggaaattagagcatcgggatatgaaagctttttcgtaaaatggtgcatggttgccattttgaaaagagtatatgttagccatttgtttgcaaactccttccacgttcacccgtgcataactagtgttgaggcctatctatcatccaagactaaaaagtgttaagtaataaagggaacaaatttaaaatgcaaatgaaattaaaagaacaaaagagagaaattgaaattgaaagaagaaagtaaaggaaatgtatgacccaaggcatttccatgtagagatggatccaaaagaaactccttagggcggctgggttggccgacaatatatatgatgaaaaacttttctttaatccaaatgattacaaatttcaagtatttagagaaaggtttctaaagatttgatctatttcaaaagtgaactgtgattcctttgaaataacaaaataattgaacttaaaaaaatgaaaatattcgagtaagttttgaaagtgccgaaaatttaaggaatcatgaatgtcagagattcaattttcgttggaatcttctggactcttcttcagcccagctatggacacgggacggtccatggctccattgccagcgccagaaggtccttccaacgatggtacgccgaagcatccttttctctccctgttcctttttttttttttgggtcgaaagatggtagatatctattcatgtagggaaaaaagaacaatccttaacaagggcttcagtacaaagcatgtccaacataatttgaggaggagaattagcccagtttggtgaaaggtatccttgtccgtgggccttcgcggccccatcagttagggcattggcttcacgtcgacagtgttgcacgattaggtttgggaaacagagtatcaaggctgtgcattcagcaaacaaagcacggcagtcccacgacggcatacagcaccgactgattgtctcgataaaaatgagattgtcggattcaatcactaggtaagattcagtttttcctttctatgataggtcttgaagtgtgtataatagcgcttgggtctccgtctcgagtgcaaaagttgcttgaatgctgcgagttaagcctccgatcattctgccggtgtggtctcgagcaatactggcgatcgctcccatatgatttgtaataggaaaggcgccatcaagatttacctttatgatgccttgtttcaatggttgccatattcgattagggttcagccaagtagtcccgttgctcgattcctgctactgggttcgaagactgaactgtgccagagttagagctgtatcaacaagttaatccggatgagtacgttgatggcgaaagacaaattgattccgagctttccagatttgccataatagggcgacgatgctctcaaaatctagtacgtgctccttctgttctataagattagctagccatgcatctatgcggtatgttctgtaatttgagatgttaatctgtacttgggggtggctccagatataatgtgtccaggggcaaaacataaataaatgttcaggggtctcgggagtgtttgatgaacagagtttacatgctaggtcaagggtaattcttcgtcgaaatagattatcctttgtaggtaatgcattttggcataaagactagagaaaaatgcgtatttttggggttgtttttgttttccaaatctgcttccatagcttgctgggtgtatgataggaaaaggaagcgtgagagtttacctttccggatgctttttgcttgatgaaattatagccactcttcacagtataaagtccatcttgagttcctgtccatagaagtttatcttcggtagaagctggccaaagctttatagttagtatttcctcgacaatgtgttcatgaaaagtttggtttagaagctcgacattccacttattttgttcaggaataataaaaccaactaccgtttccagttcctctctatttgctggcccacctagaatacccatatttaaccatttgtcctctttggctcgtctcattttgccattgcctactgaccattgaaacttctcaacaatagaatccctacctagtagaagactctgccaaccccaagaaggtctattccccttatcaacatgccagaaatttgtagaatgaaaatataaggctttgaaaacaccgctccaccaagatgaaggattttgaaagagttgccaagcttgctttcccaatagagctttattcaaagatagtaagtctctaaatccgattcctcttttatcttttctctctttaaggagttcccagcttttccaatgaattccagatctgttgatgttgttttgccaccagaacctagctatttttttgttccaaagacttgcatatagatacaagaactttaaatatcatcattgcatactgcggtaataccagaaccactgatttcaacaaaatctctttccctcctttagatattagattttctttccacccttccaatttagcatttacttgtcctaaaagccaagcaaacatgtcttttttagatgatcccaaatcagaaggtatgcctaaatatttgcccgttttatccaacaatggaacccttaattcttcagccatatttatcttaagagaccgagggcagtttttacttaggaacatactagacttgtttatattaatttcttgacctgtagctaggcaatactgatgtaggatgtttgctaagttttggcattcctagattctaccatcaaggaaaaagatagcatcatcagcaaaaaataaatgggataaagtatgacaccacttattgattttgattccttgtagattgcccatatcgacagcttgctggataagggtggatagcatatttgccaacaaaatgaataagtagggggagagagggtcgccttttctgagtccccgcaatggtcgaaaataaggtagaggttcgccgttgagctttacacttagagaggtcatagaaacacactgcatcagctaatttacccaacaatctttaaatcccattcgacaaagataagcttccaaaaagtcccactccaccctattgtaggctttctgcatatccaacttaaggatcccctaaaatctttatttatttttttcgaatctttaattgatgtagaaccttttgaactatgaggatattatcttgtatatgtctgcctgatacaaatgcactttgttctttgaaaatcaactccagtagccaaggcttcaggcgattcgctagaacttttgaaataatcttatagataaaattacataaattgatagggcgatattgatcaaacctctcggggttcggtgtcttgggaattagggatatggctgttctgttgatatcaactggcatcacgcctgtggtgaatttttttttaattgatttaaaaacatcttcctgtataatgtcccaatgattatggtagagcaatccattcaaaccgtcaggtcctggtgcttgtgtggctcctaattgaaacgtcgcgtgctttacttcctctcacgtaatttctattgtgagttgtgtatttattgctgctgtaactacttgatgacattgcattaaaataggtccatagtttcgatgtccaactgaagtataaaaattcttaaagaaagtaagagtctcatgcttcacctgatctggttctcggatccactcctcattttcattctttaaaatgctgattatgtttctttttcgcctttgtatagtagtggtatgaaagaatttcgtgtttctatcccctcatctcatccagttaatcctggagtgcatcacccaatattgttcttcctgtaaccatatgttctgagttttttctttcaatgaagtgacctgatctttgtcataattgcaaacaggctgatttgtgcattgttgaagttgctgttgcaaaagaatcggactgtggtccgaccctagggcaggtaaagctagaacttaagcttctaggtaatttaatcgtcattcaatagtacacaaagctcgatccagtctttctttgacaacttcctctccacttctattgtttacctaagtataagcacagcccttagtttcaagatccatcaaagcacaaacatgtagtagttcccgaaaggagtgcaacctataggattcatcctgccttattttgcttatctctctcttgaatgcggggaaggcgattgatcaagg

SEQ ID NO: 9759 - DNA, 2358 bp, Eucalyptus grandis
  Intron number 2 from transcript Egrandis_v1_0.003815m (loc us Egrandis_v1_0.003815m.g) derived from phytozome v7.0 (c hr-ID scaffold_4; pos 40247797 to 40250154 reverse strand)
tcaagctcctcaccttcctcgtcttcttcactcaggtccgtacactttctgaatccatgtcctttttaccttgtaatggagggaaagattccaaaaccggccacagcactaaaatgcatcgagccgtgtcgtactgtatgaaaaataagggaagtgggtgagagttggttcgctgacgggcctgtcctcgtcatgaatatcaaaaccctagatatgttaagcctcgaatataaccgacaaattgatataagcattgctcttttccaattcaatccgttttatccccctcttctgtgccgttgttttcttatttatttctgtagccccacctgtgttctggaaattacttgtttgatcaactaactatagttgtatacgtatagaatgtggcaaagacacaaaaaggaaatacgtagctacattttgaagtcattaaatatttacaaaaaatgatgacattgatagttacatttcacttacttgaacaccttctggaaaatatctcgaattgtttaatttccataaacaaacgactaaacctagttttaacttttactttagtcaattatgtttccgtgaaaaaatggagtagaaattatccttccactcatcattgaactactaatcaagcaaggagtaaagtaaagttcatgagctaaatcgactgtctcggcaggagattataggggaatggcaagataaggattaggtcaattccaattgataaggtgggctctgtagttttatatagaatacgtgatgcagttggtcaacaagagtacataaactctttttttctttttttggtcggtaagtacctaacactttaggaagtggaattatggctatggtcagagattcaaaaaacaaaaattaatgcagcgcatattaaaagtgcaatcgataatgttatcttacatgtccccagagtaggtaacaaagcattaaaatcgacagagactacatagaaaaaaataatcgactacaaaaaggagtataactaagagacaggtggggtgggagcatctttttccagtcaagggtgtccaaacccatcagcttcgccaataaatgctaaaaaaatgtagataagataaatacttgctccaccataagtcgtgcgtctataaactgctcatcgaatgtttaggagaaaaacagtgctgtgcatcgtttaaacatgtggtacgtttgaagtcgtaccatcctcaatcagtccaaagattttagcttttgttttataaacatagaataacatctcaagaaaatcaaaacactcgatccatatattatatgttctatatgtgtaaatggcaatgagaaattatatgatcccacctccacttaatttaaaaggtcacgtcgttaggtgaatgttcaatttgatatatcaactgttttgaaattttgagcggattcgaattaagtgtccacacaatttatgtttcatctaggggagatagctgaaagagaaagaaaaagagagaaagacccttccacaaattgggaatttgaaattaaaattcaagatagcttgagataccaaactattaagatccatcatctaaatactctgcagaatttttatccctcccggaacaaaaaaacttaatgattcaccataaatgtttcggctgcaatttgcaagacagagataagactcactcttagtaaattcattaaaaataataaaaagagagaaaaaattatttatcctgtgtagtgattttgagtcgtatgctgttgtttttaagcacatgtccattatgaaagtccctgttgctgttagaacctggtccctatcggtttaatacccccttatgccatattccaaggctttaaggcagaacctgccaaggccaaatctattaaatttagcttcctacttgctctaactcaacccatgtttttggtactttctatctcaacaaatgtagaaactcttgcacaaccgtgaaataatttattaaaaaaaaaaagaagaagatgaaatatatatatatatagtgattttatgagtggttagatggatattatctctaaatttgatttgatgaacatatcaatcatagtagtaggaaaatgcagcagcatggaagcaaatgttaatttctagtgatgattcgaattgggaaaggcctattttcctcactcataagtgatttgatccagtacagtaaattagctgtagaataggaagacgggtgtgttttgtccctccttttgaatgaaaaatggagagagttttttcagtgctaatcattctttctaaccagctggcattgagattctacgagaatgatgagtgtcaatttgttttcagctcgacgagaaggatcgcaacctttcctggaaagc

SEQ ID NO: 9760 - DNA, 2735 bp, Eucalyptus grandis
  Intron number 3 from transcript Egrandis_v1_0.027721m (loc us Egrandis_v1_0.027721m.g) derived from phytozome v7.0 (c hr-ID scaffold_8; pos 17489543 to 17492277)
ggattaaggcactcgtcgattttcttgactgggtatttcttcctcaaccctgctctctctctctctctctctggccgattttccatgcccatgtcacgatcaagttattcaatttcaacttttcattgtcttgcttgtcattttggatggccggcaaatgcatctgttttttgtatttcgtttgtccccggcaacaattaatcactataagtgagatagagtcgttggttgagatctttgagttattaaggagaatacagctatttttaatcttgtgtgcacggaatagattgtttttgaagaattctgcgctattatgtattttggatctgtgttcatgtgtggataatggtaattgttttgttaggttttaactgagtgtaaattttattgaaggtctctgccagaaaaatatcaagcatcgaggcttataatcttacaatatgattggtttgaagtacttattgaattaatggttttgctcctatcagatgtaccttttcttagtcgggttattttgtttgaagaaattcttgtttcagccctgcagttgcagggtaagtggtgctatttagagtttgtgtagagagagagagagagggagagagagagagagaggcaattgagatattttcctgtcagttgttggtggcataacctgctgccttttgaagcagtgtaatcttgggttgctgtgcctgtgatgatgcttactttgttgtcttctctaatgtgactttgcctgagttttttgggatgacataaatttttatcacaatggtgcctgggtgtaaaattataatttgtgctctctatggctggaatatgcttatttttcatgagagcttgtgccctgtttgtggaatgtttgtgttcttgattttaaatggaggcatgcaaatgatgttatcatccgcagattgaagttggcttatgtgagatgcttaaggacattgtaaaatattcttgtcccagtggtggagctaggccatcccttcgtaagggcgactaagaaaattaattaattactatttttgttaaaattttatgaaatagatttttagcttacgatctgataaccatctatccttccaatattatttttttgcaaataacatagtattgtttgagctcgtctcggtgtttataactatagaagaacatgcacttgcctgtgattctccaaaagtaatcttttgtctgagaacaatatgccaacatgtatgtcaatcgacaataaactttgttaaattaggtcaaaacttcattttgcttatttttactgagatccgtcatacaatttctccctatttttgtagtttaaaagccaataacttgaaagtaggaaaagatcaggcaacactgactatcaaagaagaggaagggggtgcaaacgatgagagagaggcttgcttcggagaatgaatgccatgaggaatcattagcttcatatgtcagaacagaaagttagggattgtagatgattatgaaagagtaatcaactttcttttttcttcctgtgaagtgaatgtcttggatcctcagtctccactctgccgagagacagaagtacaatggcctgcaaagagtagaattttgtgtgccaaaaaataacatgttgctgcaaaatcataagctccctgtgacacctggggtggataatgaccctcaagtctgagatgattacttcttcatcttttctgtttgtccaatcccctgatttgataaaggaatgagttcctcgtgaagcattctccttgtggcaggagctaatagcttataggtagtaacagttacaatgctgcagaatcaataatcaccattgggaccatatttttattttgccaaagcaaggagactgcttttctctttttactaatgctcattcaatcgtttatgaaggaatcattgtctggctgacattgggtgtccttctgtctgggtgtgggaattactttatttggattgctagcacttataagaccaacttgtaatgcaggaaaagaccaaataatgatccttcaatccattaattttgcttgctcaatgacttattgtgctgagcagtaagcactgaaatttctgtgtttcacatttagagttgtcaatttctgtcgattggtcatgtttgtgcatgagattggtgtgctcaatatactcaagttttactatgattagtctaaaagtctatgattttaagatggcataataaagattactatcaacaattacttataatatagccataagtagtaaataatagataagtctaactacttctagcaaaataggtcaatgtgggtcggtcattaatcaagtggacacaatccatttaattgaacaggttggacaggtcaatgttgggtcttattggttgaaccaaaacctaaatcaattctaatcttgtcaaacaggttgatataattatgacacgcacagaattagcacagactaaacctgctgacttcctgtctggtttgaattgtgtaggtctattctgtttgacatcgtcacccctactcctgtactctgcatctatgtcttctttcctttgtttgagttggtaatgtgatggaaagtatctggctagttaaatgttgcggatggcatctccgggcatcttctacactagttctataggttgcagttagtaactcatgtgacctttatgcgtcttgatcttttatttcccatcactaggaaaaccctgatctctggaagtggctgactaacca

SEQ ID NO: 9761 - DNA, 2049 bp, Eucalyptus grandis
  Intron number 3 from transcript Egrandis_v1_0.022174m (loc us Egrandis_v1_0.022174m.g) derived from phytozome v7.0 (c hr-ID scaffold_156; pos 147275 to 149323)
cgggtggaccccacaggttagtcttaagtctttttaattaacgactacgtgtttatctttggtaatgtctcgtgctcgttggttacaatgacgaccttgtcaataaggtaagaagggaacaaatgtcgtgtaagtcaatcatattgtagaaagagaattgattgcgtgatagcctttaatttttttttttttcagtgacagcctttaatttacttctaagataataatttattctgaattataaaaaatcaaataataaataattataaattattgtagggctcactttttcaagaatttatgatttacaataaattattattctcacaataatccaaaaactattagctagtcaattttttataaaaacgtgtaaggttccactaaaaaatacaaggtttttgtataatctataccgtcattgattttgtctatcatatcactagcaaaattaaatctatacaatattttcttgtttttgtgcgaaatatgactaaatccgtgaataggtgtcgatgggctgaaacataattgggcgagtatagggaaataaatgtccttcgtttaacctccctccccgatcatttgaaggataaaaagttaatattttatcaattatgtgcatttctaggttaggactgttaaatcttgtaccgcatttaatctgtctaaatatttgttggtttatgaagtagataaaaagtaagttaaaatttgaataaatgacccgaatacgaaagaattcacatcaatggcgtcgtatacctagtctatccatgatacctatttgtttttcaattgctgaattaatcttgttatttgcgagctttatatgatactacatggatgatctaacatggtaagccaatcctaacttttcaacaatgagattctgtttaagctatatagtctcatttatgatgtttgatgtagttttgatgaacttccgcctcccacacaatatctcaattcacaaaaaaaggcacatgttcgatactaaaataattagcatgcattaaaaaatgtaccgaagtatgatcaactaaaaatacttttattttaatttacattcggttatgtaattcttagaggtgaggatatgctaaacagcttattgggtccacccaagcatagtcggcccaaaaggcaaaacgagtgggcctagtaaatttctcctttgattcttacacacttggctgcggaattggccagttcaaactcgatcaattcatataggacctgagcaagatttagcccaagtactcggctccatcgttcggcaattagacttggtcattgggcaggcctacggaggattgggccggttctcctcgggctcgaacctttagaaatcccaccgaggcttggacttgcaggcccaagcctacccaagggaaaaatattgtgggtccggaaccgcccatgtgtccttttttcatttttttaatatttcagaaaaaacttaaaagaattatgaaaaatagatgatcaataattttagggtctggtgttattttattttaatactatctatgagtctatatttccattctacattagaaaattgagcttattttatccggttagagttttataaatgttaaatgtcaaagaaaaacttattaataaaatataattcatcaataatttaataaatatatagaaacgccggcccctaggcccttacccaggcgtagcttgctcactaacgggacctaaagtttttgctaggctgaaaaataatggcaggcaggcatgttgctcgcccattgatcaagtctactaataatcatctaaaataaaaaattgcaataacattgacattatttggtataaacgtatgaaacgtgatatttttcaaatgctctttatttttcagtagataacacaagaagtaaacgcaatttagtagttagatattgattaggacatttttcttgtagactttcttagctcatatcataactgaataggcaagtgcctatgataatgcgttatactatcactgacataggtggaggtgctgggacacgcagccattggtggctt

SEQ ID NO: 9762 - DNA, 5829 bp, Eucalyptus grandis
  Intron number 2 from transcript Egrandis_v1_0.032045m (loc us Egrandis_v1_0.032045m.g) derived from phytozome v7.0 (c hr-ID scaffold_8; pos 55235827 to 55241655 reverse strand)
ggctaacggcatccttttggggacttgatcttgtggtaagataaattgaaaaactgttatgcttgggacttgtgaattttattggtttcttttctattgtgttcttccaactgttcagttttggactgttagcatttatctggaattctttgccaactctacattgaagattctagactcttcatgtggatcttgaactttctatggctctcgtattcatatttacaatcgtcatgcatagcatcttgttttcttacattttgggtaaatcaacccatagacaaaacacaagcagaatggggtgcaaacagccctttatgcggaccaccaattattgaagtctctagttgtgtgaattgagtcatacattttaagctttggagcttcgagttggttgaatacttaaacgtagcaggtaaagacatccaaccattcattacaaagttttctctctcttcttttggcttgttttcattacacaatttacttgctggaaattttatgggattgttaatatgtttatggtccggacatatatcatttttaggcacttgaaactcaaattttatgtctcataatcttaaagtgctaatgcattataagataggttatatatcgatcctaaatttgtgttttgtgcgctgtttctgtctgtctctctctaatcaaatgaagcagctcctcttcggtttcagactactgggctagataaacgtatgtatttgcaaacatacgttcctggccaaaccaggcagcttctctatgtccatgttcaatttatcgaactcagcaagtgattccaaattccagattgagtccagtagtgtctttattgacttgcagtttctggaagactagtgtataaggcttacaagggatccaatcgggctggatagcttctcgtgatcccagctccatgcagagaaagctctatggggaagtcaggtgactgattgaaggctttgtagtcagtaggaacgatggcaagcacagagaatttgtgcactcttcaatcctggacattcaggcatatgctttattgatgtcccatcgatcaagggttctctcaaacgttccattttttaccaggctcctttgggaggtggtggagatcaatctttctaaagttcatgtgtacctgaaatctagcatctaacagcaccatttcatcatcgaaaggtccacctgaccgaactgaattgaggtcctacagcaatccctttgaaggcagaagtccatgtcaatctttcccttccatctgggaattatcctttgagatagagattgttgatgtttgtctgctaaaaccagcatacgaatcgaatgaagtcaatgtctagcaagttagtcgacatgactttttcccccaaaaatcatgcacccctggctaattggtggggggttcacaccggtagctcttgcaaacatttttttgttcatgtgaaagtcctccgagaggtactaaccgaggtatactggtttcattattttattcagtcagttcaccgttcacgctactcaatggtttatagcagcatcattatttggactgccctctttcagtgatcttactcatgcttagtcttgtctggaagaaatctttgaaaagaacagcagaaacaacaatgatagcaactgtcaccacatagggcaacctcaagtggtcaatcgttttgcactagcacaagtggtcaactcagcggaaacaacaatcgttgagatgcacgaggattggggatggtccgactcagccttcccgcccgagccatgatggattgcgatttttttcctctgataaattgaaaaaaaaaaaatgtgcgaaggagatgttcaatacaattatgcattcttatcattacataaaaatattgtatccgttacggaatatctcgtttgagtcataaccactcgttctatctgtaagtatgcaaccccatcattgtaactaatatagcaaaagcttgaaaaaaatttcacataacattgtgaaatgttcgcttgcgacatgatttgaactcgtaaattagtgaaagatggggtgatccctccatcactgggtcatcgtgcttggattgcgactgcaactttttcatgttcaattttattcttttctcctttgaaagtgaatgagtggtgcatcaacccgataaaaaaaaaaagagtgatttatgaatttgctttgtacttgtaaaatgtgacttgagtcgaatgagggattgatgtgtttacgtcaccaataaggaagagatttgaatattgatttctataaaatttgattttaaaaaaatcattcacgcttttttgatatctttaaaatgacattttgtgacttttgctgttttcaattgaaagacattagacgaagcgccataagaggggagacggagggaacgggaatttgccctggagcgcgtctcattttagcgaaacttccttcgttgccctcacggaaaccacaaaatcaccgaacttaccgaatatggccgccaacagagcaagcgaccgagggcagataaggacaatttgtaaatccatcatccccctccttcctttctccccaagttgccggaggttttgaattcgagcaatacggatgaagaccgcaatcgacctctccgtctcaccgggcgattgcgccatttgatcgcgcgcgatcattttgcgtatatggaaaggttgcggagattggaatttctcttgcaggatgtggagcggaataggtcgcggttcatgtaatcagttacggttgtgatcctctgacttgattcggacgggagtctggatcgtgatgaggttggtatagacaggctctagtatcgagtacgtcggttttgagcctggggaagtgaggtttgtgtagtgaattcggcagattaggcatttcagggttgggggaaatcgtttgactgtgttgcggagctgtagtgcctgattgagtcgggcatactatagctgaatgatccctctggtgtagatctggatgttttcaaagcgtatgattgagagtgttgtgttgtatttggatcgatgctatcactggaatagggtcagatcgatcgaaattccttctatttgttcaacaaaaaaaatttcaccctgccgtctctacttcagggataaaatttgtcgagtatctcacaatgtttgactattttctccagtcgagtaatggaaaggggagccttatgttgtttacttattcccctttcatcacattgcattgaagatatagttctctaagttcatgaacaaggatggcataaatatacttaaatatttttttgagttgatgtttccttaaagtgttccgctaacttgattcattgaaatagcttgctagagacataagagagttgcttcgctgcttgtaattgaatgagcttgtgagttcattttcaatctgaactttttttactggtaaatgcaaaacttagagtgagccccaaggctcataaagctgtttacaatcacactcttgcgatgatggtgggggattatgcatctgctattaagtgttccttataaagactttcccattaacctagagcttgttgttattattgtttggcaggttcggatattggttcttctctattgtgtccttccatttattcagttttggtctgttaatggttctctggcaatttctgtcaatttcatatattgatgtcttgaactttctatggcttcatatttatatttgcaattggtcagcatcttcttttcttttttcccctcttttggcaaatcaacctatagacaaaacacaagcaggatgggttgcaaacaaccctttacctgagtctcctatggtctatgtatctagttgtttgaattgagtcttacatgttgagcaatggagcttcaagttggtcgaatacctaaatatagcggataaagacttccaactaatcattacaaagtttacttgctggaaacttaatgggattattgatatgttcgacatataacatttgcaagcacttgaagctcaaattctatgtcatgtaatcttgaagtgtgaaggcattttaaactagaatatattgatcctaaatctgtgttctgcacgctgtttctgtctgtctcttgctaaccaaaagaagcagctccttttcagtcggactacggggccaaatatgttagaggctggacccaattctaaaatgtctaaattatgctttttgtctcagctttattggacagagtggtccagagtctttcaagcacctgttgcagaactgggaccagaattggtacccacccctacgtcatgtcccgttaattctctcctccatgacaagttgtgatttttgagggtcaaactttgtcttggactcagattatacagacattcccttggcctacaatgggatcatagattgcatgaactttaaactaaaccttttcgcgaagtattagtagcaattgtagcatcttgtccgaacacttggatgatttaaaatgtcatttttgtttgctgatatcttgctgaaaattgttctgagccatcatacccatgtcttgtggcattttttaagatttagtttctccttcgctattaatgactgttaagttttggggttcaaggggcaatttcaccatgaacctagaattttttgtttacgtcatggccctttccatgcgttttggcccttttaggatttagtttctctttcactatgaatgatgtaagttttggggttcaaggggtaatttcaccatgaacctggaatgtttatgtcattagcaggatgtgactgaccccaccagcatccaagtgcttcctggaggagcatctaaatgcaccttggttgtaaatttacttgggggtgagggtggggtggttggttttgttgtggctgtggggtttggttttgggaaaattatggatgggatctagacagagtaatgctagaactccaaccctcatggagataagggctgttctattcattcaccttcgtatgtgaaatgcaatttatggttattgatgcatagtagttttcccctcgtgaaagtattaacgttcaagtagaagctgttttttccagaccagcactcgcttgatttacttgacatttggacaacctcatattgccaatgcaatgtttgtgtcttactacagcatgccaaatacaataacgtataactaatggacacaatattgtgcctcatttgcctctgtactattctcggttcccactgaagacataccatcacttccctagggtggtataactttgatcttgacagaatatcagataaattatgaggaattttcgatgactgcatttgatgtttgctttgcatttatttcaacctatttaactggagaagtcttattttttccagcaatgtttgcactcactttattcagcacattaatttgaatagttttgtttgttttatcttcttacaaagcagggcagttcatactcatgacctctttgacaatatgtaaggaacccttctcattcctgtaaagctatcatagtttcccgtaccaattccaaaatttaataatatgtattactctctctttctctctccctccctccctctccctccctgtccccccccccccccttctccctctctctctctctctctctctctctctctctatgatggctgatgacctagtcttaagctctgtgcaattataaggtattactcatttaaattatgtatgtctactagtgcctatattattggcaactagctcaatgacagccacagataacatattgatgtgagataatcttactaatttctatgtcggtgttcacatgtaattggaatcctcttttttgtaggtaaggctgt

SEQ ID NO: 9763 - DNA, 1787 bp, Eucalyptus grandis
  Intron number 2 from transcript Egrandis_v1_0.018874m (loc us Egrandis_v1_0.018874m.g) derived from phytozome v7.0 (c hr-ID scaffold_6; pos 2058596 to 2060382)
tcatcaagatcctcaagcctgttaagaaaaagaaggtaactcttgcatttacttcttccactcggatttcttagcaatatggatatatgtgttgcgagactaatgccggttggtcattctctgaaacatactcttctgtataattgatataatacttcatggttgtgcttggacttttgaagtttaaacaatgcattagacaggtgtttcgactcacttgactttaggaaatttgacccaggggtccatcatctttactttggatcatggcattaagctgttgaaaatgagatcctctttcttctaccaatccttcttgctctggtgaagtcattcaaatcacctgaaatttaagattaagatcattagtcttgcggcctaaattagtttttagacagattaaaggcaaactatttgtagttctgcaggtgttcaatatgtcatttgtttcttgtggtgctcataatcattagtatcaccacacatttagcacttttattcaatattaatttaatcaatgcatgtaagtgagaaactgcgtgttttttgatataacgattcaacttgcactccatgttgtaaggggtaccattatcaatctctcataaactgagttgttaatgttgtcaaattctatactcacttgtattggcttagctatgatgtattttgatcaaagagctcaagctatttcatctcatgtatcctcttccattgtcctaaagtcgtgtctcttgtcatattaaatggctttctaataagaacacatcttttcactttggtttgctttgatgcggtgcaatgtggatagaatctctaaggtgtctgtctagtgcagttttgtattctattgttggaaggattaacccaattgtgtatttgagtcttccagatagttcatggcaaagcagccatcaggtgaactgataaggagaatgtgccccactgctggtcgaatccctaaataccatttcatttactcttcgacatgtaaatgttaaacgttctaaaagttcatgtgtccaagattgcacacgtatgagcaagcattgattgcctccaatatccatgagttaccagcaactaaaattgatagatcaatttgtcgtgctataacttcgaggaaatgcactgactcctttaatgtaatggagacaataaagatgaaaatataaagagtgtgtcattgatcgtgcttccactgcacagaattgatggagaagatatgtttataatctcctttctatatctacagaagttgacatctgttctgcaggtcctatctccagaacaattcaaattctacaaatcgatttctgcacgtgccttgaagcatttgtttattgatgtcctcttgattggttgcaccatattaatgtttaaactatcgtccacgcctggcatttaacgatgataagaaattttgtatccctgtcttggtgcctgtgagagtacctaggcagtagtgactttataatttgatgttagtgtggactttggttttaagcgaacatgattgtcaatatcctgtatttgactgctatagaagacaatcaattgattatagatatatacttcattgatttctgaatcctttcgctttcttatatttactattttcaccttttgtacgattcatgagtctactttccttggtttctcacagttgaatattttacttttggtaacctttataggatttgctgcaatcatcttgtgctctaatatgggggtatgtctgtatctctgcagatcaaaagagaaataaaaatactgcagaatctctg

SEQ ID NO: 9764 - DNA, 1589 bp, Eucalyptus grandis
  Intron number 1 from transcript Egrandis_v1_0.005091m (loc us Egrandis_v1_0.005091m.g) derived from phytozome v7.0 (c hr-ID scaffold_5; pos 62529967 to 62531555)
atcaccggcggcagacgcaccgcctccttcgccaggtttgtgttatttttttctataattcgagtggattaaaatcatctaaattattaattatgtggatttcacatgacatttacaccgtaatccgttcaaatatgctcaatttagatgttctttagatcatgtaaattttttggttggataaacgcgtctttgccaaacacgggtgggttggtccatattttcgacaaaagaaggaatggttccctaactctaatcattgatgcatctccaagctgtcatgagatttttaaagtccaggctagggtaatgaatcattagcagatcttccttacttctcgtcagtcattcacccctttttgtcaattaatataaacgcaaaaagttctttgacacagcgaaaaaaatgggaaagaaaatttcgaggccataattgaaacattcgtgacacgcacttgcatgagatcttagattattactacaactttgcagtatcagacgtcaaaggaaaagagaagccgaaacttaacttaattgagcttcatcgtctgaagatgaagttaaaaagaattagattgattagcaatattagacattctaagaagttttactgaaagctttttattaaataacaaggcgaacttttattgggcgctgaaagaaattggaccgatgatgcattaaatgatcaacaaccaattagaaatcagcacgtcatttaatcagagggttttggtaagatctcttattacataaagcattcctcgagattgagttagataagaaaatcctctatattttttatatctaattatttggtcttaatcctaaagaaagacggctgtattttgacctttcaagtgttttataatgataagataggacgggccaagatttttttttttttttaaagaatcaaatgaatgaaaactaagaccaaagcacgatggattcgaatacagctgccgtgagggtgacccaacccggcaacgaccggcgtgattgttgtcgtatccatcacagtaatagagcaatgaattaggattaacattaatctttctcccttctcttttattcttttcgtcggtgttcctcatgcatatagtggtcccgtatgtgcatatggggagcatctaataactcggcagaaatctttgacctgagcatttgcaaaccagcattggtagttcctagctccactcggtttcttgtaaaccgttgcactgccattactctgatttccgtaagaaattcatgaaagtaatgaacttgtggttgaaaaggtaaccgattatacccgaaaacttcaaattctggagaataatgtgttatttttcaagtgttaatgctctccattagacaaatcttggtaaaacgacaaaatccagaaatccaaataactttccctcgagttatcaaagaatggtgcaatgtatgtttaaaatgtgttccgtttccacgttctttgaaatggcgcttgagtgatttctccagtgtattactatgtaatcggtaagcaatgatcctaaacatgatgtgcctttgctcaagcaggtggaaagagcagttcaacgaagactgtgatcatt

SEQ ID NO: 9765 - DNA, 4153 bp, Eucalyptus grandis
  Intron number 2 from transcript Egrandis_v1_0.016230m (loc us Egrandis_v1_0.016230m.g) derived from phytozome v7.0 (c hr-ID scaffold_4; pos 24200289 to 24204441 reverse strand)
caaagcccttactcttggtgttccttctgattctggtactaatttatctatcatcttatttgcgaccctaactagtgcctttaaaggtttgggatataatcctgactcgaccttttacatggaaacagtcacgagctcgatttggggaagtcgtcctttttctttccccatttttatttggttttcatgtttaacccccatgcgtgtgaactatgaagatgcgtatgggaactaggaagagctcggttttcaaaatggtggtttctttgttcttcttcttagagtgtgcttttgctttcgggttaatatgcttctcatgcctttcgttctcggttatataactttgcttttgtgcgagtgctaggcttttttcttaattaacgtacgatgtttctcttcatggaatgaagaagaatggcacaacaactgttactgccgtttctctcttctcggaatttgtgtgtataatgtggttttctctttgttctcgtgcattctcctatgtactattaatgactatttagtagttctgtgttggcctttcgtattgcacttttatagttatcttgggaattggaaatgcttgtcctccagttttacatgaactacaaatcggtggttcattcaaaatggctaaaactcgggggatttttcatgtcaactgtcaaatttctagaaataatatttggttctctgatgggtaaagcacaataggaataacttacgtgaactaaaaagaaaatttcttatgcgtgctcattgaaatcgcagttagtagatatgagttggcaatggttaatttgatctagggtttctgtatatttagggtttggatcagttgagcgtaaatgctcactcactttctttgacaaattctatttaaattgcctccttttattctactcttgaatgcattcatatgtgtagcttttgctgattttttaaggtccaaggtggactttttctctccacgctcttaggaactgatcaattatacctatggcatctcattcatagttggatatatgtagatacacatgtatatatgtatatatgagtagaaaaaagattgttcaaataattcttctatatgttcatctcgcatccaatggcttcccaatacacattataatggggtgcaacatctcaattttggatgatctactagcaggggttctctcagttgcaggcacaattaataaatttcaaaacgcactatttttggttcataatctgtggtctaccattatgtgctcaagagaatcttttgtaggtttgacttatgctttgttgcgcatgtgtgtgaacctcaaggcagcctagaggtccatttataactcagcatcttcttttgagccatctgtttatatacaagtttacactcagtttcaaaatcggttcagttgatgaatttacatgtgccgggacgattgtgcactttttgccaacacactcattgtgcggttaattgacatggcaatttttggcacgaagatattctccattttacttactttagtttatattcagtgcaacgggcataggagattttgtagaggatcatcagttattgtcctgccctttggtgtgtccttctcgtttactctcttcaatgtgcttaatgcaagtctctaatctcatcaagttcttttatttagaataagtgagatttatttgaattttttagtttttcttaatgcaaggtcttctcggtgtttgtatgtaccatggagtttttcctcttagtttctgtcaaatattgcaacctcattgaccacttgttttatgctacttacggttttatttcacaagtctcatctttgcaggttgagccttggaaacgaagatctgtctgaaatctgattataaaattatgaaacattgttgagcatacacaataacagatttgatttgatgacaaggtctttctgcatggtcgacattatttttattagagtgatgctagatatgcaaaatgttagcgaaactggtacacataatcctaggggcacacgatcatttgttatttctacactaacgaccacaaaaagacattatctagcacataagattttgtatgttttgcctaaggagtgtgcattttgtcttcttgggggtgcgtaatttgttatgaaaaggttttaggtgatttagatgctagtaatataaatatttgaggcgattaatagaaaatataagcgtgaatttttacctgaaaaccgaaagctaaaggcgacactgctaacaaccctcttgctgggtttttggcattgctttggcttttgagcattaacttttattcaacgtagaatgtcccaaatgctaaaaaagtatacatatacatgtacatatatgtaattcgcctaaaaaatcttccataattctttacggtatattttcattatgatggaaaactcaaaaggagctttttgtttggctcaactccaaaacaaacatgttgtagcatagctttatgcttcacctttaagttaaaaccacgacactttgtaatttttgcatgtagtgaaaaaggacatttcagtaggtctctaagccactcgagtagagcttgataagggtttaagcataatgaaaacaattttgaacttttactttgtttccgacggtggaaaaaagtatttccttatgtagtttttagatggagacacataccttttagatttatcaattgcattcatcctcttcatagaagaatgattcctttatagtaactggtgttttagattaaatcctaaaatacagtagcctgcggattaaatatccaaaggtaaataaggcaagtccgatggcaacaacataacttaggtaatttgcttttccttcctgatcattactgcaacatgatcttgcattcatggagacagcctcaatttccacttttctggctatagatatatgcatcatgtaacttttttttgacaattaaaatgtgtaagtgaaacaataatttggccaacccttgtactaggaaattgcttgctcaatgttaattgtagtgtctcaagctcttatttcatgggagtgacaatcatgcaaagatttatatatgatgttggatttttgtcatgcgtagtgattgccttacttaccgtcaaggactctctctctctctctctctctcgacattacttagaacttttggcggcccattataacatggtctaagaggagctcagaatgtttgaaatgccttaattactcgtggcatagtcactgaacatgtgatctatgataattgaaatagcatttctcattatcatatagaaaggaaaatatctgactgaataggttagaagccttgtattggactatgaagcatttgtttttagataatgacgagtcaaagaattagcttgtgttgtagttattttgagaggaaattaagaagtcactcattatgtatttcttgaccttacttcctatttccttataaaaagaatgtatgtaatgcattcgtatcacttgcttgggcttattatgtactattgtttgatattataagcatatttggatttacatggtttttttgagcggttggtagcaatggaactttttctataatttagcagaatcctttattcatatctcagtgtgtggcagagttcaatcttgtaaccttgtgctacctgatgcatgattaaataaaatgcttggaagttcccagttcctaaaagtgcgtataaaaaatcgatttgatgttattaatgtttgcctctatatgaattgtttcttactaatgatgaaatggtactttgaactccagaaaattttcccattctgttgctaaataaccgtattggacaatttacttgacaagtttatttgaatttaaaccatgatatccaatttggagtaattatgttggcccagaagatagtcttccagaaaaatcctatcaaaggtcaaggtacttgtatataaattagtagaaatacccaataaacaccactgaatgtgatgtgatgtattcttgatcttgtgcaatgtgctattatatttttgttatccagtgacgaatctactgttaccagtgcatgtctgtgatttgatttttttggcaacatagacttcacaaaatgcttactgtgcttgttcatgttgccagtggctttgagtgaggcttttgatagga

SEQ ID NO: 9766 - DNA, 3171 bp, Eucalyptus grandis
  Intron number 1 from transcript Egrandis_v1_0.023475m (loc us Egrandis_v1_0.023475m.g) derived from phytozome v7.0 (c hr-ID scaffold_1; pos 12943616 to 12946786)
cctctatcaccatcttgttaggtaatcaatcccccttcaataatcttcctttccaccttcgttcttctttttttttttgttatttcatttcattgcgatcttacatgtgtttcatgtttttttctctatatgatgaatcaaatatttctattataaatttgtctagtatgcaagaatgtggtgacccatcaccttgaaaatgttgagctagtcactaaaagcgacaaagttagcattctgttttgttcatggtcttatatagaaatgaatgaaatcatcatataagtaagatcttgatatatagtcgtttagcttcgtttgattctaaaaggatcattgaccgtggattctacataaacgatatgtttagataaaataagaagatagagcatctcaaaccttgtgcatcactatttattttgttattagtacatcattacaccatagaattttaaatatatatgtttccatcgaaactaatggatggtactatactactgtatgctcacttttaagagcggtggcagcactatcagttgtcaatgaaaaaaataagattagttgaatgatatcctagaacatactctcaaaaagcctttactagcaaatccacaatcaagaataagatgtttaatattcacatgttaattcgaagccctttaaatattgggtaatatgaaattttgtataggaattacttaaaaaagtataataagtcacaacaaattacaattggtagatctgtctccagagattataaaagtgccctcgtacgatatatgttgatcctctctcaacctagggatggatagtggacagggcggggaaggagtgcgaggtgggcacctcgtggacaaggccctgccttgaaaatttcaaaaaattgtttttatttttattttttttggagtaaattttatatatcccagtttctacataattttaagcaatgaataacatatcattgaaataatttagtagttcatcttttttactgagatcgtttgaatgatatttcatattattttgctaaggtggttttattttgttcttctaagttaactgttccatatgtatatatgtgacttagccaataattctgctaatttgacaatgttaattggcgcaatatcattaggatacaagtgtagatttacataaatgtaattgtgtaagaacatcattagcagttagattgatagacttttgcacattgagtctatatcggtggataggcttacaatttacttttaacatgtcttttcatactcaagtagattatagaaagagtatattaagcaattgccttttttttttcagctaagattgcttaaataatttttcaaattattttgataatgtttttatctgttcttctaatttaatagtggcgtagatacaaataagtcaatagtagtggtttatcattttaatccttcgggagtttatcttatcgtattattatgaagtattgtaaaaagttcaatggcaacttagcaatgaaaaatcataattttaaactgataactttgatataatgaactgcgttgataatttaaattttgatatattatttgtggttatcatttaatcatctatattaaatttaaaaaaattacacaaaatgcttgtagaatcttctatatttgaggatattatctacgattactgtattttaaattatcaaaagacacaatattccttgttgctaaaacaaaaaatacgcggggtcggaaggacccattaaccagcctcgccctacccttctagaatccctgtcaccttattctcgattcttgtggggaacatccactctgtgcaagtcacatgcatcatcaatttttatttgaaatttatattacatcactattcaatattttaatttgtttaacgaaaatgctagaaaaataaaatgtaaactttacagttttctcttccaaatcctaacaatcctacccaatcccagaaccagtcacggctctccctcgcttcttcttcttccccgaacccacctcttggtcaacggtgtgggggagctaaaaaaactaatgtgatcaaattaaaaaaaaaaaaaaaccaataagctcgctcaaaacgagtcgttcgacatataaaatgaacaaaatcttttgtcgtattaaataatcatatgctagaaaaatcacatacactaatagaacaataccctttatgtttgtcgattaaataatcatagattagttgccgaaagccaaaagaccaagtgatttccaacctatctacgcattctccaaataaaaatatttatgagtttttgccaagttccaatttaataatccctgctagagagagagagagagagagagagagttttcttcttacagttaatttccagttcgacaagcatcttaaaatagttacacgggttatcgtcttacacgccattctctccgcggaagacggagacgtctatgtaacgtgaagacggaaacgtggacgacttctatgagaagagagctatggcgtgtagcagcgtccgttctacattcactgcatatattttagtcctctgtgaggaggatccttgtccgatatgtcaaacacgcgaatcacaacagcaggttccatcattgtttctcagaaaaagctgtcgttttaaaattcgccccgttgcctaagactccgtgtgcgtcatcgcatctacgacacacagattacatcatcgtcgtcgctttgttatatatgcagcctctctggctaagacattgcaaaccaccctttgcagtttcagatatccccgttctaccattttcattttctgctaacctcgctctccctcgctcttgctctcgttctcactgtcacgcacgcacatatgatcgctagtttttcttccaggatgagatcctggtttctgatcctcgtaagattgacgacgcccagtttccagaatattcactttgctataattctgcaacagtaatgtatgtttgtcgctccagtttcgtgtttgtcaatgtggaaaatcgtttcgagcgactataatgtagtagtaataatgccggtttcttaaatatcgagattgaattgacatttgaagacacagaaattggaggaagtatctatacttgtacttttggcacttcaactgattatgatgctgtatgtatgtggtaataggatcaaactcac

SEQ ID NO: 9767 - DNA, 2271 bp, Eucalyptus grandis
  Intron number 1 from transcript Egrandis_v1_0.012119m (loc us Egrandis_v1_0.012119m.g) derived from phytozome v7.0 (c hr-ID scaffold_2; pos 63838515 to 63840785)
gaagcagaagggccattttccggtcgacttgtcaggtgcgcattaatatctttgagaaacatagcattggatgtcaatgagttcagcgtcttggttatcaacgctttgcacgagagataattaccaaaaaaataacaaaacatattacagaggtgccaagttagttctagagcattcaatttgacaaatctaaatttaaatattttgaaaatctaccaatatggcatttttcgattacttttgacttgaaatcgttgatgcggatgcaatcatcttatgcaatatgttgatttgtacaatttttaaaagaatttctaattctttaaaaaagtattaatttttttttcattatgttttttttttcatcataaccaacgagatcacaaaagcctcacccaaacttggttgaggaccacaaccctcatcactggtgggcgagggcttgcagggactcatccaattgctggcgaaagaaataaaataaaaaagtttataaaaaattaaaaaaattaaaaaaatgtgcaaaaattatctatgtcaataccgttcgtgtcacgtaaaatagctgacgttcactttagcgatttcaagctaaaattgattagaatgactgtattgacatatcataaaaagatttaggactaaattaaccaaattaaatgacttatgataaaattgacattcatataatatgttttagattttttttttttttttggtaatttttctttttatatgattatggttattatgattaatatgcggggcttccgagtacggtcacgttacctactctcgcggagatttttacttgtaaacttaggaaaaccattagaaaagatcaacaaaagctcctaaagattcgataaaccacctaatcctttggaaaaaaaagtgatttctatgagaacgagaatgatccgattgtcatcttaccattaagaaaaacatagttcactatatcatataaatttgtcacatctttgtaattctcttaataaagttaatattcgatacatctatattggagtagttgcatcctcttgacggatacgactagggtttttttggtttagcttgaggtccaatcaagaagctcaatttgaattttatgctgaaataaaaaaaatatatatatatatatatatatttattgatgaagattctaaaagacttagaaatatttgaggacgacaatagttggggtgcttcccactaaatgaaagttcaaactcaaacactaaggttcaaggaaaaaatttaagttaaaagcaatacactacagcaagaatctaatatattttaccttttctttaccttcaagggaggcattggtaattagagaaggatcgcttttcaatgcacgtaaatggtgttgattataccgagatgaatcgcttttcaatgcgcataaatggtgttgattataccgagattagatatgtgcacatgggggtatcttctaaattgacgatgggctggggcacatgcaactggctgtttcaattgatctgtcgtccatggcccgggaaaaggaaatctgctcactgtccttggattgaattctatggttgtgtaaatacgcgaagcaaagcataggcccgggaagatcactttccctccataattgcgagctttagatgtttcaccaaccctgtgctccggaggactcagctgcatcctcgtctggtgctcaagtccccagcgttagcccaattattgtggtctagattcgtctatgcaggaaggacgtttgataaagagacggaaacgacggagatatatgaatgtagagagaatgttgccagtcttttgcttctcaattatcagactgtaacagctggaaccatccgggtcgaaacgaaagaactttgcgtagtcggcgttgcaattgagtcttcttccgcgtcactgtccttcaccaaatcgacacgagttgctgatggtgaccaaagaatgttatggtgccgatgccaatatccaagttagaaaagatttgactccatggaagagttttaaggaccagtgcggaaacaacataatttaatttagttttctgaggaaacccccagaattgtttaacgagtataaaaaggtcatagtaacctggtaatgaaagtgatgtgcgttgaaacagaaactatgcccggaatagaggtcactttttcttgattcttgaacggtaaaccagtaattggattcgcctgttttctctcttttgtctgtgggttggcagagagaggagaagaggaagtggactacattccagga

SEQ ID NO: 9768 - DNA, 1107 bp, Eucalyptus grandis
  Intron number 10 from transcript Egrandis_v1_0.003004m (lo cus Egrandis_v1_0.003004m.g) derived from phytozome v7.0 ( chr-ID scaffold_10; pos 31807070 to 31808176)
gtggttcggcagcacacaacaaggtaacttacataatttatttgatctctaggaacaatgatgttgaagtataatttggtgcccattcttagtagctgtcatggtgttaaatttagtgaaaagaaaagaaacaaatcagtccaagaacaagcaatctctaacttatctctaaccaattagatgtgttaaagagagaagagaacatgttacattgtcaaaacagaagcctgaatgttcacaattccaaacaaaattgaccaaacaagagatattacatctgcatcaagtgtgaataaagccactggacgtgtttgtagattctgatttctgctgaagatataattgtttcttgaggttttattacttctgaaagagagttgtaattgttgttccttggatgctgggaagatttaatcacaaacaatgccgcatgattattgacatacaggatcttagtgttccgtaaattgagattcaggaatttgatgtatccatgattttcataactgggtttagatcctatatgtattcggctaaccatgaatttcaattcgtgcatgcttcttctacctgtgaggttaattctgcaaatttctactttatttgttatatcaaagggtttccaatacgtgaaccttgtgaaattcggctttatgatggcttggggtttcttctgaacaattgtttatttaagcatagacatcattggctgacttcctttgattgaaaaaccaaatttaaagtatgagaatctcaatctttgaatttgatattctcattttatttcttccaatttcttctaatgatctaacatatctgatccagtgccgaagggaatgtgggttgggatggagtccagggattccaatccgctcacatgctaaacttacccagtgaaaaaagaacttgatatagatcactaagcatcaaagggcagatcctttagcgttgacataagcaaaatgctcagcaaattaaccaagaaatggtccatggatatttgttgattttattaaatttctacatgcaccactatatcttccaacacctcaatcttgttggcgattgtcagattttttctgagcgaagaggtcagtggaaacctgc

SEQ ID NO: 9769 - DNA, 262 bp, Eucalyptus grandis
  Intron number 2 from transcript Egrandis_v1_0.002208m (loc us Egrandis_v1_0.002208m.g) derived from phytozome v7.0 (c hr-ID scaffold_8; pos 5679859 to 5680120 reverse strand)
aagaaggtctttgatcaaactgtcagggacatgtaagttatagtgactactgggaaaagttccattatttaaagtcttcctttctttttttcctttgccatgaattaagttaaatttagtacccagaaaactacagaatcaagattaatcatgactatgttggtattatggagtcttggttactttgaatttggaattgctactgatttgagtttcctgttttgcagtaagagggaggtgaataagaaagtgcttaaagttc

SEQ ID NO: 9770 - DNA, 1902 bp, Eucalyptus grandis
  Intron number 2 from transcript Egrandis_v1_0.016106m (loc us Egrandis_v1_0.016106m.g) derived from phytozome v7.0 (c hr-ID scaffold_8; pos 799719 to 801620)
ccacaccttcaactacctcgtcgagaacggattcagtacgtccctcctcccccccgcccctcccttgtcgcgtgttttgaatccgttcgcctcgcgtctggttggggcggattggcggtgccggtcgggtttttggttggttaggttaggtttggcgtggggatctgtgcgcgatctggcggtttggtaaggtttccggtgtctggatacggaatcgaggttgatctcgatctcgtggggtttttgtgatatgactcgggtttggtagccgattctcttcgattcgttgtgcgcctccggatctatgcaattccgttgtcattttgttttctctggagttcaaatttggatggagcgatccaaggtgcgatctgctcatttgtcttgagagaaggagttgatgcctaagttttgttgtgttctgcgttttggctgtttttgaatttcaaaagatcgaaaatttcttcaaataagacaataatctctaggttaatttggatggaatggtccaaggtgtgatctgttcatttgtgttgagagaagaagttgatgcctaagttttgttgtgttttgtgttttggctgttttgaatttcaaaagatcgaaaagttcttcaaataagacaataatctataggttaattttaatattaatgatatatggcctggtgctcctatcggctgaacctcgatactgctttaaagaagttttgagaaatgaatctcgatttcaatacgaaaggaactttacagaaattaatttttcatgtaaatgccattgtttgaaatgttatttctgcagcgcattcataaattgagttgtgaaagtgaaaatggggtggaaggagggaatttggaatgtagcggtttagattctggcgaataagaaagaacctgccgtgaggaaactactgtgagctagaatactaacttaatgttctcctaattttcctttttgaagctacatactgtgtgtcttacaaattgactgctggattgagataaaatatgtgcgacttttgtcttgcctcaatgacaatccttgtagtttaattatttatctgtttgccatttgaggattgaatcctttacacatgctttgtttttctttcgttttccttttggatggcgcttttttatatcttttaaattttttggagtaggggggtggggatgttgatttttgcagcctctgggttttcaagtttaaccattctgatgtagcaaaatgaagctttatcgtttgagaagttgcttacctagtgtctgagggtgaaaaatttccaaatctaagctagtatatctgtgtggtgtctcctattctgtgtgaattataatgaaattttatttttcatctttgatcctctttgcttatgaacttgctatattatcattgaatctgtatgcgttttggaagatattggtgttatgctgatctggcttagtaatgactctgtaccatttgcaacctggatttacgacttgaaaattttggcaaactcggacctgatactgcttgtttgatttttaagctgccaccatgctgattgctttctacccttaatcctttaaatgtagacagtactcctatctccatgataatatatgattttactgcgtctctgtgttgtacagaactctgtgctatcttttcttttctactttgtcataacttatggatgatttcatttattttttatttttgatcattagtgattagatcttaattttctgcaagtgtctttaacttaagttagtagaatttccggacataaccttttatattctgattgaagctgcgacatccactttattttgtcctgtcctattaatctgtgtgaattaacttttatggtgggttcttgcagcctattgcgtagttgcagctgaatctgctggcaga

SEQ ID NO: 9771 - DNA, 707 bp, Eucalyptus grandis
  Intron number 4 from transcript Egrandis_v1_0.024244m (loc us Egrandis_v1_0.024244m.g) derived from phytozome v7.0 (c hr-ID scaffold_5; pos 1847635 to 1848341 reverse strand)
cctatccaagatttcggaacagcttggaagcacaggttggttacacttggaaatgcatagctgttagatatttctcttagacaatacatctgattcatttcacttgacaggccttccgttcatcttttttaataattaaatagtgattgaattaagttgctttgcttgtggtctttgtagtgtagttaagtcaccttgggattcatgattggaatacatgattaagtgctataattctggctagattctgtgatattattaaagatttttctcactgaactatcacagatctgaatcattgttttcatccttaaaatgctggatgaatttgagctctttctagcctgagtttttattagatgatataggcttaaaatgggggaataaaccacaatcttggataagcatttatttgattttgtgggaacagtgagcttcaatcaggtgacaaaaatcacttgatatgtgaggatatggtctttggtaatacaaacagtatatccgacgagtaagacccattgcagaaggagttatctgttaatttaaaccttcttgtgctttgaatgtcttggtttcactctaaaccttgtgtcctgaaattgcagacatggtaacatatctcaaaattacttgatgaaaccagttttgaattcttaagctgatcgctttattgacttgatctctactgtcgtgtcaattatacagtt

SEQ ID NO: 9772 - DNA, 2749 bp, Eucalyptus grandis
  Intron number 3 from transcript Egrandis_v1_0.054754m (loc us Egrandis_v1_0.054754m.g) derived from phytozome v7.0 (c hr-ID scaffold_31; pos 192508 to 195256 reverse strand)
aagtgagtgttgcgctgtcttttccctattttccgtacccgtccgttgtcgatgcttgttcggatttattgcttcgtgtttgcttagtaatctttaccgtggaattgaaatgtttggagtgatggtagcaatttaaggcacaagggatggttttcttgtagcgcttgaaggcacaagtgatatcaatgccgaaatgccactgtgtgtgtggggggtttgtgaagggcttaatattttcactcaactgtcttgttctttcaatgggacatttgagtactcctgtagtcccttgatgcagattaacataaggatcatgggctgattgggtagtgacgattatgcctaatgattaccggttgtgaagggcttaattattgagctgtttgttgtggctgcagcttttggtagagatatttaataaagataaagaattcatgggtgatgtaataactagaaacagcaaactgtctcttcagttcattggtttgtctgtgtcatcagggttggcacgttgggatctctgaagacttaacgttttttttcccccaacaacttagtttgatattcattttcttatttctggtgttcaaacctacaaataattgggtgagaataactcaaactaatgaagtgatcttggaagaattaccatttatgaaatttgaccataactttgctaaggaatagcctactactttggtttaggttatcagtttctcaattttgcttatgaagaataggttgcgccagtaactactattaattgtatgctttggctgatcatagtctatctatttaaggccttgttaaaatgtttgtgttgttgtattgtgaattcactgaattatgctacttgtgattgctctacttatttgttgacaccccattttttaaaggaaaaaaccttgttaaactatgcaaggcagtcaagttagagtgtatagggattcctattcccaaagaaaagcccttttagaggctatgctcagactaagctggactttctttattgctacaatgtgatttgtattaggcattctagttgcctcttcccaaggatcgataccaatgctttgtttgggaaggaggggaggggaaggaaaattggggtaaagtttgaaattttggtgcaaagaggacagaaatttaatttttctttccattttcatcccatccttgccttctaaacgaagtataagaatgatagactggagaggataaagcagggcaggtaaggttgtcaatttggaatagatggtaagatatgctcaatgatagttgctcctgtcctggggttatgtgttaatgattggggtggttgtagatctagagtagcaaaagcaactcctgattaagatcgtctcaaaactatgatgacgtgtagctttccctgaattctagacaaggcatttcatcaattttatcgacaaagtccttattggttgtttctttgttggttgtattgagttccaaaatctagtcatgcaatctagtcctcaaagatctcctttctagatcaaatccctgagacttctgagtaggttgatctaatggtatttctgttctgagtgattgaaaggagagaggaattaaattgacaacttttggggttagcttgatctccaggccggtttcaatcaggagtagaataattttgtttctgcaggattctggtttagattccattttcaccaaggtgccatactctattggcttgccatagtcttcacaactcagccagaaaaaaaagagtaccatgttcattcgtcttgcgtgttcttctcactcactgaattttggcatataatgatcatacaagacaattgcatgctgttttccccagtctccctgcagtaatgtatttaaaattccttcctgtccataacagtgtcatttgaccagataaattgcgtttgatagcacgatacttttctttctggttggagaacatgttccttcttttcatcagcactcgaaacctatcttattctatggatactgcaaatatgacttattggcttgtcaatgcttaagactggcttagagcattatctaactctccttgaagaattatatgcaaatgctctggggatgtttccttatcgctattggtacttgagttggtctaaactgacaagatggtatacaacaaaaattgtcttgaggtcatcgtcaaagtacgtgaatgttcttacggctgtgaacatcgtcatttaggactggtcattaagtagatgggatttgatggcatctgttgtttgccttatgtatgtacgcttaacatgtattttactttgaccttcaggctcatcaggcaactatggtctcatgaccagcaaattgagcattgtcttctaattttaccatggttaactgagattaaaggtagatatatttattgaccagttggttttgttgtttggctggccaataagtccgatttgaggagagcagagtttccccatgtattattcattcctcatctgatcgttaccatcttgcttggattaccgttattgttaaggcctttgatggagttaaacatgcattccttctctaatgagtagtaagagaattcagtgtgcaaatgctatcgctgttgtagttcgtgtgtgctacgtttcattcgttaatgccttcttcttttcccacgtacaacatatctgcaaaaccagaacctacctcattaatttgatcctctcgttgcttgccagatacttgtacagaggcttgtctacaagggattgcc

SEQ ID NO: 9773 - DNA, 1240 bp, Eucalyptus grandis
  Intron number 4 from transcript Egrandis_v1_0.046429m (loc us Egrandis_v1_0.046429m.g) derived from phytozome v7.0 (c hr-ID scaffold_6; pos 38034178 to 38035417 reverse strand)
catcccaaggatataaactcctttctcttttgcaggtccagaaggttctaaaattccaccaatggaaaagtctcaaaatgctttaagtgttggtccatcattacgacttcaaggattgttagtacccttcttctctttcaaacgaccatcccttggtcaagagaatcaagttacctccataccttcactgagatatctcacacattttatgctttttaaattgcttatcaaaaaagaaagcattcagatttttggccactgtatgtggtattactgatttccaggttttttttttttttaatgtgttgcagctcttttaattttgtagttttctttgtggattttatttaaatttgtttgtaaagctttttcaatagaacaatcgacataatgttgctcatgttcattcatcttcctcagaaacgatgttggtctacatggaaaaggcactgctattgtctctgcttctggatcatcagacaggtaaatatgttgtattgcattctattttagtgtttgttggagtgtctttttgcttcttcttttttccctttaaggcgatcggtcgcataatttgactttacttcaataagaaagaccttaaatctaaaagaacattttttatatttatattttttggtttaaacacacaaaaccttgaatagaagaggttaaggtctacatgtgttggcaattcttccttttggtagttaagagatcacatttgtgtaatttagcaagtttttgatttttaaattgtttgattctatgaattactatctgtcgagcctaaagaaatttactcttcatgagttgctggtcattgtaatcgtgctctgaaactaatctgcatctagactagttattctacatcacctatcgttggacccatagccggtgtagtgtctgttacatgcatcagttgcttatgctttgtaattattcagaggcatcgacaaactagggcaaatacctatgtatcctatatttttggtcaaaatagggcttttatattactgttacttttttaatatgttgacatgcatctatttgcacaatccactgaagtaacattagaacatttcttaatggtttctgaaaagctgtttcatggattctcataattcgactcatgcattcaaagatcactgagtcatcttaagttctgctctaaggtacttgatctgctttggcctcatgctctcactttgtttttaggaatttgtctacctcaaccatt

SEQ ID NO: 9774 - DNA, 1366 bp, Eucalyptus grandis
  Intron number 11 from transcript Egrandis_v1_0.005751m (lo cus Egrandis_v1_0.005741m.g) derived from phytozome v7.0 ( chr-ID scaffold_11; pos 29100635 to 29102000)
tgcaggtttgccacttcttgtttttgttgattgtattactaatctaaactctagcatttactttgttcaagagtttggttccaagctgaactgttctgatttctgatttggtagttattttaaattgtaatgataacttgtcaaaggtcccagtgtccccttgagcgggcttcatgtaggaatattggttataactgatgatcttttaagtgatataataaagggtcagatgaggatcatgaaatgattgggtcaagtattcattctcgattacttgcagtaatgatctaaattgccaagctcttttttcaatggaagaggatttggtggattttttctgtgggatccctcaaagggatgtgggataagctttaggcagacaaatgtatctcatttatgtttttggtcatattaatgccaacaagcaccatgcttggagtataattgggagatttgtttttactagattttaaatttgttggttgggtggagtttggtgggtcattcccattgatcatagatatcttaatctattctcaatcaaagcaaaccagattgaccctttctgacttgttttcttagacaagcgaatgcttaatatagaaaccattatttgctagaaaattagattctgtatttttaataattagaatggttgcgaatgttcctagacaccatcaggattcaggcataataccaccaaatgttttggtatcatgagtgtgtctcccttgagtgtaggtataaattataagctgaattatcagcttcgtccaactcaaagtaagaaacgacccactcacagcaaatgaaaatgccatattatgaagcctcaattttgagcaacaaatttgtggttgttctattcaatgtaaggatttgcacaaactacttatggtagggtagcataccgtgtcctgtgtggaatcatgtgtttgtagtgccctttgacaaattaaactgagtatgcaggcttaccttagttaaacagcttcctgcatgcttgatattttccgttcagggtgaatgttcattgaactatgaggaatatacaaccactatcaagtaatatcaagtaaatgcctggagcatcatcctctgtcttgattatatcttgctgtagttttcttcatctaggactcagcaaacaatatgtagtgcagatttcttttttttcattgtccagtattgattgattgggtgtttgtcgtatcagaatgaactaagccattatgctatgttaccacattgaaatgacccactctaatcacggtaaatctaaatttgtactgttcaatttctttgtcgttaaaagtgaaccattctgtcaggcgcaaagagcaagaggaaagttgatcagagaagt

SEQ ID NO: 9775 - DNA, 867 bp, Eucalyptus grandis
  Intron number 1 from transcript Egrandis_v1_0.046967m (loc us Egrandis_v1_0.046967m.g) derived from phytozome v7.0 (c hr-ID scaffold_10; pos 26138839 to 26139705 reverse strand )
ctctctctcactcaaacacctcattcttttgcaatgttgattttgataatcaattgactattttggtttaggttggaggaacaaacatgatgaattaggcatctaaaaaccgtcaattatggcatcttatttcttcataataatgtgtgtgacggtagaattgtgtacggattaggcaatccgaacgtcgaggtaccttttttggtcctatgagaacaaatatggcctagaatttcttggccgagtgatcagtcctttatatactagcccggctaaataactccggtcaagtccaattcgggctattctggcttaggcccgaaattttgcgtacataacttctgagaatgtgcaggctgtatcatatacatcaaaaagcttctgcaaagcaccaccatggagccataggttaaaatgcctttgatgctattttcggccattgcatccctcatataatgtttaactagtaacagcacaaatgggtttagtagcccggctcaagcctgtctgggcttgaaaaaatcattttcagctaggcttgccccaagagatagtaggttcttctaaattcagatgttggattctataaataataagctagaaaatctatataatcgccatctaaaactcgatcgatgaaaatgacgagggacataacagagaggtcaattacttcaaggattgcgtcgctaaaatggcctgttcataacaatcctaggtatgacatgtactaaggcttaatagtcatattgtcgtaccatgattaggcatgccattgtcgagaagacagcaaggcttggggccaccgtgtatacctgttccagaaatgtagccggtgaaagattggaagagaaaggatttccaggt

SEQ ID NO: 9776 - DNA, 2024 bp, Eucalyptus grandis
  Intron number 1 from transcript Egrandis_v1_0.033719m (loc us Egrandis_v1_0.033719m.g) derived from phytozome v7.0 (c hr-ID scaffold_4; pos 32093583 to 32095606 reverse strand)
gccatttcaggccctccgatccctccaacccttccgtgagttccccgtctttctcttggccctccgccttgttccctttttattttttgggtggcgtgtgcttcgtttagtttcctcaatttctgctgctgctaccgatgcgtgtgattctttttcttgtcgctgtccttagtctaatttttcgtggtggaagatgatgaagaatttgcataggagaagtgaggtttcctcagcttccatgtccgaactgaggggtttttagcagcagagatcatttgatggagctgggttcacccgttttgcggcttaactggggcaaaatcacaactttgttccggctgaatgagttcttggcttatatcttaattcttctagttgattttagccgggtctaggattcggactgattgggacggtaatgcttgttcttagagatagtgtttttatacattttggacgcattgagttcctcaatttctgctaccgatgagaatgattcttttcttgtctctgttgttagtcatttttttggtggtgaaagatgatgaggaattgcataggaaaagtgaagtgtcctcggcttccatgtctgaactgaggggtatttatcagtagagatcgtttgatagagttgggttctgcacattttgtggcttaaatggggcaaaatcacaactttattcaagctgaatgagttcttagctgatgtcttaattcttctagttgatttcagccagggctaggattcggactggttgggacagcaatgcttgttcttagagaagtgtctttatacatattcgacacattgagttcctcaatttctgctattgatgcgtgcgattctttcattgtctctgttcttagtctatttttcagtggccaaagatgatgaagaattgcataggagaagtgaagtgtcctcggcttccatgtccagactgaggggtttttatcagtagaggtcatttgatagagttggcttctgcgcgttttgtggcttgaatgggggcaaaatcacaagtttattccatctgaattagttcttagcttatgtcttgattcttctagtcgattctcgctggggaccagttgggacagcgatgcttgttcttaaaaaagtgtttttttatacttcttcgacgcattgagaatatgttgccttgccatggcttaccacatcttatctatcttgtgatgagatttttctggtcttcttggctctgccctgctcaagtgctagttctaaaacctgagaaacactgggaattagggcggtcacgagaagtctttagcacaaatttggctgctcatgtcatgtcctttgtaacagagccataagctttaagccaacgagccattgtagtttggccagatgggcacacagtgctgcatctttgtgactggtttggaacatggtgttttatagtttgtagggatgatttgatcttgaggagatgtagagtaacttctcctttgaaattccggcaaattagttgtacttgtgcagaattcctgaagtactttaagaaactataatcacataacaagtttctggtcttttgaataagtttccttcttggtttagagaattcttatggtagttcttttcaagattaggaggttatatcaggacatcaactgatctaagctacacctatcaaaattaaagggccatacattgtgttcaaatttaattttaagttattaatgaccggacggaaccaagaaataacacctcatgtgcagtttgctgttggcaattcagctgtccaacaaatgacacagcttgtgtctggtgattggtgaataaagtgagctctcttcaattccttctaggtcgaggaagctagatttgattaaatcaccttgtggatgacaaagatctctttgctttataactgatgtctattgcaggaacgctgttttgttactttttgattggaacaagaaatagcatggacccgagataagatgatttgaacatagctttacttacaattttcaaatgttatatgtagaaa

SEQ ID NO: 9777 - DNA, 3712 bp, Eucalyptus grandis
  Intron number 5 from transcript Egrandis_v1_0.012913m (loc us Egrandis_v1_0.012913m.g) derived from phytozome v7.0 (c hr-ID scaffold_5; pos 22776348 to 22780059 reverse strand)
aggtttgtactgaaactttcatctttctttctctttctctctctctctctctcaatcagaattatgcgggaatccttagtcctgtggtacacagtccagtgtactacgtagtgtggcgctcccttgatggtcgcagacattattttagttagagtacaagtatcggctcagttaaatcagtgataaaaagcaatcagaagggtggttaggttctataagctgattagatttgtgtttgtgatatttcaaacaatgattttatttatttatttattttttggtccctcatttaggcttttttttttttttttgctacttgagtgcggcgctgattggtgtagtatatctgctgccttggttgcacagtagagaacaatggttcatttgttgattttagccattcttcattagaattgatgctgatgactttttatgtttctacacctgcagcaattgtgggatgatgttatttaatgtagatattaggtgcatgctttaaaattttatgataaatgagtggatttctatgtttcggttctgcttgtgagacctggggatgttttaattattaggtccctaaaactgactcaagcatggtttcattgtgctggtcttacattttattgtcaccattttgtcatcacaattcctgttacactatttaccgtcctctgtgcagtactcaaaatcctttaaccatgcctcccatcatgtacttttggtcttgaaaagcccatacgcatttaaattttaagtcattctctatgatagggaggggaatgtcaaacctcaaatttgttgagtaggatcctcagcatttgcctaattggcttttcccaatttttcgcagctcttcttttgtattctcggtgttagttttatagcatttgtctcttataattggcactccaccacgggcagtcttgaatattattgatttgaatgtggccaacccaacagagacttttcctcctaagtcttcattttaatcgtatctcatttatcaaaccacacacccccccccccccccccccaaaaaaaaagtgtatgcatttatctaattccatgtcattgtgctttgtacatattcctgaaaattactcttggttctattggacatatgatacttagagagagagagagagagagagagagagagagagagagaggggatatttaccagtcactataattagtggacatgaggcaccaaatcatcttaaccaggtctttcctgaattgtcatactttgatcagaaatttagttgcagtaaatactttgtacattatcattctaagtcatcaatatgaagaattaatgtagatggcgtaagcaggatttgtatgtacaactgtacttagtgggatttagtttgttgtctctgtttgattgttgcatccttcatcgtaattatctctcaataattgaagtatctgaagaaattgaacctgcaatatctcctcctcttctacctttctttttataaacatctgtcctctgttggagaagagaaaaatatcttctcgcaacttctgtccataaacttctttgactcaatatttctgttgtccatgatgaggtgacatgccattccattttgcatctgtcaaggagaaaactcctcaataagtccaaaccttgtgttgggccagactgatgaaggaagtagcttgtcactgtgatttatttatttatttttcctatgtagtttgtcactatgattacttatgtgtgatgaacccaacatctgtgacttggtgcttctcctttgcttagtaaaatgcaaggttcattagtaggctaatgcagataaggagaggcaaatgagggcatattaagaatgaacaaggtggttctttttgcttgtaaagtttataaagctgaatgaaatggcgatagtaggctgaaaaaatttcatagctttgtcacacttagtaaacatctgactagttgtagattttgaaactcctgtcttggattctgaagtggtttcacaatatgtaacacttatatatactctcgcatgtcaaaaggatttgttactgctattcacccagctttcttggaatttttgttgttatggattctatgctgaagtagataaaaatggatgttcctgattcttgttcggatgtaagaaacattatggcgtcactgagagtaggttatgctagtcttatgtttggttgtatgggtgtggatgtgtatggtgatattttaaggtgctaaaattgggttttatttactatatcattaagacttcattgtttagggagcataagtctctgcatgcatgagaatgtgggagtttgggtgcacgtgtatgtccttgtgtatgtgcacgcacatgtgagcatgtgcatgtttgtaattgcgtgtgtttcattgtttgtgtatatgaggggtgcttctccattacatgggttgagcgtgcgctggcatggcacgctctcatgtcgtatgcgctaataagtaacaaaaagatctatttgtcacaagaggattatcaatggactataaatcagagaggagaaaagggaagtctatctaatgctaaccaaatgactaaatgtctgcctctgccctatatttctgccgataattgttgctccctaatttttttgatgttcgtttatggcttaaaaatcaagaaatgattctctgcatttttataatgtgaaggaccaattaagctgtttcgaaaagttttgatctagttcatctccatgactaatacaagcctcaagctatggtgatgtaatggccttttgatgtttaagtaattcacgtttagtttgcttcttttatattggaatgccctctttagtggctacttcctcttgagtctcagacccattagttatccttacttcctacttaatctttcaattatgaggttccattacaaccactcagccctgccgactactggtaggtgagaaactgttatttcatcttctgcaatgggacaatggtttgctttgccattttactagtgttgctacccagtagtaatccttgctgcccttcgatttatgtatagtttttctctaaaggaaccccgtgattcttgtctgcattctgattttgttatcttttagacaagactgctgtatcttattggattaatttgtatgtcttctcatctgctgccactggacagtattgaatgactctggtattgcttgtttgcatagaaagagggccatatatttccttcatccgtgattgaagaaacttcattcaattggtcttctgatgggtgtggtacaaatatggacatcaccaatatttatttccagttaagcttgtatgtgggtgatatctttatttataactagaaatcaaagatctagttggaggaagtttcctaaatctgggaatggaggaaaatttagccatagagaatataaagagggtaatgtggctaaacatgaggattatttagtttgtgatgttggcaattgtgaggatataattttgggaaaaggattgtttctgatatcttccttttaaattaattgggtggtatgagatctgaagctggtccgaagttgtttttcttgttcatcgatgcttagtgcttccactacatgagcttagcctccagatgttaatcaaatgcgtcgcttgcctgatgttcatgtttggttttatttgccctcaacactcctaagttatcgaacttgttcattttaccgtgtaggtccg

SEQ ID NO: 9778 - DNA, 1504 bp, Eucalyptus grandis
  Intron number 1 from transcript Egrandis_v1_0.034772m (loc us Egrandis_v1_0.034772m.g) derived from phytozome v7.0 (c hr-ID scaffold_6; pos 14432238 to 14433741 reverse strand)
aagaagcctcctaaggtaacacctgtttatgtgcatattctgcagatttgtttataactgcatggcccaaatgtggtacctgtttaccttagacaattacatagattattgtgaatgccgaatatgacgctggggtttgccgacgttgtacattaatatttctgtaatgcggtgtttgttcaccctccttcacttctaggtccatgaaatcccaaatcgtatatggtgaggaagtctgcatgtgagtccttgagtttatttgttaccatactctttttggtgtgcttattgaatgatatggattatgttagacctttgacattgttttagggcgggggggcacatatctatctgcttgataatagtagttacattgtctgttttattttttgtcaccgtcagagactgaaggcggtgatttttcttagtattttgcagtggagctttctttttttcatcaccaacttaataaaacagatggcatggtaagattcctgcatgtgtcttcttcattgagaaaacatatagatggaaatgaccggttatagttgcataatctcggggttatgggctgttaggtgtgatcctcaacatctatggcctagagattagatatttctcgatgggtatttgcagtgtttttcttttatcaaaggagagtagtcttagatgtttttggagaagcctcgaggtgtacctttgcgatttatgaattctacactatatttccctctcgtgacagactaactggagtgccatgagcaatgcaacattcgtttttttttttcaatcatggttaggtgcttcacgctttattcaagttagttgtcatctttcattttgcatatctgttaagggttgtatgactagtttatcctggcttggctgcaatgggcatcttgctgtggaatcttgtttctattttctcataagatgtttaaaatagagatgcactaggtcttgctttttctgaaatatctcttactctggtattgtattgtactaataaaaggtccttgaaggtgactggaatgatattatggatgcttgctggttctttttgcagttctacagctattagtgttggtttgtgaaaacagccttggttaattcggtttttagctccactaacttccaaagtaggcaagccctttgtcgcacacaatctgggaatcccttccacattttcttctctgaggtctacaaaattttggaagaaactttggagttggacaaccctgaaatctttttcatgtttaagttgcgtctcatgttattgcgatgttctgcattcattcccttttgctttttcaggattttttggcattgaaatgcaatatctttagcgattcgtatgaagtgagtctttggattttgtattaggatttttgacattcttttggctaattatgagatgcatgcgtccctcttaaatctagctgcaatttgattctcatttctggctgcagcatttcgaggaccttgttaggggtcgtttcttcaa

SEQ ID NO: 9779 - DNA, 1715 bp, Eucalyptus grandis
  Intron number 2 from transcript Egrandis_v1_0.028697m (loc us Egrandis_v1_0.028292m.g) derived from phytozome v7.0 (c hr-ID scaffold_9; pos 6010355 to 6012069 reverse strand)
tgactccataattgaatataacggttttgttataggtagagctctgcactttttattgattagttgttttcctattatctcttgagtaagaaaatagccattggtactgcaaccttggttttatcacaagtcctgtggatgctatattttgttattcgtagatgctgcagatgacagatgtattttgcaaaaaagtagaaatcatagaagttatagaggatcttcaaatatttgggggttcctaattttgacccattgaaggtaaccattatttaaggttataacggaacctggtcttttggagttatccttttattttcttgaattgggcattaccatttaggtcttctttcttctttatctatctaatgtcattatcactgtacttcttgttgttattgtccatcatcatcatctttgacatttactttagatttcagatcttaccttttttggttatagattttcgtaggcaataggttgcctgtcattttccagcaaaacgttgtagatagttaagagtgctatagatgacagactttaagtacttgacgctgccagctgaggattagttttttgctgctcagctagctattttgagtggtgatgtgccttaatggcttctaatacagatttgttgtctatggcttctgatagagtagattactcagaatatctgcattttctatcaactaattaaattcattttagtacagccttgtatattctggaaaaaatttttagaaattatattaaacatgattattctcatcaatcggactgaaagtatcatggatcaagagtttgtgtttgatggagcctgtgatgaacctttttaattcctttattctgaaagtattcaagtgggaaggagaaagaatgtacttaattgtcctgctagtgaaaattgagctgcaaggatgtgtctgtactctgtagtgctttcaagttctacctttgggtctgtgatggatggttagaagaccccacgcgtcatccattgtgctgcagcatgccttacagttgaatggcacttcaacatctcatcttttctattccagtaaattgcctgaaaggacttcctttcacgttagagcagatcttcccttaagccatattttttgttgaagcttttccccaaaacagacatttttttatttttattttgtttgtttcttgaatttgacatcattgatgtctttctttttaatgaactacccaactcttctctttttggtggaacaacccactcaaattctccctgctgattgatgacttgcaagaaagataaatctattgcctccctgctgtttaggtgacaattatatggtatcagcaacttgatttggctatatcagattgttgagtgtattgagaggattagccctaaacatccaaaattttgttctagcaaagaccagatagtacacaaattaattttaaaacccaagacgatgaagtatgctgcctgcttagtttctgcagtccaatgggtagtcattgaatttgagtacaatttcctgcatatgtgatctctggcttacacatggcagagaaagtagaaatcactttcaaatacattactttgattttacaagagttatgatactatctcctaaaatcatctgctggccacttatgattccctgttgcctctgcagtttgtgatccaaagagccttctcttcttgtatggaatgcagttggactacagcg

SEQ ID NO: 9780 - DNA, 7608 bp, Eucalyptus grandis
  Intron number 22 from transcript Egrandis_v1_0.054946m (lo cus Egrandis_v1_0.054946m.g) derived from phytozome v7.0 ( chr-ID scaffold_2; pos 42890360 to 42897967)
cacttgtttcatattctagtcgacttgcctctcaggttgaatctcttccttcactgttatattttgtgatcctccaacgagtgtgcttcaggatgcaattaactctaacgtatagtaactcctattattcttgccaatctagattgtgtgatatgcttttttctgttttgccatatccaacgtagctaattaagcctaagcatgtttggttgttgtaaaaatgatagtgcaaatctatttccaatctatcagtttaagattttactttgaataattttgaagtcgtggcaatccttattatggccaaaattataattcctattgccccatgtaatagctagctattacggctgtgaataaactggaagagagaaattttgtacgtgtcaatgtaaatagaaaagagtacagggagcctatttataggcttgaatagatgacaatctaaggatagcaaatcagatcagataagcttaattaaaataaatacagagaattgaaggaaatctctttaatatctgtgatgacacctaaatatctctaacgctctccctcaagttggagcatagatattaatgatgcccagattgttatatatttattttatcctccctttatccaaaggtttagtgaagatgtctacaagttgttcactagttctattgtgatttggaagaatcactccactttgcagcttccatcgaataaaatgattgtcaaccttaatatgttttgttctctcatgaaacatagggttggaagctacatgtaatgctgcattattatctatcacaccatagagacatatataggagatgaagttttaaagcctaacttggttgatagctgctgaattcacactaattcatatgtcacttgtgccatggctctatattctgacagaacactagagcaggcaacagcaatctatttttaactcttccatgacactagatttcctccaaccaaggtacaatagccaatggttgatattctatcatatgaagaccttgcccattcagcataagagaatccttaaattctgacatgactatggttttagtaaacaattcatttccctggagccttcttcaagtacctcaaattctgaataactgcattccagtgagatgtacagggggaagccaagtattggcttacaacactgacaagaaaggcaatgtgtaatggagtaattgtgaaataattcaacttgcataccagtcttctatatctcttaggattaccaagagtctctccttcctcaacaactagattgactccttgttccgtaagtgaatcaataggctttgatcccgacatgccggtctcggtgagcagatcctggacatacttttgctgtgacaaaacaatacctttctatgactatgttgcctcaattccttggaaatacttcgactttcccaagtcattagtccaaaactgttgctgaagatagagctttagttcagctataccaacgaagtcgtctccggtgatgataaaattatcaacacacacaatcagaacagcttgccctgattgtttataaaagaagagtgatcatttccatatctagacagttcaaaacagagtacaaccttgaaaaatcatccaaaacacgcttatagggactattcaaatcatacaaagacttttttagcttgcaaattagtctcccagactacctctaagcaacaaaccacagaggttgcttcatatacacctccttgtaaagagtaccatgtaaagaagcattcttgacgtcaagctgaaacaaaggccagttatatgtgacagtaagagagatcaaaatacgaacaaatgtaagcttggcaataggaaaaaaagtgtctagatagttaaccccatagccgtcatccagccagagctttgtaatgccttagctatagacttgggaagatgatattgtttaacagtagataaaaaggactgaaaggaaggagacacggaagaatatgagataaagttggcaatagaatgttgagtggaagcacatgtacctttgcgatgagcaataaaaagatcaagatcagacaaaaagggtctgctaatggtggatctagagctgaagatgatgtagtagtgacaagaggaaggggggagcaatagctacttgaggacactaggtatagacattgagaggaagtggtacttgtgcaaataccggtgaagatggagtagttgaccaaatggtggtcacatgtaaattttcatccacctcaaaattagtgattggaagatcatgatgagtagattcaaagaatgaaacattagcaattataaagtatttccttgatgatgcataataacaacggtatcccttttgagtacgagaataattcagaaacatacacttaatggccctttgatggccctggatgaagttttgatactccaggtcgatgatcacaaacaaaacagacagccaaaaatacaacatggtaagacaaataatgactgattgggaaacaaggtagaaaatggaataccacctcgcaaaacagaagaaggcatgctattaacaagatagcatgcggtcaagacaacattagacctaaaggttttggggaccttcatctcaaaacatggacttgatagcttctaataaattcctattcttcatttgagctacacaatttagttgtggtgtttagaaaaagaagattcatcgatcataccatgttgagtcataaagtccgaaaaatgtgtagaaaagtacccctagtattatcagaatccaaaactttaacatgcacaccaaactaagcatgaatttcaaaaataaaggcacaaaattaaagaatacaattctaaacgacttttcattagatatgtccaagtgactctagaatcgtcaccaacaaaagtaacaaagtatctaaaacccaaactagaaacctcatcaaatatctgaatgaactaatgaaaaaggagactgcctgcttaatgactcaaggtgggtaactaacacgatgcaatttgccaagttgacatgactcacactctaaactggaagagattgaaaacctgaatctaacttttgaagagtttgcagtagatgaccaagacaacgatggatctaatgtagggaagtaagactagagcatgcaatagatgaagcattttcaagcacatacagcccccccacctcacgccctctactaatcctcctttttgtagctgtatcttgaaaaatacaagaatcagggtagaatgtcattggcactgatagtttttggttaatttactaactcacatgaggttagacggaaattgtgggagataaagcaccgaggataatggcaatgaaagagttggatgaaccgtaccaatcccccttaacttgtgtagttgaaccattagcttcaataacagtgaataatgatggagtaagaaaggaaaatatgcttgaaagacttgacatatgatcaaaggcccttgaatcaatgatccaagggtgagacacaattgaaagacatgcaatagcattatctatttgtaccagggaaaaagtgggctgtgaaatccgaaactggttgtacggagcaaaatccttattaggcataaccactatgttgcctttcaaaagactttgcaaagaagagtcagtaccacatgcagtatttgcaaactattgttgctaccctggtatcccatgtaacttgtagcaatattttttaaggtttgccacaataatgacaagtccgaatggcccctaagctatcaataaaaaagtgggactatccataatgttgctgttggccttggcctcagcctctccttcttgtacctcggccaccaccacggccaccaaggccattatgtcctccatggtttcctccatcacccctaccaccaccgattctggactaggacacgagctaaactatctaccacaaacgtggtgtcttgagaagatcatgagatacccgaagaacttgagcaaatgtgtgagtgatgcaataatctctcctctaagaatctaagatctaatagtttcatagtctagaacgagacctccaaggaatcccattacagccaattgtactctttgaagttgcatttgctgaacattagttgaaatagggagaagagcattcaacttcttatacatccttgtaaaatcaacaaagtactgtgtaatggaacacctattcctctcaacttggtaaaactcctgcaatatatcataaatccatgaagggttattttggcaagaacacaatacatgcaaatactcccacagttccttgaccatgtcaaggtgaattaccagatcaactatttcactctccatagaattcagcatctaatcatggaaatgtgcattaacagcattccaagttgcattatccttgggtttaagcccagtcaagtgtatatgctgatttttgccgatcaatgttcgctttacaattttcttccattgttgaaagttgcattgccctcaagcttcttctcggtgatttgattagaagaagaggaaatcacctcagttgtcacaatattacttttcttaggatcacccattctccaataataataagaaaactaccacaatattttccttcaagtaactcaacctcaatagttcaataatccaacacaattaaaaaatcacatcaataaaccacctcatactaaaagcccaaggttgttacagcactagcaattattcgaacctatggtccggacatagaaatagagtgctggataatattctttgctgtcccaaaattttcctagaggactgaggagctcaactggtgtcaaatcttggctggtcatcgctggcactgggatgaatgagattatgcgacattggacaacaccatatctaggctggaggggctgggtgaactagaggacgccgaatttgatctgggttggatggggctaggcaccgttggatctgggctgctggctttttttttttagagaaactttagcagcgtggggtaacggctctaatatcatgtgaatgaagtggaagagagtaattctgtatatttcaatgtaaataaaaaagagtacatggagcctatttataggcttgaatggatgacaatctaaggaaagcatatcagatcagatatgcataatcaaaataaatgcagagaaataaaagaaatctcctaaatatctctaaaagatatataaatatctgtacaacagccaaatctgtaatagttattgctgagatgctcctcttttctcgctctcaatcgaccagcaatataattgttgtgtgacgtaatattctactattgcggtaaatagtcatacttaatcataactaaattatttatttgtaaataaaactaatcgtattatatatactaatcatcctattgataataaaattgtagttattgtagttcttaaatgctttttctgctttgccatatccaatgtagcatttgctgattaaacttaagcatgtttggttgttgttttaaatgtgacattgcaagtttatttttggtccatcacattaagatggttgctctgaataatagtgagtgcattgtaatccttattatggccaaaattttaattcctattaccccagtgtagctagctattacagccaaatctgtaatagttattgctgagatgttcctttctccctctgactccacaagcaatataatttttgtgcgacataatgttctactactgcagtcaataaatatacttaatcataacttaattatttatttataaatgataccaatattattgtatatatactaatctttatattgatcataatattatagttattgtagttgttagatacttaattgattgcatatgttcatataaataggtttagtcatttctataacagagcaccaccctgaatgatggaagctgcaggttcgagccttgttagtcttgacgaaatcaaatgcaagaatataaatatgaaaaaccccatttagttttgataattttattttaatagtgaaactatatagtaatctaacaatattattatggtaacataattagttatgttatacttaattatatattatacatgatatagtaagtaaccaccaccaggggtcctggtgggaattgcgcccacatgcatccgagaggttgagggtttcaagtgtaagaaaggatagaaatcctccatgggccagctttgacgggtgctcatggtgttcgcccagcttgttgatgtggttgtggtgatggtctcctccacacaaagagcagctatgtctcaatctgaacattacactgcaagtgtgagactcttatggtcatgcccaaagggggccgcaaccaccagttgcccctccccacccttttccttataaaaaattttgaagataattgtttagtagttgatgtactagaggcgagagaggcatatgacacattttatccctattcctctgccattatactgtcatcaaacgaagttactattctgctacccaacccaaagagtgcaataaccattagagctatataaaatcacaaaataataattgttacattacaaccttaaccataggtgcaaccaaatgtgtgctgcctctatctgttgcaggtcaacaactcctccttccccttcttcaaatttcgatttgtacttttcatagagaaatctctagtcaacaatagaacaagatccattttgcatcatacctaagggatttattggtttgggccaaagaagcaatgtcgcttgatctctagaatatacgttcgactttgataagtaaattgtaatctctgaaacagtgggagtacataagatctcatctgtccattggttcaaggcatataaatgtttttcatcatcctgtgaaaagattaaactcaaataattatccagtcaagttccatttaaatctctggaaggggtaccctagatatataaggcccaaagccaaaatctttgtatgaggaggttatcaattgctagttacagttctttgcccataacttcagatattaggaagatcttgaattttcagttactaattggatgtattttgcggacatttgttgaggatagggtagaataatggaatctcctagagtaaggtgggtcatgtctcagttcacatcagataacattatttacgaagaacttgaaacagcctcttaaaacacattaatgaacaccagacgataaccgggatgacagcaactttaaagaggattctgaagtttaacatgaaatcttaactagggaaatttctattggctgagtttttcactgcgtatgctgatatctgaaacttagcgatctgtcatgatttctctattatattatctgccagttacaaatgccagtaagttgcgtaaataactctgatttttaaagttggttccatgttgcagtttgacatacgcatggttttatgtctgtgtatgtacacacacacacacacacacacacacacacacacacacacacacacacataccatatagtttggcaacatccactaaaagacggaatgtatgatcctatggtgctggaaatttgtcactgatgtccttagcaaatgttcacttcaattctttttccatttccagatttggtcagag

SEQ ID NO: 9781 - DNA, 2257 bp, Eucalyptus grandis
  Intron number 2 from transcript Egrandis_v1_0.011570m (loc us Egrandis_v1_0.011570m.g) derived from phytozome v7.0 (c hr-ID scaffold_2; pos 19793883 to 19796139)
aaatctcttcccagaacgtaaacataatcattctggtgagtttgctcctcccttccacgtctaacacggccaaaaaggcatgatcatagattaccatcttagagatattagatcaaattcggtttattaagttgtgcagtaaacttaattgacatttaaacaagtaagatcaaggacaagttttactagttcatattaaaataagtgagacgctatttccaccccttatatactaaatccaaccacttttcaccaaaaaggtaaaatttatcttagtcattcaattgctatttaaagtggtggctcaaacttatttactttccttctttttctaggttttcttctcctatgtaggaaccatttatcataatcaagatttaacatgtttcatttagtttgttgtggatatcccatgtatattaaaggcactatattttcactttatcattatcaaaatttaacatgtttcgttttggtttattaagcggtgtggtaaacttaagtgacatttaaacaagtaagatcacatcacacgtcaaagagaaattttagtagttaatattaaaatgaggatggctctatttccgccccttatatgactaaatccgtccactttcaccaaaaagacaaaatggttcgtaatattcaattgcaatttaaagtggtggctcaaacttattcactttccttctttttctggtttttcttcttctatgtaggatctatttatcataatcaagatttagcaagttttgttttggtttattgtggatattctatgtatattaaaggcactatgtttttactatattattacaatttacttatgcacaaattaaattactcgtaaagaaaattttcattaaatcaaattcttttcaatgttgtctaaaaaatttgttgattaatcgactagaaaaattttaacacatgcacttttttaatgcaataacttgtttataaactttaaaatttgttgtgcatgtcaccattaaatcatttcttatcactttgttcacgtatacatataatgggatgatcgataggaaaaaagaaaaaaaaaacctataaggaattttcgaagtaaaatcataattacattctccaatgtgaaaatttaaaaggtaaaatgtaattaaatcacaattcttattaaataagaaatgtcttttcaaaaattcaagtgaaatctcatcaaataggaataacaaaaattaatatcatccatgaagtgtttctggaaaacaaaaaacaaaaaagacctaataagaaagggtttgatggtgatatacataacaaaagtaaaagtttatgaagatgagattgtttagaaaaattgtctatattaaactctagattctatatgacaattaatccatgaatttgctcaacaatgtaaaattaggtttcttggaaaaaaaaattcgatgtaacttattctgcagaagtaaaatttaaaaataaaaagaaaacaaaatgccttcaatatacacattataaccatattaaataaacaaaaaaaacatgtgaaaagtttaactatcgtgactagattctaaataaaaatataataagaatgaaaaagaaggaaagtgaatatatttgggtctaccactttaaattgcaatttaatggttgagggcaattttgcttttttaatgaaaaatagggtggagttagttatatgagggtggaaatagcgcaacccttaaataaactgtaaatcaatcttgtgttttcctagagcattcaagctagttatatgaaatgagtggggattggccaaaccgggatagaatgataaaatctatatactagtatcaactttttgttatgcaatgttccctaaaaactcaaagtgttaaatgttttttcataaatagtaagtagttgttgaaaaggctatttcaattgtggaaggtatcattggaccttagtaaacaagtcttaagcctatagaagaggttggattgagatcgacaatcttattcaaattggaacacaaaatgagtaattcttttgtgaatctgtcggcactcttaacatttgtttgtcaattcgaagtataggaatcgctatatttgatcaggattttttatcaggtgaagcgcgagaacttttactattaactcgacgattcaagagagtgattttcaagctagatagaattttttaatgatggcacaagaatcaatattagtgatattctagctagacacgatagtatactaaatgggtcttcttgatggtgtaggaa

SEQ ID NO: 9782 - DNA, 1871 bp, Eucalyptus grandis
  Intron number 1 from transcript Egrandis_v1_0.008285m (loc us Egrandis_v1_0.008285m.g) derived from phytozome v7.0 (c hr-ID scaffold_11; pos 16457710 to 16459580)
aagtctctcaggcgcatcatcagcgcctttctcaagtacgcactctctctctctctctctctctgcgcgctaaatttcccgactttctctcgttcttttgtgctccttcgatcggcatttctccctgacccgcgcgattgtagctcctgcggggttcgcgaggacggagcggtcgatttttccattttttccgcatttgtgtgtctgcgactgcgagcgcacgtcggttcgaagtagatttgctcgagcggccaatagccgtgccaaggtagtcacacgtaggcaaatgaagtcggttgattggcgggaaagcgcgggtcttgtaattgattttgcaaggatttagcttgttgattgatctgtctgttgggctgagggatgcatgaaaggaaaaaaaggcaaaggaaaaattcactgatgaatgctttgaaagggagaaaagggggaagttttctctcaggcggaggagtgattgtgaagatgatagttcttaattggcttttttggtgaaagattttgtagtttcttttaccatgctctgctatctagtggcatttcttttgccaaacctggagacaataggttatatcggtaagcagtgctcttggatgtttattagtcatgacactgtcgaaataactggtggcagatcggtcttctggctgctggcatgcagaatattcagagctgtagtccttttcaactttttgaaagtgtgttcaggaagcttcactgatgttatagtggttatggagattccattgtagcttgcttccctgctacttcaatttttgagaggttgtttggctgtagctgcagcgttttgagagtaatttgaggtataccttagtatagacgagagataaaagaagtggatttactggccactattctgacaatttcaaaacttctatattcattgcagtgggtgattctatccttctccatactctctgtcttgagctgttgctacggttgagcacggttccattggggaaacattgcatgccgaactgaaccaaatttcccattctcatcttataagttggttttctaaaaccttacaatttgtcaatgtcaaagtaacgatttgggccaacaatacatgttatacttccatcactgaactaggccgaaacgaacttgaaaagaggatagatggaaagaagctatagtgatggattttgaggtcaaaacttcctcctggttcacattcaaggctaatgtgcatgagtttctatttctagatacctgtcaacaagctcatccctgtcaagaaaagaaaaagggaaatgtggggggagtaaagtttaagtttggcctttgagttcatggagcaaacttataaacaccctcttgaacagttcggttgggcttgttttaagtttgtactgtttgtttgatatttcgtctcatatataaaatggttcatcagttcaatttctgttgcacccttctgttttggctaaacaagctgttgcaacttggtactgctgtgttcacactggtagacgtgaacattcatgtttcatctatgcctttagagaatccatctcatcccatctccttaagtatgcaaatgcatcaaagcttaactctgaccattgaagtaattactttcacattcacctaattatctcctgtgtcaatgtgaaatattcaatttaaacccgagccttattatgaagttatgtttcatcaagttctatctcatttttgttttgttgcctttatcattcaaattttgaagccttttgttttagttttaggtgatacatttctttgttggcatcatgccaatcattttggttttatctctatataccgctgaactatcttcttatacagttatccggaagctgcagaagaag

SEQ ID NO: 9783 - DNA, 1416 bp, Eucalyptus grandis
  Intron number 3 from transcript Egrandis_v1_0.041018m (loc us Egrandis_v1_0.041018m.g) derived from phytozome v7.0 (c hr-ID scaffold_1; pos 38367509 to 38368924 reverse strand)
cttgctggacttaagaaggtaaagagtcacttgtatattgagcattttaggaaaggataagttttggctgctgccgggcaaccgcattaattgatgatacgagagagagagagagagagagtgatgaactctgcatgaaagtgaaaatgactgagtgaagtgtgatggggaacaaagataatttatcatgcgagggcgaataacggaccgtgattttgatagattaattgcaattaagtaattgagaaacataagaaatgctatgtgtccaggcagcagtattgctactactttgtggctttagctacaactcactctttaggaatcatctcttgagttctacctgtgttgattaaataggtgattgcaaagacaatataggtaatttatgtcttttaattgcatgtatatgatgtgacagactcaagtgcgaatatctctcaaggcggaaatctttttggccttcgagttaggttttattgttccttgatttatgcttgaacaataatagcagtaatttattattaaccgccttgctattatgttggtctttgaggagaatttgatggttttctgcctcagtataagattgatcagtcctactttgaactttatcttgatactaacttttactattcatgggtcaagaaggcaaatgaggggaacatctcatactctagttttagtagacttataatacactcaatcaaatttaggaaataatataattgaagctccacaggaaatgtctgaaatgtcgcatgttctccattttatctttggcttcctcttaatggtaaaatggatctatctgagaaattcttcgaaaaatagcaaaatatttgaagttttagatttattacattacataacagatctactttgagattgtacataatatgtttgtagcaacaacaaagtttaaggacctcctgttttaaattttggcagcaatatgccacaaattttaaagattatggcaaagaaaagacaacttgaatgttctacacgatttcgttgacctcgtgatggcctagtggaattatcaaatgtagaactagcatttacaggagatattttgtggcttataaacattttattaaatcacgactattcaaaataccttcatacaaaatctttgacttgcttgaatctctaagaatcgcctctgatctgaagggctcaaaaacttgggaaacaagtataggccagttggagggctaactcggatcccaccatgcatctagccttttttcatttgctactggttagttattgtttccaggttttaatatgacaagcttacgctaatctaatgcaactgcaaagaggtgcttgtttgactgaaatcattagacaaaaaaaaaaaacaggagagaaatgcttgggtaaatgttgattaacctgtcattgcag

SEQ ID NO: 9784 - DNA, 517 bp, Eucalyptus grandis
  Intron number 4 from transcript Egrandis_v1_0.013212m (loc us Egrandis_v1_0.013183m.g) derived from phytozome v7.0 (c hr-ID scaffold_10; pos 7333808 to 7334324)
tttaagaagattaggaaacccccgtattttaataggtatgtgagcattgattttgagaaatatgcttttcaaaattgaaaatgctcttgatgcttttccttgtagacactagagagcgcactgtggcatccgcactcaataattaattttcattttgtttgcttggcagtattcattaataaagcagcggtttaacgaaggtgtactgcagaatagcatatatggtagaagcttctgtagtttcttttgatggatttttttctttcctcactttttctttgaactgtacatgaataagatcaagtctcattgttgcagtatcatctgaattactatttatggagtttgatctgtctctggaagtttgttctatttgttgcatcactgactagctggctaaaatttcatgagagcacactatttagccacgaaaagctagctctgcagtgttacttgatcagaataaggacatgatttgatgttttatgttgactattgtcatttcgaattctgctag

SEQ ID NO: 9785 - DNA, 601 bp, Eucalyptus grandis
  Intron number 8 from transcript Egrandis_v1_0.013759m (loc us Egrandis_v1_0.013759m.g) derived from phytozome v7.0 (c hr-ID scaffold_3; pos 62515886 to 62516486 reverse strand)
atttgagtatgtgaattcctttccaattcttttgtatcattcaaatttaatttttgctctggctcatttgtaaaatttgtgattgttttgaggaaatatttgaggggttagacctttttgatatttctttatgggaagagattttttttttttgttcgtacaatcatggactcatatttttatttttagtcttatgttatctagatatggcttgaattagcatctcttcctttaataaattgagtgttaaaactttagttctggaatttgtagggtagttggggggaatgaaaataagtctcaatattgttggtagttgactggcatttatggtattgacattcgattcattctcaggtattcactgatggcaaagcatcaaatgtatatgattgattgatatactcaatgacaaaattccttatcgcttcttttattcatactagtggaagggtggacggagggatgaaggagcatttaatgattctttgcttttgactattatgaaaatcactttggaaaatcaaactgatggtctgtatattgttctatcttatacttaacagaattacccacattaatagcaggtctgattccagca

SEQ ID NO: 9786 - DNA, 4215 bp, Eucalyptus grandis
  Intron number 2 from transcript Egrandis_v1_0.012679m (loc us Egrandis_v1_0.012679m.g) derived from phytozome v7.0 (c hr-ID scaffold_8; pos 9164442 to 9168656)
tgctcttcaacaacttctacgagctggaagaagaggtacttatacacacaaatctacactcgcctgttgctgccaccgtatctgcaagaactcaccagccatttcttgctgaatttacaagtttttcttacacgtacgttgtctcatgtcgtctgagatctgcatataaacgatcgttactgatatgctaggtataaaatgatacatcattgcttgcgcctggtgcatgtaccctaatgcatctcgaccattcaatctcgtaggattcgcctgctttctacttcctagataaaccgtgactttcagtggtcatttaaagctggggtgtcaagctcagctcttcatgtgaccattcttctcctttatgtaatatgtcaacggcatcaactattcttctccgtaatttgtatgaacaaaaacattgatatatctaaagagttagggtttctatgtcaatgcaatattgaaatatcatatgctatagagtttatttaagaacatgaaaccttcataatataaatcggaaggattatatacctgctaagcttgatatttaacgtcactctttattcttctaaactctcttaattgttgaaactaggtttaatccttcatgaatacaaattaaattacatgcgaatttaagatatctatattttcattttcactcctacattcgtctcttattcgatgcatttatcttgttttgattaaatatttctccatttccgtaaaagtcttcttttttgcattgtcgattaattaactaagttgtttactaatatacggttattgataatagatgataattgacctataaaggagataactcagcgcgatatattaagaatgaccaatcaccgctaccatacttaattagacttgaaacccttctcgaaaacctaaaaattctcgtattgtttttatttgactatatggaaagattagatgcacgtccaccaatgtcatgagtaatgcaatttctgtctgtgaagtttatggggaaaattatcaaaaaaagttctaaacttattacaattgtgccaattcagtcataaacttatttttttggccaattgagtcttaaaccttttacaatcgtgccagttcagtcatttcgatcaaaattgaccggccggtgtcaacgataaatttttaataatattttattattgaatattttattattattattttttctcctctctcctcctccctcctcctcccttcttcttcatttggctctggcaactagctagagggctgggtgagacggccgagcgaactcacctcatcgtcgttaggtgagggcgagctcactcggctactagcaagggcctcactagatccgatgggcgcttgccccaccaaacctagcgactgtgagggctcgccttgtcgtctttgggtgagttgctcaccctgccagtggcggccgggtgagctcgcccttgctcagtgatggtgaggcaagctagcctcgctagtggctaggcaagctcacccttgccctgtgatgttaaggcgagctcatttggccgcctcaatttggcgattgaccagccccttggttagttgccgaagccaaaggaagaaggagggaggagaaaagaaaaaagagaaagaaagagaaaaagttcaaaaaaaaaatattattaaaaaaattgtcatcggtgcaggccgccagccacgttagtgtcggctggccaaatatagccgaaaggactgaattggtacgattgcaaaatttttaagactcaattggccaaaaaaaaagtttagcgttgaattgacacgattataataagtttaagacttttttggtaattttcccgaagtttatgcatgccctctaaaagtagtgtcgaataggtgtagtagaaatagaatattttgacatgaggaatcatcgagataaaattcaagtctaaggccattaatatatgaagttagattcatattttcactcaaaaaaatataagttaatgggatttgagctaatgaggatatatgttaattcctccgtagcatatcgattccctattgtgtaaccatcacctaacatcctaactccctgacacacacatcttggcaaatctctctctcaatttgaaaggtcacattcgatattctttccatgagatattcaccaaatgtgatccaaactctacccttccaatcatctatcaactctgatatctattgtatggaagacagaataaaagtatggtattttgacttagggagatcaccaagaaggagatgtagtgcgagttcattaacatatctacttggatatactttcactaaaaaactttatggcaaataagccatagccaaattaagggtgtgtttgtttgagtgaatttttcttttttgaattagtttttgatttttaacatatttggtttgccaaaaaaatcagttaatcgaaagccatttatgatcaaagaatatatacatgcttaaagttaagaaaatgaattctctaaccagaaaaaaagggggcaaaaacattttcctaggaaaagattttctagaaagtattctccattatcatgaaattttccccaaatcaaacccatcctaagatatacttgctttatggataaattatcttatcagttttaaatttactatagagatgccgatttagtcttaaactttttcaattttgctaacttttgccttgaatttcaatgtagttgttctagccaatttttaatgaaaaatggtaatgtggcggtagacaatgactagacgatcatgtcagcgattttccgtcgaaaattgactggaatgactatattgaaattttgcttaaaggtatatgactaaattggtaaaattgaaaaatttagaatttaattgacatccgtacaataaatttaggattgattggataattttttttccgctttacacaaatttattctcgtacgtgagatagttgcttaagtaagcaatactcctttcggtagcaagcatggcacgccacatattccccataaaaaaatgtgtttcccaagggagcaaggtcactgggtcaaaattcagcctatatacaactacagagaatcattgtcaacatatacggcctatacaactacagagaatcattgtcaacatatacggccagctgccagaattttaacttttatatacttacagaaatcattcccatcctatcacgttccaaaacctttctccacattaccaactcaaaatcgataagggagggagagagagagagagagagagagagagagagagagagagagcgagagagccaatggagccttcagacaatccgcgcctccgaccacacgtgctggtcctccctacccctgctcaaggccacttaaaccccatgctccaattctccaagcgcctcgtctccagaggcctcaaggcaaccctcgccctcaccgtccacttcgccgcctccatgcacgccgacccctccttgcccgtcgacatcgagaccatctccgacggccacgacatcggcgggttcacggaggccgagtccattgaggcctaccaggtggaccttcgggtcgtcgggtcgaggaccctggccaaactgatccggaagctcgaccgctctggccgacccatcgacgcggtcatctatgatgggttcctcccgtgggcgctcgacgtggccaagcagtgttgtaagcttggagtcgtcttcttcacgcagacttgcgcagtgaacaacatatattaccatttgcagcggggcttgcttcctcttccgctttcggggccgagcgtcgaggtcccggggttgccccctctcgagccgtcggagacgccatcgttcgtatataagctggggtcataccctgccttttgtgatatgttggtgaaccaattcacgaacgcggatggtgctgattttgttctgtttgacaccttctatgagctagagaaagaggtatacacggacattcgcctattgctggcaccatatgaagaactagtcttccttggtacaaattatattatagatatataacattagcaaaaatttatgttgataatatggtcagtaatgtaattttgtaaactacacactcattttttctggatttcatatgggagattgaatattcatttcaacgtgcaatatagtcattgttcactctctctctctctctcaatctcacttgtttttctctccaatgaaattaggtggttgactgg

SEQ ID NO: 9787 - DNA, 2794 bp, Eucalyptus grandis
  Intron number 1 from transcript Egrandis_v1_0.047778m (loc us Egrandis_v1_0.047778m.g) derived from phytozome v7.0 (c hr-ID scaffold_8; pos 25478523 to 25481316)
gtcctgagctcagttttcactccatccgtgaacaggtatgtgtgactctctctcaatctctctctctctctgagcaagtctatttcttctgtgtaccatcctataagacatgtaaatactttctagagctaactggcggttctggaaaggttcttgacaatgtctcataactgaaacgaaggcccctggaggcaagaacatatccagttcatgattcgtgactagtacttggttaataattttcagtgtcgatcagatagtttttaacgctgatttgctgcaaatttgtccgaaaaattataatatgaacctggtgtatgtacctcaaatccatatgaaacatcgagtccactgggcttcatgggaaatgttcttaagggcatccaggctacaagagacaggagtggattaaaacagtgcaaatagcgatattctcgagctactgaatctcgttagcgatttgccactacctacggagtattattttaatgaggaagatggtgcacgatccccaagatggtgctgtcaaaataaataaaatacaataaaggaatcgtcctacttgcatcatcaattaaaaattaaatataaagattataattattgattttagcttaatatgattacctttcaaaaaaaaaaaaactagattcaattgtgagcaattaacctacttccatctgatccgaggtgatccactttctccatatcctaataataatttaattaatgagcttacaattgggcaatcattattggtcccttcaacgtggggttcctacgaatcctaaagtaatagtatgatcagttatgacatgcattaaacacgtacttagctgtcatttcgaagggcccttagtcttattgatcttttgaatatgatttacctatttaaatgtaaatatccataattctgtcatttttatttgtcgattttaaaagaagtctttgagtaaatgtacgtgatgtctaaagatcaagaccgagggattacaaacttaggaagggtttttttagacagcattactcagaaaagacaaatagaatgaactatttcatcaaagggcaagtatatagtttcgtgggagaggccaaggaaaaaaactaattgatggatttacctatgtaggaaataagcagccagttcaaatttggaattactaagcaatcaacgtatggtttagccataaatatagtccaccaaatttggggagagaccagcaactaactaaatattggatgttgtatttttttttctttgggggggggggattgaaaacatcctctatagaaggttctaccaaaatcagaggcctaagacctcctcagcctttatttctaccttccaccgggagaaaaattgcacgtagtgctaagaaaaaagtacgtacgtacgtttgatgcactgagttcagccgaacgtccattcgatttcaagaattatgcaacttttcaaattaatttcagaatagaaatcctctaaagttttttttttttgacggaaaacacactaatatattgattataaaggaagattacatcctgcagccaaagcgtccgcatacagtaaatccaacagttcaagtggaagaaagagggtaaaattttggcccgggtgagctaactgggctttggcagcccagtcagccaataggttagctgatcgacgacagtgctgcattttgaggaatgatgattagagtgttgggtattctttctttaactttcctcataagatgacaataagcttatggattcttcaatggctgcaatggattctccttatcttattctattttcctccctttcccattttcgttatcagtaaaaaaaaaggcctatgcaatgtaggcgttactcgacgtgcctctagaatacatagacagttcttttctattttcgacattgattgattgcgaacgcttttgcaagagattaaaggacgactcttttgatgagcattaccctttgcaaatccatgtagcgtgctcgcgcattgaaatttagcatgggctcggcatacgcatttgatgatggccccgcgcgacctcccaccgccctgtttttgggacatgatctactctcttccaagttgtatcaactatccccacctgaggttggtgcccagacctcctttttctttctgagtttctctacagtctacagaagtcactgaattgcaccgtcacttagcaaatttataggcgacataaaatatgtctgtacgaagatcatgcctagattgtggttcgctgtgggtcgaggtcaggaatcggacatgaatagaagtggcaaaatgggttgtttgtgtactttctaactcgaatgcgttgggccgatttgtatgctgatagaagaatttatattaaatagggtaaaatgggcctagaatggacccggttttgaaccacttttaacaatgcaaaaagaacggcgtgattatacaaaagtccaccccaaacagagtgcaatgtgtcgaatataagtaatcaaatagggcaggcactgattactgtacgcagtttttaacaaattcaatttaagaggctacaaatgctagatttacttaagcatatgatggtcttaatttaattagtatataatgggattgcttggatcgccacatttgattgtcttgaacataaatgtgcacttcttaaatgagctatatcagtgaccgcggcaaaagtgatgaatgataccatttctgatcacaatcaaattctatattttgattcgctcacgataagtaaaattgcgagtgtcgtaggatttgactttggcgtcctaccta

SEQ ID NO: 9788 - DNA, 2588 bp, Eucalyptus grandis
  Intron number 3 from transcript Egrandis_v1_0.003007m (loc us Egrandis_v1_0.003007m.g) derived from phytozome v7.0 (c hr-ID scaffold_9; pos 35776157 to 35778744)
tgttggctcgacagactggtctctccagaaaccaggttcgtcctcccacacacgcacttcattttctttctccccgacgcacttcggatggagaagtgacgacatcgaatttttcatggcgtctgatgcaagtaacatttcatgtgtctttggatcccacgacccgcgtcgagcaggatcgctttcttaatctcgtattacatgcatccaacgctttaaaatctttcattacgacgtaaggaacgaaatacccgattcaaaactaactacatcaccatgcattccactacactcggacataagtcgaggttatttgaggaacacgaatctgtatgctgcaataatcaccattaatacctggaaaagtcttgcacacctctcagtcttcacaaaataaaatttaaaccggtgtttttatatggacattgcttttgccggtcaatggaacatagttgaacttgcataaaatttgggtattatcagtgtgatacgtttctgttttccgttgaaaaaccaaaaaggtagagttatatcattttttttttcatgtggttgagcttttcgttctccttggattctatagttttttacctacgccgggacataaattcttgaccacttgaaagaactcgacataatgagagcgcaggcaagtacacaacagctagagatgacaacctgagactgtgcagctttgggtttcatacagacattttccctctctctctccctctctctctctctcacacacacacacacacacacacacacacaccgtgtgacattatcctcatccacacacgcacgaccaacactcttgaaaacataaaaaagaaatatcaaagacagtaaaacaaaattagagctgcccatgacgaggtcacagtaatatatctgtacgaatgcatgcatgcattcgatataccatgtgctctcctaaaatgatgttttttcaagttagtgagtgaatgctgattcactttaactgattccacaagcaaataaacatgatataaagagcaacgttaaatacattgagactaatttacaaagataggttgctaaatgatgtgactatttttaatgagaattatgccaacaacgtgtaagataattttgcaaactaaaataatattgtttgcacaataaacatagaaacagctgttacgtcattattgctcttcgtgtggtggaacatccaatctaagttagagggtctgttgctatcccatgcatatcttagaagctattctacctaaagtctattagaattttagggttttctaccttcaattttgagctttccaaaataaggcgtaattgcgaaaaattcacgaattttagggtttttttttccttaatttgtgtcttgaacactatgttataatgttaaaaaagtaatataataacaaaattaatgaatgagcagaaagaaaatacggatcacaaatagagaaagacaatggcagcaaagttatttttaagatgaggaagtaaactcttggaggaatatataatttcattagataaatatattcgaatcgcaatagtacagatagtgatggtatatgccaataatgaactatagataatgcaaaattagtgctacagttatggtgtcattatcatcgtttttataatgttgcggctacattggtgctacttaggagtttggtgtttcgcaccaaggtgggatgtacgaaatttccccttcttgtactaagtaccacctctaatctcgtgagcatgacttcagcctagggaaggaaaataattcaacagactaataactacaaacataccacctccttgctatacacatgtgacactgaccaataaattatgtgatataaagaaatcgtagtctaactagctctaattaatacgagtcatcacgatctactagagttgacctctatatggcataattatcatcgtcattaacgtcttgttattaagagttttcacagtactttttaagcataactacaaaattttcttttcaaggaaagaaaattgtgttttgaaggtagtaggtatgggtacgggtacagtgtctgaattcagcacatcataagcaaatcaaacatacgaaaatcacttttctttccaatttctacagcccatttattgtcgcttagcaagtaccctctaagcatttgttgacaatcatttttattggttttgctaacgtcaatcatctactcttgattttcatggcaccgacttttctctggcgtgtatgactataattttgaaaattgagtctcttttcttttgtatactcaactgagcggtccttcttatctcctcgacattacctttttcattctaacaagtgccttcagagtaattgtaaaaaatactaagtaagaaatcattcagttttcagtactttgataacatattgcacgagaacaataattttccttaaatttggttacttaagttaaatcaaacctttttttttctattaactatatcttccttgacgccgtcgactttgtgaagttaacgaacgtactaacgtgtttggggttgtgaattttgcaaaatggaaatctggcaggtctcgaattggttcataa

SEQ ID NO: 9789 - DNA, 1176 bp, Eucalyptus grandis
  Intron number 1 from transcript Egrandis_v1_0.008546m (loc us Egrandis_v1_0.008546m.g) derived from phytozome v7.0 (c hr-ID scaffold_11; pos 12884108 to 12885283 reverse strand )
ccgattccgccctcaacgtcgccaatcccggcaaggtttgcttcttgcttcccccaatcggcctcgcctctttctgctgttcgtcctttttcggttctgctgcaaatttcggcgttgggggtttttgcgaggggttgattcgagctcgagctgtggatgagttggttagggtttcgagttcggcgattctttcgttgaggatcggctgtttgattgtggatggtccgaactagggcttttccgcttgccatcgcgagagtttttctcttcttgctagatgacttcctcttcgttttcgtgtgggtggagttattgaatctagttgtagtagttatctgtagctcgcgaaggttttgtttacgatctcgatgtggtttctgcggtcggaaatgttatcgtgcgtaacaagatattgtgctcttgaatgtgaacggcgacgcactttgattgacttcaatgtcttaaaaataatgtcttttgtttgcaacaattcatatgctggtaataatagaattaggtgtggctaaatgttgatgagaaagttcttgagcttctgccgaactggtgccgggaaaaaagtggcgatgtgttgaatcaataccacttgaggtggctttccctgattaaattcagtttcagtattgctttggtagttatgtctggtctttgctttgagtctggtatttttatagttgaagatttcaatgttaagaattggtactggtcgttgaatgcctatcttgttccttcttaccttttggagagtgtgccgttgagcccttggcttcatgatatttgcatctggttctatatacaattattgtacttgatgggtttcgaggattagtgcaaagagagagtggtaggcctaaggctacagaaagctcattagaattgtattaaacatgcaagagttggcgaaattttcaatggcatcatagaatgaatctggctatgttttatgctaaattttgcagttctagaggatcttgctgaaaatgctgaattacctgtgcttcagtataatcaatatgactctgtggttattatgacctccgaaaaatcagctatgatcttgtattgtgggtgttggcttgagcttgctgggtaatggtaaaatctaacccaatgaagtgctctgaacaggacttccacaaaagtagacttgtccggcca

SEQ ID NO: 9790 - DNA, 673 bp, Eucalyptus grandis
  Intron number 1 from transcript Egrandis_v1_0.049729m (loc us Egrandis_v1_0.049729m.g) derived from phytozome v7.0 (c hr-ID scaffold_6; pos 18297215 to 18297887 reverse strand)
cttgcccttcttgcatcaatcctcccaaacctgtatgcacatcttcatgctatcactctttgtggcactaatctattcatattcattaatactagcttggtttcgtccgttgatcgatgctgtttctgatgaagtttcagaacatttgaatttatagtcctttctattggaaattaatgcttccccgttttgagttttggcaacaaaagatgtttttttttggtaaccaaagatgttaatacatctcaagtcctttaaatatgcttattttgatatgcaagtgataacttattctacaaaagcaaacatcaaataaaacttgcatgcgaccatgtcgtttgacatatatttgcacaacacaacatgaacttctggggataattacaaaaaaagttctaaacatgttgtaaatatgccaatttaattttatatttttcaattttgtcaatataatcttaaatattttgacaatttgccaacacagtcattttggttgattttagcaaaaaattgttgatgtgaacattggtatcctaaatttttgcaatttttaataatttttataaaatttattttttttccgtggcaattcccatgccagccttaggcaagggtgtctggtccttacacaaacgaagaccgaaacaggggcgtcccgagcggcgactatcag

SEQ ID NO: 9791 - DNA, 1918 bp, Eucalyptus grandis
  Intron number 4 from transcript Egrandis_v1_0.021849m (loc us Egrandis_v1_0.021849m.g) derived from phytozome v7.0 (c hr-ID scaffold_10; pos 22096469 to 22098386 reverse strand )
ttcgggtgctggatttcaggaaagtaaaaagcaaggtttgttgaccatttgcaatttgtattctttcctggcatgccttttttcttcatgtttggaagtgcataatagttatagactgaatgctacctgccagagcgaaaaagcattctctgatgatgcttctatcctcagtcattcttttcttacatagatttagcatcgcagagccttagaagctgcttggatggactttggggtgactttaaaccatccgttagtcctcatttcatgcttcctggcaaattaaaattatttttcaaattatattccaaactaacatgacgaaattataccttattattggtttgttttcttggtagttaatagggtacagttactatggaatctttcaatggacttcactaagtggtctgttaatctgtgattaaggttaaaatgtacatgttgaaatcttgtatgcaggcagtcattctagttggtcaattactgcaaaacaaaaggggaagaactcctctgataaagaaaagaaaaaagcagggtagatcaaatatcttaaatgcgtgatcactactggcaagatgccaaagaagccctaaagaggccaaagctccatgttcatggcataatcattgataaattgattcggcatcctcttttacacacagcatcaatacaaaacaatccttaggttgttgcacgggaaccattgtggtgaatatatactttcttcgatatcattttctgtctatacagagcagggagaaattttatctgtgttttcgtgggttttgttattcagtgtttcaacagcacatccattaaacaagtttttctacctctccatgtttacctgtccttttcctgtttgaatgcctctgctcaatttttttgaccaaaacattctgctcaattaaattgcggttcaatagccgaaagtaatgattctatttgttttagaaagaatctaaaacacaatttgtttctgtatttctagttttggaaagaatctaaaatacagattgttaataatgttctgcattataggggaatatcagaagaaaaatatctattttcatctaattgctgtttgacttatcttgcgtcctctttcactcacaaaatcagtgcaaaatggtcctcctgccctccttggctaactgtcagtgcctttttgaggtcattgactggaaagtattgtgctgaacttttgtttactttgatatcattttgagtctatacatagcagagagaaatttttagcttttctttggttgctattgttcattgttcccacacaacatttgtaaaatacaccttgtcttcttctgggtttatctatcgttttccagagtttgaataactctttgctccaaagtaatggttttatagtctacatttagatattaaattattctttttttctttttttttaaagttgtgtcggaagtcttagagcctgtttggattgatttttaccttttgttttgtgcttaatctaaatcttgtacctcatgcactttgactttttctaaatccgaaacttctgaaattttcaagacaaccaaatattgatgtgaagattcacatataacttttttataattttctggagtttgaatgatattttagttatgtgagagcaaaagagtacatttcacttttgctcaagtgtaaacaagcagatccttaattattgcatttgtagtttcaaatagaatttcaactgcattgatctgtccttttccagggtttgaataattttttgctccaaataactggtttcgtattctacttctactcattcttgtagttgagtctaattattttatatctagtttcaaagagaaaatagtagatttattattaattttcctggatgataggagagattagaagcagaacagctattttcatctaa

SEQ ID NO: 9792 - DNA, 1994 bp, Eucalyptus grandis
  Intron number 4 from transcript Egrandis_v1_0.018884m (loc us Egrandis_v1_0.018884m.g) derived from phytozome v7.0 (c hr-ID scaffold_2; pos 47737279 to 47739272 reverse strand)
ctccgagcaacatcgtgcagaaaagctcatacttggtatgcagcttcttgtctattctatttctctctagtttacttttgctctccagaagcctacatatagagattacttgtgttgtgccagcttttacatggataactgttttctggttcttgttttttttggtatataatgtatgtcttatcaaaaataagctttgttctgtctcctatgtttcctgtacaatcgatgaatgaatgccgtgtctccttctctttattagtgcagtgctttgatctacttatcagtataagtatcatatttcaatagacagttcaattaatcttggatcttagtacacacacgtgaagctatgaagtgtatcttgatgatcttacctttaaactttcaatatttggatccgcttccccatgctttgataacctaaaaagtgtagattggacaaccaatgagagcattgtatcttttggaagttgaaggcattctttttcagtcgagtcctcctcacatgcttttgttcctggaaaagcaagataaatgcaggaatctacttgtttagtgggtgattcgtctaccacccgcttaagctttctcctgactttggccccctaactcctaattacagaaagacactattctcctaactattgtgacgtgttccattttattctatgtcaattaattggcacatggaaattaatgttagcaacattctgatatggagatctttcatactttcatgtgctgtattacatatagcggtattttgcttgtaggagtatgctttaagcctttgactaaaaagatcccctgtttactgttttatttggttcattaggtatgcattaagctcaatattactattatcatccccaagcacttaatatctatatgttgttccaatacagacagaagcctacccaggctgccccactatttagacgaggaacatctcatgtttcagtgaccataacctggttatcgtgtaaagtgaagttgattggccagaacttatatgagcttaatgtcttctcaattgagaccaatcattatttttctgtctgatgtagtattgttgaccattgatagctaaatgtaataggccaggcgcttatagttgagttggatagtgctgtcacacaaacagcacatagaatccatggaacaggagaagtaggattgaattgtcactgtacaaacatcatcctgagtgtttgggttatgtagtgagagaaaacaaaggggttttgatttcaaattgttgatctcttttttttttttagctaatttttgtagttttaatcctccacggccttcataacttttttgagatttttttaaagcattggggtgtcttttttttccccaccattttacatgcaaattttatgaatggatgtttcatttttaacctctttacatgcaagtgggtgatcaccacaatcttctgccagtgtatgaaacagatgcacgctttgtattatcaacatgattttagagcttgtcaactgcttccaaacatgattggattggctgtcggtagtggtaacttgcattaacggatttttctgcagattacctttttgcttttgctacatgaatctagcctatgttaatatattgatatcaagactgagtatgaatcattaattaccttgtctcttgctgtttttatgaagttatgccttgattgatctctactccgtttaaattggttacatagaatacctttgagactgttgcttcgttgaacatcttacagtcatagttcttaaccatggcctaggatatctttcattccaactttcctagttttctctctctaatcacgtaagcgatgatgtccattcttaatgatgacctttagatgtcttcaatgcatgacttttttcactgaggtttagaatatagcttttattttttaactgcaaattgacagaattactggtctcttatgaccctgacattgttttggcttattattttctagggtg

SEQ ID NO: 9793 - DNA, 747 bp, Eucalyptus grandis
  Intron number 7 from transcript Egrandis_v1_0.025430m (loc us Egrandis_v1_0.025430m.g) derived from phytozome v7.0 (c hr-ID scaffold_5; pos 46788100 to 46788846)
acctacacaacaacaatcaagttctgcgagcgaaggtttatctctctctctctttctctctctgagtgtgtgtaccccatatgcatgtgacaccgatagattctgcttgatcacaactaaacatcaccctattgaaaactacaatgaccatttaaggaggcaaaatattagtctaattcaagtcaagctactggtaataaaacattaacaatcaaaggacttattactggctggtttgatcaaagaaggcgatgaatgattgcattcatgcagattaaaatttataaagggtagattctatcctagtgttcttatggaaacggaatgcaagaattcttggggctcattagtcatcctaccatttaatcatactagttctggtttagcttgaagttcttattctactctgtgttctcctttcaacctatcatatgcaaatttgcatttcctctgagtcttttatttatttattcatttattgaagcaacaaaacttagactgcaagtgaaacataggagcaggtcaatagataaaatattataacccaaaaaaatttccaaaaggtatgtaccagtttttttctattacttcctgatatgtcgacatctttttactagattgaagttcaattagcattgtcaaacgccaccttttgctgattggacgtttaccagatgtacatgcacatgtatagtatgattaacaggtgaataactatgtagatcgcggagagcgagaggacccaac

SEQ ID NO: 9794 - DNA, 1869 bp, Eucalyptus grandis
  Intron number 1 from transcript Egrandis_v1_0.002366m (loc us Egrandis_v1_0.002366m.g) derived from phytozome v7.0 (c hr-ID scaffold_2; pos 61663200 to 61665068 reverse strand)
cctttgaccgcccgaggaccggtgtttcgaacacggtacgagtctccggcgttccggaaatggttttgagttgctttgagttcccttgttttgggcgttcgcgtaggaggagttggttttttttgttttttcgctttttggctcggcttcagtctgggggacgaggaagtctttggcggaaaactaggacttcttgttagagctccattgcttttggcgcggattgttctcacgggcagttcagttcatctgtcctttgcggtgtttgatttcgctcataccattagctcgcaaacaactatgggccggttacggggatgggtatgtttgacgatttgattgagcttggaaaggtggaagcattctgaccagagcgttctgatgcaatttctgcttgcttaggaattttttgctctttcatttttttttccattttttgtagctgaaagatttgcgcctggggtgcgactttcgacgaattttcgcgagactgatatttctcactgactgatgctcgttttccaatagtgaggtggtgcgattgctcggtgcctagaatttgtgctttgctttgcagatttagtcacccagataatgcatttatctataaaatatgtttgtggttgcaaaaattgtacttactaggctacagaagtgggattttggcatggtagtttagattttaacatctaaatcacaaggatatccacaggtctgctgaagtctatccaaaaaataataggtgcttgatatgtatgtgcatgttggcttcagaacaatcttcaaggatgcagtggtgtttagacatctcatttagctctagttgttcagaaactaaatttagtcttttcttcctctttttatgtgaataatggcagctacaaagtttatattcctaataaagaatgctggttgcagagccatagtatttacaatgaatgcttttgaacataaatttctttttccaatctgctctgaactttgtttaataggatggacaagttactctggtgaagtttttcctcttccaattctcaagattttatctatcagtacctaaaatacaagtgagactggtgatctttcactaggattacttctttgaatagaaaactgcattcctcttttctctatttcttaaaccccgacgagactaagttctcaaagatcataatccgtaaaatatcccatcactgctgcttatccgcaagtaacgctgtgggtttatcctttaaattccttttccaaattccagtaaaattctccttgttgctgaaaggatctgatgcttttgttcacaatttcaaaaggctattcaagtgaatgcctacgtatgacaataactttgcagggtcctgaactattctggcaatgcatgttaaagcacgttctacgatgtcctggttgtaagataaagttactgttcattttcttgcctataggagccggcatggacctcttgaactgaaatatgatactcatctatggacaaggctcttctttcatgttttaggttgtgtaaattatagaattcagtcaccagttttcctctatgttataaaatatgacagcttttgagtagtattgtcaatcacaagtcagattcttagtgctgccaaattctttcaaaattttctcagcgcactcttatttctgaaaggattatcaatagctcgtgtttagttggagtgtaaggctatatacggttgcccctttggtaatagtttgtcttggtcttttcatttatgtatggaatttaatattctgaatggttgttgctagtgattgtttaggggtttcaattctcagctctaatacattaaagctttggcaggtgttcaaaagtggccctctttttatatcttccaa

SEQ ID NO: 9795 - DNA, 7904 bp, Eucalyptus grandis
  Intron number 15 from transcript Egrandis_v1_0.002124m (lo cus Egrandis_v1_0.002128m.g) derived from phytozome v7.0 ( chr-ID scaffold_3; pos 53815243 to 53823146)
gcattaataacggcagctgttcgagggtattcagggtacaaattaatatgaattgtcatgctaatcttgttgctccttgtggttttaatgagatggtgcatcaagtgcatctcgattctctaaaaatgtataacttatgttgctcgtgaatcagggtggcacagcccagttgagattccagccacgtcttggaaggtatcttgctgctgcggcagataatgtcttatcgatattggatgtagagacacaagcgtgcaggcaaactttgcaggttgaatttttagtaacttcctcctttttattcggtctagttaagtggggattgttaaaaggggatattgttgctgagtgaatgattgtcttacctctagtaggtatgattgaatgatgttgtctgcaactacctttccagattctatgccattgaattgtatgcttgctactgatggctttagttcatgctctgttatcgtgttgttattttgaaatgactatgttttatttctctggttagtagaacaaaagctattatttcatctctctgccaaaatcttactgtggtgatgggagttgttttgttttttatgctagggtgtattggtgaacctattggcttgctggatataccttagtcaccttgcctaaataaagtagcattttcccaggtctaggtttaaggttcaatctagttgacagataacagtaggaaaaaagtttgtcatctaagcttgtcatctttttatctgctgtatctaagcatatgatgttcatgtatgtgtcaccatttacagatgctattttaatgacacaattagtttcaaggtgtatctcatctttcagagcattttatggtttgcatctatcttattgaaattgttactcattcaattgcacggccttttagttcaagttggcctttcttttctttgagattgtcacaattagtatttttattctctttgtttcctgcttctagtaacatgttgatcgttcccacatgaatctgaattttgataacaggggcatactaaggcaatcgattctgtgtgttgggattctactggcgatttagttgcgtctgtcagtgaggactctgttagagtttgggcagttgggtctggtagtgaatgggactgtgtacatgaattgagctgcaatggaaacaaggcccactcctgcgtgttccacccaacttatccttcacttttggtgattggctgctaccaggtaaggcgcacgtttgaattatttattttagcatttcatgtgaattctagctctgtacataggagaagtgagatataagtccatgtttagatgttcccaaattttgttaatttttaggattacataagaaattttgagcgagcttcttggggatgctaatcaggctcatgagtttctaaaatattaagtattgcctagtataaatcaggcgactttctcactatcctctgaagtagtgaaggtcgggtaattggcaacttcggaatcataacttctgaagcaggctgtataagagccatggaacagcaaaagctatgtgccttaaagtacgagtcatgttaataggctctttggacttctattgccccataagatcttggtttaattgtgctttggtctaagctaatcgaaaattctctgcagaccctggagctctggaatatggccgagaacaagacaatggctttgccagctcatgacggactaatttcagcattggcagtatcaaatgtgacgggcctggttgcttcagctagtcacgacaagacagtgaagctgtggaagtgatactttggcatctccaggtatttttcctaagcactcagattggaagactgaattcgctgttcccatcaaagtgcatgtatcttgtccttgtatcagttgcctcagtacgcccaggtggtgtcgtctcactgatactaatttagagcttatgatgagcgatgggatttaactttgtgacatttgttgctgttgtacatcaggtgatgacttcttttgtcaagttgaagctttctgcgaatgcttcagtgacatgtaatgtttggcctttccttagagaaggaaatgttctcagataggactctacatcgataattgccgtcttctctcgtttggtacttatgccatgtctcttgaacttcgatgtcatttagttttctggtcggattgaaattctaattgtcggtttcattctcatcaacttaaagggcgaaaagaaacagatttcgaggaacccccccactttttagctgttaagagcttgagatggaatgaaatatgttctggttagatccctaggaaacaagtggatccatcaactctaagaatggctgaaggtaaaggaaaaaggctgcgaggactgctaaaaaagtatccccctgctgtagcctttacttgggtattatttaccttttttgtatggattaatgccagcacacggatgatacggaatctgagcctaagatatagtacctcccttggtgattccatccactgggtgattattaaatggaggctttcatactagagttattgccttggaagtaaagcaagatttaccgtgcgaaaaatatagtggacatgtggagtggcaaaatctcttttctcgtaataactgtgtatatgttgcaatcaaggggttccactaaatcactgtagtaaacatgttttgcacgatgcgataaatgcactgtcggcatgattcgtattcgaatgtacgcggtggtgctatatattgtattgctggtgagtgaaaaagccagaagcagctgtaaatgtaacttgttttgagcgggattgaggggaatttgcaagtatgcgtggctcatctgaaatgctggtctcacggtgatatcaaattctccgctggttctatgctcttcatggggccagaacgcaccaattgcctgcgctcacatcggctttcgtcatatcatttacggcaaggcagatcctttgccgcattaggggcctcatgttgcaagttccgttctccctcctgcccggcgaagtgcataataccatcgtcggtctcctctacccgacgcgccgaccggaggttctcggatctttgcttatcgtgcctacccagcaggttatgcatgcgatgggctaaaggcagagtcccatcaaacatgatcagcctcgtctgacgattattgactgtagaaattcctacatctgaggagagttctagtccgatgatgtcgagttgatctgctgtgttcctctatcgtgacagaacatgcgtttgcgttgggcaacaaagggtttttcttttaaacaaaattcaatcgagagaacacgggatacaaaagccatgaacttttatctatctcaaaagttagaaacaaatatgtatatctatagataaattgatatcgttcttagatatgattataataactagatacaattcaaaatgaggttctatttttagtgccatacttattgttgattcagaaaatgaattgaaatgaaaagatatttcaaaattcgggaatcaaagttagaagtcctgagttcgaatgttttaaggtcacattcgtctcttcaattaaattttcatgcttagtaccaaacagaagactgatcaaactaagcgtgaaggtagtgttaggatatttaaataataagtcgtatattcatctaatagtttaagcttttacaatagttgacagtgcaccacaaaatcccacacttctctttagatagttttgttcggtctcgagatatagtaaaggtgaaaaactcacatttctcctctttttaagtataataacacttcaaaggagaagagaagtatgagggtttacagattcactataaactgttttaaaagtttaagcgattagatgagagcataacttattaattaaatattttaacactccttctcatgtttaatctgatcggttttctatttagtactaagtgtaaaaatttaattgaagagacaaatatagggtaagttaccaatgagatctgcctttggctaatctaacgaaaaggtatttaaaggggtagttaaaaagctgtaaggctagcttcccctttcccaatgggaaagaagccctttgtttctttcttatccaaaagcagagggccaagacaggagcaagaacccttggatccatcgagaaacaccgtgccatcccctgaatttggaggcgcaattattacatcttcatgcatcacccacttattccaaagattaatccttaaaagaaagagattgatttctatttaaaaaaattttaaaaaatgacttacgaaaaggaatgagtgaatgaataatttttttttcattatccatgaaaatatttacgcataatttgcttcggcggctgcgaaatctttggtaatttttatttgatcggaaaatttgtgataattcagacacaaaataaaggggcgagactatcagccgtggtggctctactgggtaggctcctacctttgaagggaaacgtcaagtgttcgaaactcttgcaattgcaaggaggttggtagatcattaggtgtattacgcgtggcgccctggtggtggattctgagctagcgtcacttggggtttacgtggcggctgtcaggcaaaaggttcgctctagtggtgggtcatgagctagcgtcacttgggtttacgtggcggctgtcagccaaaattcctccggccaaaaaaaaaaaaaaaaaacaaaggggcaagattttttttaagaaaagacgcacgaggcaattcaattcctgctcctgtgtgcctcgacctttctttgtacggggtttctctctccggaacattcgtggcacgcgtttcttggttcgttcctttttctcccagtttggacgctcacttccggagagatcgttcgtcattttacaccgtggagtgcccatttttttttccttgaattttcggttggaagtcttccatcgccttcgagtaaattggtcagtcaggtttagactttgtttttggctgatgataatctcttagcatgaattcagttatattgttcagtaatgatctggatcttcaactacaggcagatactgttggtcgctccatggatgttagcaaaggtgcctgagaactctacattaatggggaattttggtgacatgcccatctttaatcgttgttcttgaactagaattatgtggcgtgtgctattctatatgctttagattttctagggaaacgttgtcatataaattgcaacatatatatttgttcactttgttgttttctgctccaaatttagatctattgtgtgtatagcagggaaagaaatctgttagtctcatatatcttgtagacttcgataatctattgattcacatagatggtattgggattttcctttgtccttcagtctgaacgactattgccaattcatgcgctctggtgcgtcttgagcctttttttttttcctttctgaggatctgtaagatttcgtccaccatgagctcagagtttgattggtcgaaacagaagggaaccatacagaaaaaactactgaaagagtttcagaaggactaacctttgagcgacaacggagaaacgtaagtggtatgagcagaaaaaggaccaaaactcaataaactaagttacaacgaaggacaagactttcacgacaagcctttgaataatgcacagacaagataattttgtcatttctcgctatcactcctatctattaagaaggaaatgaacccaatgacaccagttaacaaaggatgataactagcctgcctttggaatcaagtgtaactttccttgaggtaaattttatcaaccgtaaaatcctgatgaatatttttagttagttaatggaagaactttgcctttagatgtccttcttcgttattaatttagactaccattctcaggtctttctaattgaggtttgatgcagaatcatttccctagtaggctgaatgatgaagtgtctttcacagtttcactcatagtgttcaaattgggtgctacagaattctcatttactgaagtgaatactattcgagcaagcgccagcaaggttacctgttgccacttctcatcagatgggaaagtacttgctactggtggacatgataagaaagtaagtacaggcagttatgtggacatgataatatgttgtcttatgccatagtctgataatgggatggttaaatttctggattatgcaggctgtactgtggtatgcagatactttaaagccgaaaacaactctggaggaacattctttaatgatcacggatgttcgatttagtccgaccatgtctcgcctggcaacatcttctttcgacaaaactgtcagagtctgggaggctgacaatgttggtgaacataatatctcatcgacactcacgttttttagatttttgaattcttttcgtattcaaagcttcttgcaacagccttctgatatactgaactacacgaggtgccagcccgactttaagtactgatgaaatttcaaaactttctgccactatgatacaagtgcttttgatgcaagtttgtttttcccggagcgaacaatctaatggaagttattgttttacataccccagaaagttacgtagaacatgacctacacttgtagctctaagcaagcagatgtaccggcatgagttaattgacaggactctgaatttatagttaagtgcatgatggtgaagggtgaagaagttggtaatctttcccttagagctgaccacagaaggttttggtcctttagaggaatggagcaggactttcaattaaagctggtcacccgttattactcagatacttagatattcctgtctttggcttgttgccacttgcaacatcaataaaaaatggctttgtggtcgattttagctttgtagccctaataggagttgccattgtttcaaaatctgaacattgaaagtttgggaacatatactatattgagtcgatattatgaatttatggcctaactgtccatgtgaatggttttgcaatctgactcttgttcaaaacctagagagttgcttcagtatgtaagttctctgaatttccacacttgcttacatgagatgatcgtctcctcttattacccttgaagctggaattctagaggctgctgatattgataaattctgccatgggtactctcccgtgataataatcaagtgaagatttggctacttccttcatagatcattttgaaagcattctcttcggagctcaatgaattgctgtttttggactgcagacttctgcggcatttattgtgtggcttttttatgaaatggtgtctgtgactatgaggattgtatttatccttcttggctcttatgcattattttggcagctcaatgtcgaggctccttcattttaccctgataatgatcatgttttaagagtttcctgtttcggtagttgttggtcaatgtggagggcaaattcgcatgtgaccttcctaagatttatttgactgtctctgttttgttcgcttgtgatagtacgcatttagcttcacttttattggctttatgtctaatgtccatgtgcatatggtatcatcaatggattatttgttcatttcaggctggttattctcttcggacttttatggggcattcttctgttgttgcgtctctggacttccacccaaataaagatgattttatctgctcatgcggtggggatggtgagataagatactggagcattaataacggcagctgtttgagggtattcagggtaaaaattaatatgaattgtcatgctaatcttgttgctccttgtggttttaatgagatggtgcatcaagtgcatctcggttctctaaaaatgtataacttatgttgctcgtgaatcagggtggcacagcccagttgagattccagccacgtct

SEQ ID NO: 9796 - DNA, 1706 bp, Eucalyptus grandis
  Intron number 12 from transcript Egrandis_v1_0.003818m (lo cus Egrandis_v1_0.003818m.g) derived from phytozome v7.0 ( chr-ID scaffold_1; pos 22609089 to 22610794 reverse strand )
attgtagcttctcctctcggtttgattacagtaagcaaatatttcttatgcttaaggattattaagttgttgggaagaattacattttcctttttcatcactccacactctttttgatcgacaatgaagtcacacaccagcaagcatattaaataagaaggcagattttactttatgatcttaaagtgatggagctggctatgagctgaagcttttgttgtgattttagtctccaatgaaaatcatctgttcttcgtcctccatcagaggacataattgctggtggacctttatagtgactctctaaacttcgtttttttagttggtgatcatttggagaatcagagcagtcaagattcacctttgctttctctatcacttggaagaattccactacaaccacaattcttatcattaaagtgtttgatgaactcaacaccctaaagcatcttcccttccatgagagtcaagcaagactcgatacttggttccttattgcatggaattctaaagaagctctgaaattgagcttttagagggttagtgtgagaaccataataagccactcgaaaattatgttgcttttcgttggcaaaaataaacaaataatctcttttgctttccaatttatgtaagtttcttttattcaatttatccggcatctactgttacctttgcaattttgacttctcttgtccacttaaaacaagtttctttgcgatgataacctgagatatcatttgatcaattggaaagtcgtagattagttggtcagtaatgggcattaaatcattggtattcttcaataaagctttgcttgcaaaatggcagtggagtttggatatggtgaaagcgtgtgaggagggtgatgattgccatatttgatccatggtgaagggtgtatatctatgcgaatgggggagtgcatgtgttagaattatggaagcacataaggcaaagatgaatgacttatggaagtgcatgtggtagggtttatggaagcaccactcttaacagggtagggtcatgtggagatactctttgcaattatttcagtgctggaaattcccttctcgttccccttattcaagaaaatctgggaaggctgctcctttttgtcatatgtggtgtgtctgcagtgaatgcaacaaaaagatcttttgaaggatcattagattgttgtttttgtagctttaaaacatttatgggattgctctgattttccttattttttggggtactatttattctttctttttgatccgttcatgtatattcagaatctacatgcacagtttcttttggctagctcttatcatcactagaaaagaagttattgcaattttagaacagctcagattggaagaggattgttcaattaggatatattgtctacagagatacacatctaagagcccgtgctttcatgagaccttttacattattgttgtcgagaatttcacttgataaagtacaacacgttgaggggaacagctgattggccgggcaaggttggcagctgtagagaaagtctattttttaaaaatatcatttgttctttagattgaaagttcatttcttatggaatttttaatgtcaatggttgagctaataataaagtttcttgcttttaataaaccatgcgattgacattggaactgtgaatgacagaaaattggggaggctgagagagagaaggagaaaga

SEQ ID NO: 9797 - DNA, 2786 bp, Eucalyptus grandis
  Intron number 1 from transcript Egrandis_v1_0.007459m (loc us Egrandis_v1_0.007459m.g) derived from phytozome v7.0 (c hr-ID scaffold_8; pos 19728316 to 19731101)
caacatcgagtccctcgtcatatccgtctaccaaggtataccccccaattccccttctcgcgctcgaatttcccgctcgccttgtgatctgacgaagctttcttatatattatgcttctcgtttgatttggagattgatttcggaacgatcgattgccccgtttagtttgtctgccccgctcgacatgattcttgtggaaaaggtctctcctttttcgttttgtttgtttcctacttgtctgattagttatggaagtgtactgttatgctctgccgatcatggcgctgcatatgattttcatgcgcacctccgatacagttcatctcctcgatctggtttagtctctctcttttttagttaatttatttttgtttgtcctagtaaaggacgttgttttgggactagacaagcgcctcctccaagaagcctgctatgtcgtttgtcattttgtccccttctggactaattttgagaaatcgtccacatggtcagaatgcactgctggatagcgtcttttgtactgggattctgtcgtttctattccattgtagcccctgatatatcagaaaagctcgataatccagggggcgtaagcttaaccttattgctgatagttgctggacatgatctaaactaattgaggggtgatactctatcttttctccaggattctctgaaattaattcagcaaaaatacaagattagagtatctttgtttagaggagcattaggatatctgtttggagatagaggattgttaagaagtggtccacatgttcactgtcaattttaaatgcagtttttggattgaaactatcgcgcctcatttgtaaattttagggggcttaatggattaaatgctgcagttttacatgggtgcatgcattactcaacatctttgaactagggacgtatttttgggtgtgtttgtttcaccgaaaatattttaccgaaagtgttttccggattttcagccgtttggatctctaaaaccgatttggtcaacggaaatcgctttctggtcaacacaaatctcatgtattattttaggaaaacgaattcctccgcgtgaggagatgaaaacactttcccttttcaatttttctctgtcctttcacttttcctttccaaatttttctgaggtacgccgctctctcccttcgttctttccctctttcttcttcggctcttcttcaacgacacgcatctccttcgccattggaggtccagatcttcttcatcattgaaggtctggctcttcttcaacaacgctcaacacgattccaggttctttcgctttttcgacgtcgtagtggagggagaggtgcttggagacgaaggccagccggggctccgcgacctcgcccttccggtcgttgcggaaggagagcttgagcttggcgaggccgtcgaggagcttgcacgagaccttttggaggaagacggagctgtcgctgtcgtactcggaggtgacccggagggccggccgattcgggaacgagaagaggatccgcggctgctgctgcggcggcggcgactgtggcggctactccgggccggggggcggaggcggcggcgagtatggcgggaggaggaggctagggatcggaggaggggggcggcgaggaggtcgggtcggccatcggtgtcgtcgggctagagagagagagagagagagagagagagggagttcggtgtgggtacagcccatttttttaattttttatttgggttttttttttttggtaattttgagcggaaaatggatttgattttggatggttgtgcgcgagccgaggggttcaaatttgggggatcattttgctggaaaaggattgtttcttctaagattttctttttctttttagatgtatttcttttatttattttcccaaatttcttgcctcttatttaaagagaagcacaaccttttgaaacattcaaatctataataagaaaaggaaagaaatagattttagcttgctattgccgattatatggacaaatggtgacgttttcctcctttctctctttttctttattttcacttcatttacttcctacttaatatcatgaaaaaatacaaattaatataatattatataaaagatctcaaatcaatataattattataaattaaaattttaaattattttttttcacaaagaacctctaaactagtacatttataatgaatttatctttcattaatttttgtcaaattaattaatattacgcatgggaggtgcatccatctaaagagagccaaatgcattgaagcgattaatgatatcgttttgacttgctcttgtaaccggaaatcatgtccatttttaggaaaaaaaatacgtgtataaattcaagtttccttttcattttgtaggttcaaattctagatttactaaattgatcgagaaaaatccgtttataaagtaacatggactcaacaaattaatttggaaataagaggcacactattatcaattgttaaatcatttttcaaatgcgatccaaacaccagaaaatactttcagtcacgtatcaccaaacaaaggaaaactaatcattttcctggaaaatggtttcccggaaaacattttccaaaaacattacgttttccgtgaaacaaacacaccctttgtgtaggatttttctcgtttattccgttgaacgaaacttctatgtggctgttctactttgttatatttgtgtgatggattatttgacatctccatatttcaagtctttatttcctcaactaagttcaaggaactcactattgatt

SEQ ID NO: 9798 - DNA, 417 bp, Eucalyptus grandis
  Intron number 15 from transcript Egrandis_v1_0.000714m (lo cus Egrandis_v1_0.000714m.g) derived from phytozome v7.0 ( chr-ID scaffold_8; pos 12277739 to 12278155 reverse strand )
ttgaattttctcaggtactggttcttattaccaaacttgctttttcaattatttttgtctgtttttgtgtctttgctgagaccctttggattctgtaaatttatttaaaatatttggaatcggtagttgacaacattgaataaggagttttttggattatgagttataaagtcttttgctgtctttcctttttccttttttccacctaatggaaaagcttgcagaaattgcatcaaatttctcacttggagtctcttgataatgcctgaaaatgtgcattttgtaaggttgtctcatttaaaccatgctgtcaatgtagaaatgtatggatctccattttttattttggattttggaacctaacccttttctccccttttatttcctgacctaaggcattagtgaacctattcggtc

SEQ ID NO: 9799 - DNA, 8095 bp, Eucalyptus grandis
  Intron number 6 from transcript Egrandis_v1_0.019257m (loc us Egrandis_v1_0.017925m.g) derived from phytozome v7.0 (c hr-ID scaffold_7; pos 44173608 to 44181702)
gacgtgcatatcctattattactgggttcctggttagtgtctgttccagatgtacttttattacattgttaccttcttccaaatgatattaatatagagatggaaacataaaagtagagtaatggaaatatggacaatttttttgtcgatagaatcttctctcatgataaatagcagtagtctgcattaccacctaagaggcgtactacatctattgactagatgggctatttcgagtccaacactggcttcttattatgggacctaggtaatgtattccaagcaaacttgtactaaaggaagctattctattaatttcttaactttctcttgaaggtcatgatatatcgcattttcctgaacttcaggaattggagtttttctatttgtcaattttctgtgttccaatagttcactaacattgtattattgcgggctgcgtgtcaaatgttaaatatttgcattttgtctgtctacaatttgatttaaactcttgttcattgggtgttcgtcaggtagagacatccaatgggtctgtatctcccgcctgttttgatagaacttccagatgtcctgatgaagtggtccgtcgaattcgtataactgcttgcagtgatgaccagaattggaggggcaagttgctggagacctatcatactcaagatgataaattcataattgcaccttgctattggtaagaagatgctgtcaaatttatagtcagcatgcattgccaatgcacataacaagcagacattgtcctgcttttgcttttcaaattgttcaagtctctgtgacactttgtatatgttgctgacatgatgtaggtctgggcgtcagtttcacaatgctttgacatggcggcacctttctgactcccaattgcttctcacatgttcgacttcgccttatgctgaaggtccagattttgttgataatatacggaggttagttcaacataaagagttcgacttttgtcttagcgatagctgctggactttctcctcctttctgagttaatctttcttgcctaaatacgactgtaaccagacttagaagggtgttctactgattagctttcttctttagcttaagagccacttccactgtcagggaaaatattcgaattaaagattttttgctagttactttcacattagagggagataactccttgaaatccctgtggcttatattatggtgaattctcggtggcgcaaatgggtgattgtggtaggtgattgcttgccattgttctcattgtgcgcatataccattcttgcaattttcccagaattcaaagggtctgctcagtactcgcacattacttagttcttgcaaacaaactgattgcttatgtcattttatattgatcaggcggtttgattatataattaaacacccagattggaaggagacttttccaaagaggcaaccgcgtgtatttgagaggaatggtctaggaggttggagaagatgcggtgattgacatgaagttccctggacaatcgtgaatgaggctctagctatttagggaaccatttacttacctgaagttccccttggagtacggacttgcaaatgtttaccccagaaactttcacctgggcatagctctcttccgattgtgtccacctctcagcaaacagcgtgatactgggttgggccatggggatgatgtttacattgaaaatgtcctagtcgccagcactccgttcagccatttgagaaacatgtctggtcagattgttcatgtagtcccatttgatctcaaggtaatctgattcttctgttagaattggcgtggcgtcatacgcatcatatgtatgccacaagcacgctgagcgcacttgatcaagtttcccaaatttttggagtgaagcccacgtacatgcattagagtcatgccagcaccctcttgtatacaccggcaggaccgacctggcattatccccgttacgactcttttagggataattgattttttattttttatttttgggtcggaagagaactgattaaacatactcatttgcaaattatattttcgggattttctaaaataaagccatgatatcatgttcataacagcaatcgaataataaaataaatagaataagaaaataaattggctaggaaatattttagtgattgtaaattctatcataatggattttttggtgattaactctcctagtagaagaattgacacaattgcaatatgtttaagacttttttggtaattctctcatttatagttccttgttactttctctagtaattttttctcttcacatcagatttgttagctttctcaatattttcacaatatatatgttaatattcgagttggtacttccattaaaaatataaatggagacactaaagtggccattaaatgctgacatgtcatcttatagccatacaaaaattcgttttccaaattttagaaaattaaaattcaaaggaaaggaaaaatcaaatagaagagaaggggaggggtagctacagtcgaggtggccgttttgatggtggtagagggcgtgggacgcctaacagacaaagcatggcagcatctggcacaggtacttcttatgattatgtggttgaactatcagtttttaccagtgaaaaaacattgcgctttcattgttacataaggaaaaatgatccataaaattaatattgctggtaatggagcttataattggagactttcttttgagtgtgctattccttggggcgctactcaatcgatctgcaacttcttcatcttttgccccttgtgggtttttatagtcttttgacgttgatgatatcaggccctttgggtgaacttcatttaaaatgttccaacgcaagaaatatcgacgttacatgtgtgctctgttggttatttcgtaattagcccggagttctcttttatggtttctttgttgctttctgtctactagaagttgttttctcgggacgttgcaaggaagaaaacgatgttcaattgcgggcttttgggtttctcttttgtttcgctgtaccctctttggtctctctttcagggtaggctagctggttttctttggctgctgtttggccattttctttagcccctttccacttactctgacttctgtctatgtgagtgtaagtttttgggtccgagatctcgctgtatagctctatatagctttctggtttaaaatcaatataattcttacatttatcaaaaaaaaaaaaaaacgacgttcaatgatgacgaatgaggcggcagaggagagcattgaaactcactgtgattagagtgagacgtgataccggaggggatgttagtgatgctatatttatttatttatgaatgaagcaagcaagacacagagagaccggagattttgtaattttggggaccagcgtgcgcattttcattgcaattttgatatatatcaaatcttttgatattctatgagtgaaaattagttacttttatctttagcccggtgtatgatgttcacatgagcgcgcatgcattggtttgcgaccggagcttagatcaaaggatagagaattatattggtgacgtctttgcctaatgaatgttgatagttcactatcacgccggtttaatatgagtgataacgtttttggtcctgagaataatttttgtttagaaatatttttttttatgtgttccctagacaagtttatgagcggaaaaatgttgtttgataactgtacaaattttctattctcgaaatagagattcgtacgtgaccttcaaattcttttgcaatttagatgttttcaatttttaaattatttttcttttatttttctttcttgtttttccttttgtcgattgtaggtcttggtgaggctcaactaatggggctttagcgaggttactggccttggccgtttattttttaattcggaaaataaaaaaagaatagaatcaaatattatttgatcggttaataaataaagcttagtggatggtggtgctgttgccacggatcttgaactcacaacattcactcacgggtagtcattacaccttttcagatgtcaaagaaagaaagaacaaaactcttatctactacggcttctgtcccgtccttgatgaatgattcgtgcacggtttcgaatgattcataactgatatggactttgacttttcttcccaaaccgttccttattatcattcactcattgtctaaacttaaaatggaattattcgaccgtcaagagtatgagtggcacttcatcaagaaaatttcatgctcatatttttattgatttaaactagatgacgtgacgggggtacatttacggtcctcaccttcgagaggcgcggaaaaaggagagcaacgctgcattttaattcaacattgttcttagtggcaagataaaaatttctttaggactcttttgagttccaagctatgctgaacctccatctctagcaaaacataaaaatgatatgaatgttgatttcgtcgcacattttatggactagaagtagatgccaaacggatattttaatcatatatccaatgtaatataggttacgcttgatagtccgaatttctaatcaggataaaattagataaaataaaatgtgaaattcatgaattttgttatatcatatctaatatttggtgattgtaatactaaaattagatatattcacatcatatcatatacactatttagtataaaaagtatatcaatacaaataaaccaaaatttttataaacagagatggagaaaatctcactcaacattgttgactattttatttttatttcccttattttttattaatttattttttcttttatcttccccttcaatcaaacaatactaaaacacctaaaatatctaataaatataaatatatagtcttatatgtatattgaatttatattataaaatagaattaaatttgaattataagattaaattaaaataactattttttttgtattttgaattttttatattaaaattcaactattatttatgttgaaatataattttgattttatcaatttaagaagttcattatttgagaaaaatgactttttaatttttaatattaaaaattttattcatctttattccatctcctttacaggataatatttatatttttcttatatctaattttatcctattttgagtaggcattaaatgtagaataagataattgttatattatcttaaattttatcttgagcagctgcagtgtttaaaagagaagtgtccgtaacaaaactcagaaaacgccgtgacgcctgacgttccgtacaactgctgaagtcgaactgccgaggaaacggccagtcttttttccgtctccttcgtccgatcatcgatcggtcaagagcgccgccggccatgatcctcgtcgacgacgttccggtcgttcccggctccgatccgccttcgccgtctcaggtaactccccttccctgcgatccccccccccctctccctccgtcgctcgctgcttccgatcaccgtcgtcgtacggagcttcgatttcgtcggaaaaggtagcggagtcgacggcggaacctatcgcgcgcttgaatagggtagcgacggaggggcgaccctcctccgatctcgcgggtttcggggtccgacagtcggagtaggcagaatgattacagagtccttggcctttttctttttctgctttgcggagcttttgcgtaatgcggacacgacgtgcgttggagctttctccgtccttccttcttcgaaagtctagcggtaatgcggttggataacgattgacggagaagaacgttggggaaaaatggaaaaaagttggatgttttaagctttgccgtgctcgtgcacctctcttgtgctcgatctgcgaaaactgtcggctggccggttagcgaacataagatgaggagctcgcgaatcttcttccgtgttcggcttccaaaccaatcgccgaggagattcgctgcaaattttaagtaaacgatgttaactttatctgattaatttgtagaaaacattgattggaagatcttctgggcgaaagcttgtttgaatcctggttgtatgcacatgtcgagtccaaatccttttactttatttttttgttcatccactatatttcttccagaagatgaacaccttgaggtggaaagagaattcaatcagcagtgcgccgtgctcattagattagcaatggtctttgacataaccttgcgagcaggcgcttgattgaaaagcagcccaaactagctaaaacctcattgcctaacagaagacagagtaagcaaacggagttcccagcttgaatggacagaaccataccatttctgaactgagaagtatacgatatggacgtcccaacttgtgctttccactagaattagcatgtaactggttgaattgaattgaattgctgtgggtgtgaacgtcactttctgttgtataagaattaacaaaagaaacttgggggtgaaaactgattcatgtcacctcttttgcagtttaagctcgtttcatccgctgcatatatatctctctcgtgatgacttcttctttcttacttgtcaacaggttctggaaatcttagctgctttaacagaccacccaactttattatctgcctcgcattcattcagaaataccccagagaagaggttttccatttcagaggagtctggattggggagcgttacacagcccaaatgtgtttatgtattccaaagagaatatgctattgttgaccctgctttggtggatgtatggctcttcccctttcctcatttagaataattggaatgtttgcttatctttggagtactttgtttattacttgcaaaacttctaatgactgttatcattctacatgacaggttgtcgggactgatgaagcaactacatgcgtggggcttgtcattcggaatcggtcaaatggaaagtatgaagttaatgcggcagaattaagagaggcttggaaacaacaaacctgttgcgttgcatataaatccctaaatctgcatgctcatctttttcccattgaatctcaggatttctattgcccatttggattctccagctattgtggaaatgggtcttgctcagatgttatcacaaattttttatcacgacttgcaggatgagatggatgtaatggttttgtatcttttatcaaaaaaagcaaagctgtgatgtttaatgattcttgattattttcacattcttatgcaaagtcttgttaaatgctgaaatgcaggttcatgtcattggcggttttgaggatgcttctcttaaagtctgacctgagatccccttcttagtgattatcagtggatgtaccatccacttaaaggcaaataaatgagtttgatgtgttaattgttgaactttgtatgcagcgaatcaaccatagtgatggatcggaaatccatggaaaagtgggcggttattccttaccactgtgtatcaaattgatcgaaacattgctgaggagacgagagaaatttcatatccagacattctttgtgcttggccacaatactagatcggatgctgatggacgtgcatatcctattattactgggttcctggtcagtgtctgttccagatgtacttttattacattggtaccttcttctaaatgatatttaataaagagatggaaacataaaagtagagcaatggaaatatggacaattttttgtcgatagaatcttctcttttgataaaaagcagtagtctgcattacctcctgagagacgtactacatctattgacaagatggcctattttgagtccaacactggcttctcattacaggactaggtgctgtaatccaagcaaacttttaataaaagaagctattctatttatttcttgactgtcttttcaaggtcacgatgtattgcattttcctgaatttcagcaattgtgaaagttaatttgtcaattttctgtgttccaataattcactaatatggtattattgtgggctgtgcgtcaaatgttaaatatttgcatttcatctgtctacaatttgatttaaactcttgttcattgagtgttcgtcaggtagagacatcca

SEQ ID NO: 9800 - DNA, 2883 bp, Eucalyptus grandis
  Intron number 3 from transcript Egrandis_v1_0.022737m (loc us Egrandis_v1_0.021756m.g) derived from phytozome v7.0 (c hr-ID scaffold_11; pos 27572642 to 27575524 reverse strand )
caggtttgatttgactctttctttcatttgctttgactaaggtttaaggtgattctgttctttctttgggttgttcggggacatgtggttagtggagtacaacaattggtagattagttagaactgctgctgtttcttaaaattgaagtttggttgctgttgactcaaagcccaaatgagactagtaaagtctaagatggataattgtgcctgtgcgagctactcctttcctttattcgttttgattgatatttccattttatgaggaaaaaggagggtgtttctctatacttcgtacacccacagccaaccctgtaattgcctatgtagggacaaaagaaagcattatcttgagacagagatattacaacctgtctatgaatcgtttcaatctcgttaattctaagctaaataattatgaactatatataggataaacaatccacattcctcccatttttgttggttgtcctattttttgcccatcttattgagcattgttttttttaaagtgatcagagaaacatgtactctcatccgacatgtttttgcttccagatttgtgtaattctgattataactttttatcgtttgcttgcactttgtcttaactaactttagagtgaaatctgtttttgattgtcaactctaacatgagcatgtctttctctaaaaggcttagccagatgagtggtgtatcctatcacaaatatgtagcaatttagaagtctattctgtccgaaaatctgctaaaaggttagccagcctgtagaaagataactatctacctttatgcacctaaatttttcattgagttttaatgctataattttaactaggataaagaaacttaataagaacgcgtgccacttttttagtaattagggcccaaacatttaaattcttgggaaatgctctaatgtgtcaagcgtcacaatggaagaattggagggtgattacttaaatcctccatcgcattcatttgtagggttctccaaattcttgttccaaatcttcattatggcactaatggagacttcaactgtttgtatgtaatacttgatatgtggtttcaatttctttaaagattgaatgcatttcgggtcagttcttcagaacataattatgcttctagacaaattcatttatagcaagtgacagagtgaaagaatgttagtatggaatatcaatctgtcactaatctaccttaccttgacattttctatatgtgtaaacataacttggcattctcgatcgaaatggtcaagggttttggctaagagttaatatttcaggtatatgcaatgcaggagcgttgagaaaattacagaggcttaattaatggagttagtccttagctatattagctatgtattataggactttctctgtttctctgtttactttattgagttgtgtccttttagagtttaagatatgacgggattgatgtgtggctcttaatgactttaacattaggagatcttgaagtcgatcaagggcttagatccttgggaatttagtaacatgcgctaaccttaatttcacggagaggcaatgctcaacaatagagtagagtgggtttgcttcccttcgaagttcaactatctcaatactctgtggtatccaattggaaaaaagaaaaaaattctttgtattctagataatgttgtcaatgatgagtagcgcacaccaatgctttgtttactatatatcacagtcgtggttggacttacacactccaataaaggtcatggttggactttgttctattgaaattggttttaccatctacgtcaaacaaaatcatttttaaaatttggtgcccttgttattgtttggggctatgtgtgtatttactgatcaagtgaagtaagcagacatagattttgttgtgatgagtatacttgatagttcctaatcactggtctttttgtgttaacctgattaccattagattctgaggaacaaaaactactagaacatgcacttaaaatattgggcgcctgaattgactagtctgttttcaggttattaggctttggtcccaagagctgtttaggtcgagtggattgtccaggaaagttttcttgccgtctaaccctaaaatgctcgtttcttagtaaagtctgatgaacatcagttttgtcaggtaactcacatctggcaaatttgactcattacctcattctttttttttctgatttctgttatcatttggaaaatatattatgcactctttataagtagttttagttgttatattaagattttagatcctttaccttcttgcttttcattttgccactgatgtatttgtttctgcattgggtgtcagaatgttgacaagctaaatgctgtagggaagtggacgaaggatctgctaattgattctctgtttatatggcttagttgatattttaccaaggatgaaagtcagattaatgaatgttgaattatcttcaatgagaatttgagatagaatgaaatctaggtgctgagtggctctttggcccacaacagtgtactttgagttgtttgcaccttaaattcactgtcatatgagttaataaatggatagcatttatgctatggctttattctgttgtatgatgttgccactactgtcacagccaggttttaatgaggtttttttagctttatggttcttaagctcatccaaaactcacctcttctacaatgtcgttcctacactttggctgtatcataggcttctttaatgtttttcttaatttttgtgttgcacatataatggtgttgatcctttatgcatgagatcataaatatctttcataccagggcgccccatcatcgttgacttctctccagtgaccgattttcgcgaagctacttgcaggcaat

SEQ ID NO: 9801 - DNA, 3576 bp, Eucalyptus grandis
  Intron number 2 from transcript Egrandis_v1_0.005650m (loc us Egrandis_v1_0.005654m.g) derived from phytozome v7.0 (c hr-ID scaffold_8; pos 42188086 to 42191661)
cagtgcagcgttacaagggctgaggtaaactaaattttatgttctgcaagctttgaaaaactatggaactatgtagaacaattattttcatctttggagatggattctttgtgtttcatatattagctttaacaatgtagctgtcttcgagattcttacttcttgtcttgtttgtcaattgttctgtcttttctgcatttagatcagttgctgaaaattaactctgccgtggacactgttgatgactagaattttttggctgtggtcaaattatctatgacgatggtgatgactataattattactatttgagaaatggtggctgcataagtacatagtttcatgttccttgatggggagcttctattgcttttgcattgaggaagttcttaatgattcattctcatttctctctgtccttccttgatctggtgaatttgtctcatgtaatggtcctgcgatggaagaagtttcatctcacgaaaaacgaggaccccacgacattttttttttttttttttgatagtctcgaacaaggtcgtgaaagtctgaatctatttctaattgatattgttgtttgaaagattgggtcttgtgatcggatctaagatcacaatgttatatatatatatatataaacttttgtgtagaaatgaataaatgtttttaacagaccataacttcaaagaactggtattgccaagacctatatgatctctaaaattatgacgataagtccttttgcccttacgtgaaaatctcaaaatgtagaaacttttattaaaattgaattggtagaatcactccaaactaaggatattcattctttgattttgcattttgcaatgaggagacccaaagcaccacggcaggcaaatttaattggaggtcacttttagttgtaaggaatggaagtgagacataatgaaataagattggtaatgaattcaagtaagatgatagtggaacaagcatcattccttcagtttatgggtgcgacgtttaaaaccgctagatttttggtttttaccccttctactagttggtcgtagaagtaataatacaaattcttatacatctctgatattgtccacacattacttgattcaggagttactgaagccaaatcctgtcaaaactgtacattccgtgcattgacatttcagatcacccaaagccatcattttcatcgtcaaaccttctccattcatgttgtgcaaatctttgtaaaaatgagggcactgcatttgggttttcaaataacaaaatttttggaaagggttaaaatagaatttcttatctttttttctgcagaacaggagaacagtatctgattttgttttccaagtgcattgaacgaaaacagtacttaatttagcaggataatagagtgatattttattgtcttttgtagggcataacacgatacgaacaagtctagtgcttaagtggtcaaatgagcatgtgagagcatggaattgcctgtctgttgctattaatgttcactatacattgttccggccacctttgataggatcattaaataataacctcattgaatgctgattcctgtctatcaaatatggaattatatcttttggcagtcaattttcatttgttgtgcttttcaataaataagccggtgtttgagagtttaaaatcccagtgggattgatttctgtagaatagctgtagcttcttaatttatatgaattagaggtgtcaaaccatgtgacgatgtatacatccatacaacttacataaattgtgctcaaattttcattttcctcccatataagatttatgcattgtatttttttcttagaagatggatgcccaatattcaaggattcagtgaaattgtatcttttggtgccaagaatgagtgaaatgaaatactgctagtgaaggagctaggagagtggggcaggcgatgattatttggccaattgcactattccttttaattaatgcatgatcttattctatagatgaacctaattacataagttgtcacgtagcgtatgctttatggtgggtcttaactaatgacatgattaatatcatgctgaacaaagggaaataaccgttatttacaactttttggtttttgcttgacgtacttctagttgaggatgttgaaagtagcttataagtttttttgtatgttagcgaagagacaactaccgtttgtagcagttcgtgcttttgaggctttgcctcttgctttcttgttggtatctactgatattttttataaggtataggcagtcttcccagttttattatatcaaatcacgactgtcatggatgaggtaattcagtctttgtcaatgcaaaatttggtttgctgtcaccagacatcctggttcgtctcatctggtcccagctgaaatttgtattgttggttttggctatcagaatgcagtgaaaatgtattagaattacctcatatttattacttgtcaaatatgggagaggttcagcatggggtggagttagcttaagccgactgaacttaagaggaaaattcaattgttttcctttttgccttgattagtaaccttactcatgcctggaaatggcttagggaatggatgtggaatataattaatggcattctacatttatgcagttggcatcagttttggatctaatctttcactgttccgtcattttaactgcactttaaatcctaatttagatgttgttcatgtcagtgtcaacatagggctattagccgccttggtacctttttctttgtatggatgcttttagtaggctgtatggtactgagctcatttaaatggatctttgtgaagtttcatgagataaccagaaggataataagaggaattatggaagcttctttaatattctgtttgtccaggatgcccaagatatgaagttgttcaaagggaatgttggaataaaatgggcattctgctaaatattttgaagtgttgtgagataaatgcattgacgtattgaacatttctgcagatactctgcttctctttctcctgtgaacatatgattcacctccattttgccttgacccgcaaaaaaggagacaaatctcgtgattttattttgtggatcagattgaaacacttaattcttcttgtttctggtagaaggcttcctatgactacgagcagtgtaaagtttcttcaattttgtttttcttcaaattgaatcggagtatctctttagttcagcagcttgtaattcactctgtctgtatgttgtccacttaaacctcaataccatattgactcggtaaacacaaacatatttgaaagttgatggtatgtgtctgttttgtggtgggcaaattacttgattgattcaccacacgtggtattgcttgtgcgtgggatgtggctataaaagttactagcaatcttcttggtcatttcctacagttgcttttcattttgatttctcctcttcatgtagcacaaagtgttttggtttgtttcttggataagatcaaagcactcacgtctgatgacaatgtcactcacctccataatttcttacacgcagattttggttggatcttttgcgggc

SEQ ID NO: 9802 - DNA, 5980 bp, Eucalyptus grandis
  Intron number 7 from transcript Egrandis_v1_0.016661m (loc us Egrandis_v1_0.016661m.g) derived from phytozome v7.0 (c hr-ID scaffold_7; pos 10847777 to 10853756)
taaccggccagcctccatattctcccttggaagccgtatgttactaagtaacctcctatttatgttttatacgcttgagatccatgttttgccagaataactaactagtcgcaactcttttgttattgctgctttttgtgtgagctagcttagttgagcgcatgtcgcaacgagtccattaggctgtcattgtaagaaaacaaaatgagcaagagcattacttaaaaaagagaggaaagagaattcaatgataattatcaagagtatggttgtgtcaggaggatatgcgtagtacttatggctaatggttgcttgggattctggcgcaaacagttatctaacatggtatgaaaagtcggttgaatagttgaatcttgactttctctttcaagtgatttggcattgttgtcgaatgcttgtaatcaccagtacaagtttacagtgtacggtggcatgcgtgttacgaaatcgcacgtcgatttcaaaaaaataatgctcgcaaacaattcactagacaaaatatagtaataaaagagcagaatcagatgaacacgccagaaaatttgttatcgaagttcacccaaacttgggctacgtctccacgcagaggcactctgcgaatccactagacttcgaaaaagttggaatacaacgacgatcttctctcaagatcagggcacaaagagattgagaactctcatcaagaaaaaactaacttttttcttctctctttttcttgcctctctatttcctttttcagcatcttgacggctagggttttgccatcgctaatatataggtaccacttttaacctaaaaggaaatctaatagaaaatacaaaaaagcccctaaaaacaaatatttggctttatctataacaatctcccacttgaagacaaatatacccaagcaccaagcaactttgcatccatcttcttcaaaaaaatagtagttgaaaaacttgtgcctctgcgatactcctcatcaatcaacatggagtaataccaatggtagtagtacagaaaatatgcttctctctgtctactaccttggtcatcatgtcagctgaattctttgagccatcaatcttgtgtagctttaattcattatctttcaatgctgacctgataaagtgataacgcttcttgatatgtctagttcttaagtgataagctgcattctttgctaagtgcactgcactttgactatcactccacagtgtactgattggctgttttcgatgtaactcctccatataatcttgtaaccacatgatttccttggaggcttctgtaatcgctacatattctgcctctgtcgtcgataaagccactatcttttgtagttgagatacccaactcactgctgtacctgcaactgtaaagacatatctagtggtactcttatcactatctcaatcacccgaatgatctgcatctacataaccctgcaactctagagatgtaccaccataacaaagtgagtaattagaagtacttgctagatatctcaatatccatttaactgcattccaatgctctctgcctgggttctgcatatatcgactcacaactcccactgcttgtgcaatgtctggtatcgtgctcaccatggcatacatcaaactccctattgctgatgcatatggaactaccgccatctcatctttcaaagcctgagtacttggacacatatccttggaaagtttgaaatggctcgctagaggagttgcaaccggttttgccttgtccatgttaaatctctttaacaccttgttcacatagtcttcctgcgacaaccataatttcttattttccctgtctttgatgattttcatgcctaaaatattcttggcctctcccaagtctttcatagcaaactgtgatgataacatattcttcacttctacgattctcttcatattagaactagccacaagcatgtcatccacatataaagataaatacacaatgtcaccatcatcatatttgcgaaaataaacacagtgatcagactcacagtgtgcaaatcctttttcttgcatgaaaccatcaaattttaagtaccattgccgcggaccttgtttcaagccatacaagcttttcttcaagcgacatatcatgtgctccttacctttgacttcaaaacccttaggttgtgccatgtataattcttcatctaagtcaccatgtaaaaacgttgtttttacgtctaactactcaagatgaagatcttccactgcaactatacttagcataactctaattgatgtcattttcactacaggtgaaaatatctcgaagtagtcgatcccttctttttgagaaaagcccttgactacaagtctcgccttgtatctaatactaccatctgcttcattcttaaccctgtacacccatttgtttaataaagcttttttacctgtgggtaacttggtcaactcccaagttttgttctgaagtaacgagctcatctcgtctttcatagcacactcccactgcaagtgagacgtgtctgcctttgtctcatcgtaagtctccggttcccccgaatctgtatataagacatggctcagaacagtattagctgatggatcaaaaattacctttggctttctcacacgtgtagaccttctcaagacaggtacttcagggccattcgtttgctccgaatcattgcgttcttcttgaactacctcttcactgataataggcttatcttgaacctctctttcaggtgaactttgatctactggaaacatcttcatgggcattatgtctaattcaacatactccggttgtactaccttctcatgctctgtctctgtctgacgatccttatacatcttttcttcatggaataccacattgcgactgcggatgactttgttattctcataatcccaaagtctattgccatactcgtcgccaccgtatccgataaagacgcacttctggaacttagcatcaagattttttctatcctccctgtcaattaaaacatatgcaatacaaccaaacacctttagatgtgaataattaatctttttacctgaccaccgctcttgtggtatttctccatccaacgcactagatggacttctgttgataagataaacagctgcatcaactgtagcggcccataagtgtagcgggagacccgcgtgtagtctcatgcatctcgcacgttctagaatagtcctgttcattctttcagctactccgttctcttgaggagttctaggaacagtctttagcccgtgtatgccttctcggctcagataatttgcaaattctttacttgtgtattcaccaccattatcagatttcaaagctttaatctgataacctgtttctttttctaccatggtcttccacattctgaacatcccgaatacttttgatttttctttaagagcatagacccaagtctttcttgttgcatcatcaatgaatgtgacaaaatatctcttaccaccataagagagttcctgagcaggtccccatacatcagtatgaaccaactctagcttatggcctttattttgtcgcccattcaattgaaaactaacagccttctgtttttcataaatgcaactctcacaaaaatctaactcaactttttgtaaacccggaagtaattttctcgagtgtaactgctttatacctttttcaccaagatgtcctgaacgataatgccaaagagtagataaattacctgtagccattgtagttgcaaccatatcactgatattgtctccttggagaaggtaaagtgtacccgtacgctttccctttgctactactcttacccctaaggttatcttctactctccgcaaccgaaggttattaccaaactttcttggtcaagtttactggttggaatcagatttttctttaattccggaatatgcctagtttcacgcaaaactagacgtcatccacctgagatgttcacagtcacggttcctttcccaacaattggacacatgtggccgtttcccacaaccacttgtccaaaatctccactggcataatcatgaaatatgtctctttgcgaggtgcaatgaaaagaagcgccagaatcaataaaccatttatctattgtcaagtcaaaccctgtagacaaacacaagttatctagcaaagatttatcgctaactacattagcaccttgattctcatcttgctgcttctttttgtaggcttcacaccgaaacattcggtgtccggttttgtgacaaaaccaacactcatattttgcaacctgtctcttaccccttgattgtgatctgccacgaccgctgaaatttcatctacttttacttcttccacgattctccactgcaagtgccgttgaagatgtagatgcagaaaaattatctccacctgagactttccttcgcatcacttcatccatgatactactcacaacatcatcaagagttaaatcatccttcatggtgctcgaaattccctgcactgcggtattgtagctttctggaagagaacataaaaataataaagcttgaagcttcatatctaaatttatgcctgcggattccaattgacccgtgacctgcgttaaactattaatatactctgccacagaacctctatcagataacttcatattaaccagtttcttcagcaaaaatacctgatttgatgtggatggcttctaaaaaatatttgttagaatatccatggcttcttttgcagtttttgctttcgcgatgtgataccctgtctttttcgtcaaccctagatgaatcgcacctaacgcctttcgatcaagaattttccatccggcttctactgtcggatccacttccgccatctcgggtttccaaccctcaagtggtgcatagagatctttttgataaagataatcctctatttgtagtttccaccatccgaaatcctctccattgaacttatcgattctgattttatcttctgccatcctgtttgctttcaatcgaacgtcaccgaaaaactctcgatattctcgattagccaacctaggctctgataccagttgttacaaaatcgcacgtcgattccagaaaaataatgctcgcaaacaattcaccggacagaatatagtaataaaagagcagaatcaaatgaacacgctagaaaatttgttatcgaagttcacccaaacttgggctacgtctccgcgcagaggcactctgtgaatccactagacttcgaaaaagttggaatataacgacgatattctctcaagatcagggcacaaagagattgagaactctcatcaagaaaaaaatcaagaaaaaactcacttttttcttctctctttttcttgcctctctatttcctttttcagcgtcttgacggctagggttttgccatcgttaatatataggtaccacttttaacctaaaaggaaatctaatagaaaagacaaaaaaacccctaaaaacaaatatttggctttatctataacaatgcgcttacataatcgcatattgtacatatgtaaacggcatcccaccaaatgaggggtacacatatgactccaccattcagtctcaagaatctctcgatctttcactgccacatggtacttgagcaactaagagagccatctatgctccagacctgagagcagcactgatatcgatggcttcgtggtgcctgctgcgtcatttcattgtgtggtcaacaatctctcgatttgtcactcgctcacatattcttcttgctttgaatttcatgacttgagtgttgatcctttgctgctcttctctgattgttgacctaaatggctgtcttctctactaggattagttactttggatatggaagttagtgaattttcaatttggctatcttcccagctgtcatgtgttagttccccttggatttatgattaactcaagcctctactacgctttctttcttattgtggcagatacaagcattgtttagaattggcaggggcaaacc

SEQ ID NO: 9803 - DNA, 4258 bp, Eucalyptus grandis
  Intron number 1 from transcript Egrandis_v1_0.035766m (loc us Egrandis_v1_0.035766m.g) derived from phytozome v7.0 (c hr-ID scaffold_5; pos 69150522 to 69154779 reverse strand)
tcccggtgaccgctgtaaacaagagagcggagcatgtacgagtttttctaattgtggactacattaattgatactgtaatttaccatttaacgtttaccgttttacggggtttggtctaaggtgagatagaaggtttcttaattagtttaatatgggctggctagtgtgggccgagttgagcctggcctgtaatgagagggactagctataaactctataaatagtgctcaagtctctcctctaaccctaattctcacatgtatcctcacctaaggggcgtttacctaacgctacacgtgagggggccgcctcattgagccagtgatacagagggcaatagaggagaaggacttgcacgtggaacattgtgtttccacttccgcttcaagaacaatggatcccaaaacaggtgcgtcaattatttctactcaatcatgcatgtttttgttctagttatggagatcttggggtttccgcaatttgcatctaacatgtggtatcggagccttccataaccctagaacacggacacaattgattttgccctaatttgtatggattagccctaattagtacggatcttgccctaatttgtgattttcgagacttttagttcaataaaaataaaattaaatcacaaattcggactgggcttgacaaggcgagcaaaaccgtgggaggcgcgttgccgggggaggccccatgcgccctcatgcgcggacacgcgctgccgagtgtcgaagatgcgcacccacgcgcggggcgctactcgcacgtgcggcgcatgcgggcgctgacgtcacaatgaggtcagcgacccggacttggattccgcacgcactgatgtcacgatgacgtcagcaacccggattcggattcgatccgattcgacccgacccgacctaacccgacccgacccgttgaccctgactcgacccagtcattcgttgaccgaaccggtcaaccagtcggaccgggcggctgaaccggatggtcggaccgggaaccggtcggaccgccaccggtcggaccggttttgaccggcctttgatgcctgcgcgtgtgctccacgcgccgcgcactcaggcggcgcgtgcgggcacgtggagtctctgatttgcgcgtggctggtggcgatggactcgtatgattatttcactcaatcaatataatccatcggataaattgcaacacccaatcttatttgaatcataaaacatggataacatatgtgatttaacttttataatgtttatgtgataacatatcagtaactcaacacatgtatttccaaagacacagagaatacaagaaaaatacgcaaaaatacactaaaaattaacgtatttagggctttgcatgtattttcacatccataaaatcatcaaatatataaaataaatatacaacaaattgagcctgtcgtggcacatgagcctgttgagacagttcctgatgaaattcctcaagcccctcaaattcagaatgaggttgaagtagctccactcagaagatcaactagagaaagacgttcagctataccactagactatctagtctacctgggagagcatgattatgacataggctgtgttgttgatcccgtaacttatactgaagctatctcatgtcctcaatcagatttgtggttagatgcgatgaaagatgagatgcaatctatgaaacacaatggtgtttgggagcttgttgaattgcctgaaggttgtaaacctattggttgcaaatgggtattcaagactaaaagggattccaaaggaaagattgaaaagtttaaatccaaaccggtagctaagggtttcactcaaagagaatgaatagattatgaagcaacattttctccagtttcttctaaagatccctttaaagtgatcttggcattggtagcttattatgatatggagtaacaccagattgatgttaagactgcttttctaaatggagaccttgatgaggaggtttatatggtgcagcctgaaggttttgtagcagatgactcagctaggcttgtttgtagattgaaaaggttatttatggccttaagcaagcttctagacagtggtatttcaagtttcatagtgttgttacttcatttggatttattgaaaataaagtagatcagtgcatatacaccaaggtcaatgggcagaaatatatttttctcatactttatgtagatgatatcttgcttgctagtagtgacattggtttactgcatgagacaaagcggatgttatcgaaaaaatttgacatgaaagaccttggtgaggcgtcttttgttcttggcattgagatccatagggatcgcttacgccgttcattgggtttatctcagagggcgtatattgatcgcattttagaaagattcaatatgcaggattgcaaaccaggaattgctcctgttgttaagggtgataaattgagtctttcacaatgccctaattcagattttgagaaagcttaaatgaaggatgcaccttatgctattgtgcttggtagcatcatgtatgctcaagtttgcactaggccagatattgcttttgcaacagggcttctaggcagatatcagtctaatccaggacgtgatcactgggttgctgccaagaaggttttaaggtacttaaagagaacaaaagattatatgctgatttatagatatgttccaaacctgtaactagtagggtattcagatgcaaattttgctggttgtcaagatgataaaaaatcaatgactggatacatatttatgttggcaggaggtgcagtatcatggaagagcgaaaaacagaaatccatatcttcttctgccatgcaagcggagtttgtagcatgtttttcaactgctactcaagctatgtgactccgaaacctcattagggagttatcagttttttattttatagatagacccatacagctatattgtgacaataattctgcagttttgtttattaataacaatagaagtctcaaggggtctaaacacatggaggtcaagtttttgactataaaggaattagtgcagaatggtgacgttggagtagattatattcctacagatgatatgattgcagatccactaactaaaggcctacgcccatgtgttttcgatcgacatgtcattagtatgggcctaggagcatcttgggatgctgttatttagtgggagctgtgttttatttttatttttaataaagtttacatctgtttttgttacaatttagtaacattttgatatatatatgtcaacttttgcatttaataaaatattttttaaatggattgttattatgttgaatatatatatatatatatatatatatatatatatatattgttaaaagtctcaaggtattacttaaatcttgagtgaaggctaggggcatccggtaattagcattttgcatatgtcttgtgatacataaagaaatgttaaccataaggataagacatatgtgggttcattggaaccataaagcattctctagtggcacaagttttttgtgtcgcctaaggtaagagaatggtgactgacaaatgagatctctctatgagagatgttatccatttgccacactaccatattgaatccatatcaataaagttgagagcactcgtgaccatggaaggctctgtgtgtatacatgcagttaccgccatgattcggtatttaagactttatgggataggattgactattaagaattatctctggaccaatgtgcgcacatacgatttcaattaatacagtccaagtgggagaatgtaagagtttttctaattgtggactacattaattgatattgtaatttatcgtttaacgtttaccgttttacggggtttggtctaaggtgagatagaaggtttcttaattagtctaatatgggctggctagtgtgggccgagttgagcctggctcgtaatgagagggactggctagaaactctataaatagtgctcaagtctttcctctaaccctaattctcacatgtatcctcacctaaggggcgttgacctaatgctacacgtgagggggccgcctcattaagccagtgatacggagggcaatagaagagaatgacttgcgcgtggaatattgtgtttccgcttccgcttcaagaacaatggatcccaaaacaggtgcgtcaattatttctactcaatcatgcatgtttttgttctagttatggagatcttggggtttgcgcaatttgcgtctaacagagcatactctcaacg

SEQ ID NO: 9804 - DNA, 3487 bp, Eucalyptus grandis
  Intron number 2 from transcript Egrandis_v1_0.006471m (loc us Egrandis_v1_0.006471m.g) derived from phytozome v7.0 (c hr-ID scaffold_8; pos 54301796 to 54305282)
ttaacattaagctcccttcgactaaaaacctccaggttaagcctgtaccagagtgatatccattacttcctttccacttaaaggggatgtcacgccccgatcctcgggcacgcacacatccttctactcttggtcgattatataatgcgatatcccaggactatgtatcgccgaccctttcattatttaagcacatgcggaagcagttaaaatccccagacaataaaacaatgggatagaaaagcatggccataattctcatattgaaacttataaccaaacttttatgcaaaacacaaatcaaagcacttcacaactttttgctctaaactctattcacatcaattgaagttcacaaaagaagatggaatctcaatccatccgggtcgtactcaagacccccttcagaattatcttcttcttccaaaaatcattttcctcaagttcgccttcgagttctccttctcagactcctcctcctcagctcctcaacggagtcctgaaatgtttttccccaaactgggatgagactacgtctcagcgagttctaccccactaagcccgattagtaaaccattatactataggctgcctaaacacgcatagggcagaagacttaccttggcctcatattccacctgcaagtcagtacaattcacataccttacgtatagaatcgatacatccagcaattgaaacgcatcactcaactcaacaaatcacaagggtccagattatagggccaaatcgttatgacacgtcccattccatgtcacacaattttgtctcataatccggcgcatcaaactcaaccatcatgcgttccaattgttaattacacccctcaagggtacggccaactctattggcggtcttctggcattaccaggcgtcgtctctccccgtgagcacggcaacgtctctcaattagacggcttccccgaaggggcgtaggtccagaatctactgcgacccactaccctaatgcatgggtaacccgaaaagggatttagtaacgtccggcataattgctcgagactggttctcttaaccaacacacgaccactcaatatcggcccaggaccctgtgcattgcactcaaatgcctccgttaaaatagtgatcctggcctatttccttcgtattaaaaacatcccgaaaatagtcgtgtgtgggtacacggtcaattcgaaccaaaagactgatacttatctttttcaaaccccactatttgatatagtactaaaaatccatttttggtgttaaaacccgagacccgggattttctgaataaatatcaaaatccacaaattttggaattaaataccaagaatccaatcagcactccatttgcataatttaacactcaattgcagaacttaaccacaccatttaccaatccacaattcagtctcaatcaattccaatcaatttagagtaaatctctaaaatatcacaatttatttaattccatacaacgtgtagctcatataaataaacggactgcgccacgacgatcagcacgagattttggtcgtcggccatcaaaatcttaatttccgaaaaataattaatttattatgaatttcgaaatgaaataattaatattaaaaattcaatttagcacaaaataaagcccaattaaataaacggacttcaccacagtcatcagcataaaattccgattccgggaccatctcagttgaattttcggaaaataaataaataattaatttaattccgaaaaatgatatttaaatgccaaaaatcacacttaggcccgaatcgccaaattgaagcccaattaggggtcggaaaatttccgagatacttccaataaatagtagaccacgtctacttgttaattgcgcaatcaatttatctaaatcgcatcacaattgactaataattgttaatttattctaatctaacaacctaaacataattaattaaaactaaaccaacattaaggataattagccaactaatcctgaattagtgagattactcaccaaatcgcgagcaaatcggatcaatccgacgacggcgacgcgaggaacaaaacttcccaaagcgactcgcggatccggggcccggaaacggcccaaaagcgggcccgaaccagctggaaacccatttcgtgggttgctggttggctgcgaaacaggggaaaacagagatggttagaggcggagaggggtcgggaaagcaagaggcagtccggtgaggccacacggcggctccggcggcttgctcggccactcacggtggctggacgagacggaacaggggcgagagacgcacgggggaggcctgagcgcgaggaaacgaggctggcggcgcacggcggtgagcggcgcgcacacgggcgcgggcgcaggcgtgcggtgcgacgacgagacaagcggcgacggtgagctgcagcttctggtttgggcttgctggttcgcacgcgacaaaggaaggagaagaagaagctggttctatcgtgtgcgggaaggaagaagagagaggagagagaagagaggggagaggatatgcattgaccggtcaaaaagggaagggagagagaataggcggtgggggaaaaagaattcgcacgagggggaagggaaaagggaaaggagagagagagaaaagagaaaagaaagagaataaagaaaagaagagagagggagagagggaaataaaatattacccttccacttattttatttcatttctctttccctttctaattcctttcgggcttcaattcttcctccgataatttctttattgaaatttcagactcgtcaataaattgacgaacgatgagacaaggtcctaaaaaggaattatgacgcgcttaaaattcgattcccgaaatcgagttcaatttcgtagttaaaaatcgatcagacgtgattttagtccaatccaaccaattgagtagctttcagggattttactgcagatacgtcccttaacggcttcacccaatagattagttaacttgtgagtgatcagctcagagaaaaaggaccctaagcacgtcgacgaaatgcccatttcactttatcgaaacggggtcgaatttcaggatgtcacattgcatctgtggactaactggagaccgaattgctggcatgtttaggaaggacttatcctaaaaatatgtgatgctacttttgtaataaatgaatgaacgccattttgagggggccaactgctgcatcaatttttggactcctcttttacatgctaaggagatttgctcatttgttgccttatttgatacaatcccaagttgattgtgccatatatcttgcattaacataacacgaagcaagcaactccaccattttgttttttttgggtacaagtccttgctgattttggcgctcagcaaatggatacagctatccttaaatgcatgaactgaagctgaataattgttaatctttttgttgttcactgtggtgtggatgctaggtggcagcttggg

SEQ ID NO: 9805 - DNA, 1521 bp, Eucalyptus grandis
  Intron number 1 from transcript Egrandis_v1_0.000780m (loc us Egrandis_v1_0.000780m.g) derived from phytozome v7.0 (c hr-ID scaffold_2; pos 10401967 to 10403487 reverse strand)
atcacagtaagtgctcccgtcgtcgtgcgatgaatatttgtgcatgctttgatatttgaatgaatgacgtcatttcaagatgacgaattggtacgaactgtcgagattatcttccgtaaaacctatgcgcttggcgagtcccggaacttatcagcgcaaagaaagctctcaaaagaagcaatgtcgtacgttgttttacacatgacgaatatcagcaattttaaatcaagttcgtaaattaacgtagttgcaattttcgacattatcatatgatttggcaattggaatgtgtttctttgctctccctactgaaaggggtcaactagaattgcatattctgcaaaaccttagggttttgttgcttttgcattctgtagttattttatttttccctgcgtttcttgggttaagagtagcttaaatcctgtttcgctgtttttgatggtttgaagtccattctgatgaatgatttgagtcagtagattactcttttttgcattgagctagtagcatctggagagcattctttcactacccagatatcaccttctagctcaccgacagtgaatgttctgatcgatttgtattgttgggaagaaagcactgagctgtatgggaaatacgagagcggaactctttgccttgttttgttgggaattgagaacatgactagcaattttagtgtttgtaaagtgaagagaattcaaactaatctgctgttctctgctgttacgctgacttttccagttatgttaagatgcaagtaagtacatggaatggactgtcctcattagattgcagaacatcctgaatatctgaacaacgaggtttctctggctgttgcagacagggtactgacctgattcctctagccgagcttcaaatctctaataaagtcgaaaggtctacaatttagtttagatagtgtggacctaagatctttctcatctccataatcatgctttaggaagatatttgtatgcttgtgctcctttcctcacagtcaaaactatgaaactgaacttgaagtacaatgattctcctaatctaatacttttagaaggtctattaagttgcttgctgtagttagataatgagctcaatgaattctttgttgagtaggccactttgattagaaataggtattggccgcacaacttacaactgttggccaagggaagtaaaagtacgatgggcatgcttatttgccttttgctttatgatcatattgtggagataataagctgtcttttttacacaaagactcctgatcaccctttactaggagaatgtgggcttgaattccttagaaagtggaagagttgctaggaagtggagatatctagattgttggtatatgtgtttgtgcacatgcacatttgcttatacattgttggttttattcatcatcaaaccctcttagaatttctgatcagatcagaaacttctgttttgcatgtttttctgtgtttttgttgcttatatccatttgatatgcaggtaacacggagaacagcaaga

SEQ ID NO: 9806 - DNA, 1391 bp, Eucalyptus grandis
  Intron number 8 from transcript Egrandis_v1_0.021778m (loc us Egrandis_v1_0.021778m.g) derived from phytozome v7.0 (c hr-ID scaffold_3; pos 21756005 to 21757395 reverse strand)
attcttctagagtcactgctgggagtcttttgaaggtaagcttttttaagaatacactaactttatgtaaagaagttgccactagtccattgtggtgggctaaaacccaaggacttgattacactagttaattaatgctcttttagtacctagacttgattaatttgttaactaagtgtacatgcagtcttggacccttttattaacctatgccactaattggtgtccatgcatgagtgcgcaataaatgaaaagtaaacaatcatgattaattcgacaaaagtaacatataagaaaatacacctaatgaagtgccgagcgaagaatacacatggctttgtttttaagcctcaagacaacaaccccgtaagctaaattcaaattaagtccaattccttttctcaaacactattctatgtaacctcacctaaatcaaaggtactcattaaaatctctaaactatatgtagagtaactaaaactggaagaaactaagctaaatctagcactaaaacttaacgacctaatcaaggtctctgttactaaccattttccaatttttcatattttcgatttttttttagatttaattttaattattttctgaaaatagggactcgggccgggcccttgggcctggtctggatatgagccgcatactggtctcacaaatctgggttaatgggcaaaattcgggctattacatccaaatccatccaattccaactctactaagcccaattcagattatacctattttaagcccatttacccatggaagctactctagctcactttctcctccaactgcaccaagtccatctttaagcccaatttctattacaaatagattaaaccctaagcccacgccaaccctatcttattatttttttttttatcaattttttcctcttttcttacatctttcgtcaattattattattatttattcttctttcagccgatcgtcctcttcagagcaaacgagaatccaccagctcattcgaagttcaatacgttatccacatgacatgagcattatatctcttcatttatttgtataagaagaattgaatttgaatgctaacgggactggttggtagtagtagtctgtgctgaaattttattagactgaattagatcaggaattatttcactgacgtaccatagagacattacatcagatagtctgtgcaccaaatggattgaatctattcattaaattgaagcagtgttttcgtctaaaatcagtgtcggaacctcaaaaccattacaaatcatcaaattacagcctagatcatcagtgacattcacgaattacatgaacgtggttcagttatgcatctttccaaaacaggataggaaattaaatcaccttgtcaagggggagtt

SEQ ID NO: 9807 - DNA, 2533 bp, Eucalyptus grandis
  Intron number 5 from transcript Egrandis_v1_0.009736m (loc us Egrandis_v1_0.009736m.g) derived from phytozome v7.0 (c hr-ID scaffold_4; pos 30849301 to 30851833)
gtcgtacaaaggaggctgaagagttctggaagcaggttttcacctcatctttattttaaaggtttacttgtatttggggttgtttttgcttggtctgttaagtcttctctgctgctatttaattgagctaatatttggtagggccataatgataagttatagtgtgatgtttttttaatcattcaaacaaagcagcaagggcttaacagtcacaggatgcagtccattcaatataatgtagctgtttatctcttaaatgttttgatctaaacaaaaacccctaaaactgactttgtacctattaggcatttgaaatttaagaagcctgtggatgcaaaatggaaatgctttttaatgctttagccaatcgaaatttgttataatgacaatcaaagtagagcaggaacaagaattaagtactcaattatgatatcttgggagcttgaccattgacaacggcctagatactcaaactatcaaaatcttaattaagtgattataagtcagactactcatgggagttagactcaatctaaatcctgacctatatttattcaagacgagaaaccgatcttatgtcctcattaaaactgtactttagcagaagtttttagagtagtttccggttgaggcaaatgctccatctggagctgtattgacacatccctgtaagattctctgggaacagctagggcattcatgctctatctttgacctcttgacagtgaaataaattttatacttcttccttttccacccaattgctatcctcaaatgggcatttcctgtcaatgatttgtctttaatttaactaggtgacagtctatccaccaaatacgatcagttacttggatcatatattttaagcttgatttgagatttatttacatccgcctcaccacttttagacttttagacttgaggcccctcaataacgtacaaccttctttaatcttctggttgcgcctcacttgcctagacttctgttttccctacacaaagactacagttgtagtttgtgatatgcaatcggtattttgttacttgaagtttctgttttacattgtgaaagaaaaattttccatattaaaaatctcatctacaacttttggactgtgttctgtcttttctgccctcactcaaatatatgctctgcgtgaatgcgactgaatgatggacttggagagttgagttaaatgggggcaggagaaagcctaaaaagacatgaaaagaggctataaggaaagacatcttgatcatttggagcttatggacgattcgccataaaataaggtgaaaatggtgtaagaggatccatataattgatgccaactaaggcgcatttggtaacgcttctgttcccgaaggaataatttctgatcataaatgattattttttattctgatcccgggaacaatttctaagtattttaagacatttggtaactgttcaaaatttcaattcccagaatagaactgcttcaaggttgctagtcgccggccttgggatgaccggtgatcggccagacgagggccggtgacctcactagagcgtcgccggcccttggcaaggcctacctggccattggtgaggctcggccttgcccgatatggcgaggcccgcttggccaccagtgaggcttggcctgccggtggctggacgagcctccgacgagctcgttgtaccttgccctggcctggcaagcctccgacgagttcgctggactggtcgccggtgacagatggtagtgggcagcagacgacagatggcggcagatggcaatggcagcggcggcggcaattgaagaagaaaaaagatggaagaagaacaagaaaaaagaaaagaaaagagagaaaataggtgtttgattctagaatagttcccaggaacaaaaaatcaactttttttaacttctcgattctgttccaaatctacttatgagaacaaaaaaattataaatttgtttttgggaacaaattttttaccaaatgcatttctgttccaaatttactcccgggaacaaaagaatagaaattttcactgttgggcaaattaacaaataggcccttaatgggatgggacctatcatcattccatcgtcatagtagtagtagcaacagcccgacagctagcttgtccatccaggcccaccaaaccttacaattcgggcgagtctaggtgagcatagtcctttttgggcccagtcatttgatgaagataatataacattttcttaaatcactggtgggccaaggcaaggagtaccctaccagccatcctaggtttgcccatggatgaggtcttggtagtagtactagttgtacttctgagcctaaaaatgttgatgtttctcaatcatgataagaaagaatgcattctgtgtatactaagagatactatgtttgtctaaaatggtagaacctagaccatatgccaatttcaaatcattataaatttgtttgatttactcaaaatctctatgccgctttgtattgtaagctgttcatcttgtttcgcaggcaaccagaaact

SEQ ID NO: 9808 - DNA, 917 bp, Eucalyptus grandis
  Intron number 3 from transcript Egrandis_v1_0.032392m (loc us Egrandis_v1_0.032392m.g) derived from phytozome v7.0 (c hr-ID scaffold_1; pos 155373 to 156289)
gtgcaactgacggcaaaaagactatatctacctcggtatgctctctctctctctctctctctctctctatagcatgcgtgcgcacgcacacagagatgcgtgtgtacacgtgcatgcgatttgatcctttctaggattatttccttggtgcaatctgtaagttcaaccaaatgcaatctctggcatttctctgggtcagaaaagataggctgtgtcgtgcatggaatgtgctactaattatatttatatgtacacctgctccgttttgaccacccagttgagaactgcttaataacgaagttacattggattggaggacttttctaggcatgtaatgtggtttcaagcctttgtcctgggataacgattgtttgttcctctcagtgtgattactcagaagaagcaaatactatttagtttgtcctatcttgtatacttcttttcagatcaccaaatctggttagcaagttgtcataaattgttgggaatacccctgaattggaaagaaacaacacacaacacagcaaaactatttcaagatctaaatgctaatggaagattctttggatgtgattaatcctcttgaaataggagcaaaattctgtctgaggatcatatcataaacacaataaagagtgttgagagcagtaaatgcttgatggtttacgatgatctcttagaagagtactttcaatttccatccgtcaaactcttttttggggaatcaaaaaccagcattccttgagttctatgtgattttggatgacgctttcagttctccaaagagtagttagtagttcaagttacgttatcctttctatctctagtgaggagttgatgactgatattgctgttattgttgctattataatgtataaataggtaggagctaaagatcatcagcgttttcaagcttc

SEQ ID NO: 9809 - DNA, 3256 bp, Eucalyptus grandis
  Intron number 1 from transcript Egrandis_v1_0.006069m (loc us Egrandis_v1_0.006069m.g) derived from phytozome v7.0 (c hr-ID scaffold_5; pos 23197572 to 23200827)
ggtaattgctcatgttcccattgcttttctttttatagatgaacttttgctggataggcataggtatcttataatttttaaacaataagcatggagtcgcttcttacctggttcaactagttattgttgctcttttcatagtttgcattgcactggttgtcatatcttcctggtgataatatggactgaataaacccaagtttctacacatctagtggctcctttgagtaatcttgtgtggttttgtacgagcagatttgtgttaagtcttttttgtcttgatttgaagtttctttttcggaatgatgtctgggtttttgcagtttatctggacacacctcttattttctgcaattagttgacttttgttctcgtttagatatcgttcagtttaacggagcatacggaatttatttagtatagttgttcctctatggtggctctttttgccatttatcattgcagtacttggattggggcttaagtgagctcacagcttcacacaactaatctgaagtaactgatgggtttccaactgactgcttgttttcaatatcagacatacaaagtaactgttgccatgcttaatcttgaagaattgctgaaagatacgcccacactcatatgagcttccgtctggattgagtggagaaagataaagatttatcctactcattttagtgagctcatccggctcgctgctctttacagtaggttttcatcaacttaatatttctattcctcattgaaatttttgcaacttgtctcatttgaattagatgataattaaggactcccaatgtattcagtagttcatgtgagtcctttcgatgctatggttttgtttgtataacgagctgttgctatatatcacaatgtgtacttgacaagcgagatttcgatgtgctctggtgattaaaatgtgtcatatatgtgatgctgcttgtgtaagtgaaatctctacacatggttgtaggatttacttagtttctccaaaagtgaaaattactaaagagatttgtatcaaaatattattgaaatatgagaaatattgagattagaagtcaaagaatctgtaaaaacactcgtaagcagtcagctctaggctttttctgtttttatctgcttatgtttctaaattgatgtgctctattaaagtcccttttaattatctgaaagtagaactagctttgcgaaattatttccaaagattgataaaaatttggtaaaaatcaggcttcaaagtaattgttgaacttattaagatggtatgccatgatgaattaagaccttcggatgtcccagtgagaaggtgtgacgaatggatggagttatgggttagaagggcaggggaagacgtagaaagatgtggaaggagacaatgaggaaagatatatttaaagcttacctaggatgtaaatgaaggattgagcacaatagaataggattcatacacttgagattgcttagttgaataaagcttagttagttgatgttgttatatgaatgtgggaatctggtagtttggaatttcgaggggtctattctggaccgagagataacccttctctctctccctccctatgtgcagatgcacgtgtttgcttttgttgattttgttgtttttttttttttttttgggggggggggggggtgtgttgggtagagaagagttctgccagaatttagagtcaataatttacgtagtggttctctttaattcttttttagtgtaggcagcaaattcaactgatctgctaaatcagtatactccttcctggtgattacccttttgcaaattttaactttttcttgtgatattgcaaatgttttcttcctaaataacactaggctggaatttttctgaatgttatataagtgtctgattctatttctagcattggcttttcaatattttctgcttttggtattggaagttcaaaagcagttgatgagatttgagaatgttaacatgaatgaaataattctatcagtgatgaaaagggtgttccctctgtggtacagttgttttccttaagaaattgaattcaactgtgatatggtagtgcacccttaagaatcactgtaatagttggctctaggctactctattagtgcagtgagacatctacattagcaaaatgggcatctgcattgcatgtatatcatctaggtatggattatggttcttatctgcccaattcttgcttactccttcatgttggtaaataggctgacacccagagagtagttaaggatgtattcaaggctgcatttatggaaattcagttccttcttggttagttaagatattatgtgtcacgcatgaagaagatcaacttcctttgcaggagtgaagcttcacatttaagacagtcatcaagtatttcttgtgcttggaagttagaattgcttcagattattagcctaggtataagtttccatatattcaagcacttacctctaaggtgggagtcttcatattgtcttttccattagtgccatggttgtccttgttcgcttgccaacaacagaaggggttctaattatcttagtaatcagctttaaagaacttgtttatttctggtttgcttgcttaatgaccatgacgatgggattctaaagtcttaatttggtaccattctttcccttgttgcattggcctagcaagaacagctgtccttctttgtgaatgttttatactattctgactgatgcaaggggttattcatattcttggtagactttcatatattgcttagaagaagaaaaggctgttatgagtaatacctttttggatagtgtgggagaggaatgggagatggagaggcctgttaagggaaagaaaacagtataggcatagtttcccataggtgcttagcacttcgcgatgctgattttattggtaatttagtgaagatgcaggattgaatttttagcactctttcctcataaatgtttctctctggcattacatcttacagcctaaaaaaggagagggaggattatgccatcttgtagttgttaatgaaatttaattcagtttatccatataattcatctctctttttatggttataaaattaatgtataggacgtgctatgtctttaatatctcttggttgatttcccaatgctcaattttttgttttgctcaggtatgggatagttaatgttctgtcacatttgtaaattgcaatggataattaatatcaacatacttacttatatatcttttgttcttttctctgcagat

SEQ ID NO: 9810 - DNA, 1520 bp, Eucalyptus grandis
  Intron number 2 from transcript Egrandis_v1_0.000634m (loc us Egrandis_v1_0.000634m.g) derived from phytozome v7.0 (c hr-ID scaffold_6; pos 47910530 to 47912049 reverse strand)
gacttggtaagttgatcggtgattcctatctgtcatgtttgtattccattcaatgttctacatagtgaaaattcttgattctgaatgtcctgttcttaggttctgggaagtgatttttgtatttcacaaattttctaaagtcactctgctttcaatttccacatctaaaggctggtggcatgttttataatttatgttgtagtaagatcttgtatgtgatatagatggcaagaattcatgctaggcatgagacaaaatcagaatttaagtcattgtcgatatatcaatgaagctatttgaggaccatctgtcgatcagatttgtgattgtaggtagcggatagaaggtaaaattacctttgctaagttaaactgaaggatatttaagaatacatctattctcacattctataaatggtaagctctggagaagctgtagctatgcaccatggtcattactgaaacgattacttaccttcagaataagtacacatagaagaatacaaacgtgtttgggctcgttatcttattactaaactgaaaaaaaaaaaaattgaaagaattttatcaatcatttctgttgaaacgattactcttggtaccatcagcccattaatattatgtttgtaaaaagaggattagattgtgaaactacctttgctgatttgaactgaaggataactgggagaattatacacacgcccttgttgtgctgttatatccattatatgcaatatagaatctgtggctttctatctacagttatgttgcagggtaatcgaccagttttgtaagaactattactgggatactcttagaggaggatacgccagagcagaatgactaggttttgcaatatatattattaagtcaaaatgattacacctgctgaagattctaatttcagttatggctgtgggcatgttatcctgattacctcttttccggattttgttcaacttgcaatatttctatcttgaaaaaaattaaaaccatttttaagtctcaaaaccaatttaagtttgctacttgagtgattggtaatcaaaactatagatatgagtatgagctttataggattatattgtaaaaatctcttcttaaagcactcatttatatcagaacaaaggctgctgcagattgacaagtatgcttgaagcagagtcctcttttgccattgcatgatgtataccagaatttgagttgctatatatatacaaaacaaatcagaggccttgtttttgtagttttttcagattttacaatattgttaccattgtgtaggaaccactttttcctagattgttggtttttaactgtctgctcattcattttcccactcctaatgtatggcaataacatctatgtgcaaacaaatagctttaattacttctgtttctatcttcagaagatttagaatggtgcgaatgtgacctttttcttccaccctctctttgttttatttgcttgtgaaagggaactgcagagagttattgggatcttgcgacattcaaatctatt

SEQ ID NO: 9811 - DNA, 1740 bp, Eucalyptus grandis
  Intron number 5 from transcript Egrandis_v1_0.009803m (loc us Egrandis_v1_0.009803m.g) derived from phytozome v7.0 (c hr-ID scaffold_8; pos 5767954 to 5769693 reverse strand)
ggccacagagagagcccgggctgctttacaccctggtatgggcaatgtcatgctaatttataacgcattggtattaaataaatctagtgcagtagtgcaagatgtgctataattgcatatgttgtgtatttctttgtttttctcttttcccaatttattttttcagtcccatttgttgaaaatatttagcaccacttcagcagttactgtgatagatgccttcattacagtatcaaacagctcaatatgttattgtgaggtctatgcataaaggagccaaacttggtactttggctttaatatactataagcacggactcccatgtcactaatatgttattagaatccctgctgcagactaaatcttgatgggcataatctttttagcagttggtaattttcttattttttgtggaacttcgttaataagcttcagagtattactttatattaacctcatgttaaaaaagtgcagtttcatattttggttatggtttagttgatgggatttgttttgatcatatataaactgatcagaattttccatatttgtgtttgaggacatgattttcagaaagcggaagagaatagttttgtctttctgtattttagtgtaccttgtgttcagactcccagagatggcatatacatatttcatctcccattggagggattgtttgttttaacttctagaaagtgtgtgtatatacatctgctttttgaccaaaacaacaattactttcttcaaaatattttacatgactttattatcttgaatgtcaatactagtatttggacatcctagtttgtgcaacggaaagtgagtaaggcagatggcactgtagagctttaacttgcaggttgcatttaaagacttgaagagttcaactttgacagaattaatggacttcatagttagtaacttaaatccataattatgtgttttctttctaaaagtgatcaaatgcgccagtgagccagtgagctgccaatcatataactgacatgatctcaagttattgtctggttccagtaagatttaggactgacaatatgtgttatgtgttgtgttattatgaatgttaatttgtgtcgatatcattgtcattattaaaatagtacatatttttgtcaatgtgatcaaatataagtttttataggaaaatcttagaacgtgtcaagttgtatcaattggattgattgtgtccatatcatgttaggtttgagtttctatcagtaacttctctattatttccactgtgaatgactctgttcttgtttgacccatcacaattcattggtagctgaaagttattaggctcgtggcatgtgtatttgtttattgctccgctgaaatagtctctgaaatctagattgcaaatattacttagatgtaaaagtttcctttttagcaaaggtcctgactagggtaattgtggatgtttgtcgctgtagattccccccttttttttgcggtcactgtagattcaaggagacaaaatgtcagtggaaacaaccaggaaatgctagtttaagcgaaggataaatataatcagcatttcttttgttccccttatgctatgcatacccttgtttgtagtttaaatgactagtgcaagatttactttccccttctgttcttatccattaatcagattttttgctctgtgtcttgaatgcatgttactgcctctgtgagttttaacagttaatgttaaaaatgcatgcagagctgcaaac

SEQ ID NO: 9812 - DNA, 4816 bp, Eucalyptus grandis
  Intron number 1 from transcript Egrandis_v1_0.008267m (loc us Egrandis_v1_0.008267m.g) derived from phytozome v7.0 (c hr-ID scaffold_1; pos 8327953 to 8332768 reverse strand)
tattgatttcggattgtcgatattcttcaagccaggtaagatcttcaatttgctatttaatgcgcctcccctcccccggatgtagggccgttctcaattggaaagtagcattttttttttttcatatgccattgggagatctacatgagtaatgtagtatatgtttagcaataaacagcatctctgtcaatttttcgaaatagtcttggcagttaagaagaatacttcttccttgatttcattggatgaaaaaataatacttggaagattcttaccgacttctaggaagtcaagctcctcgaattgttggtctgatagctgtgtcgtcacgtgccaaatgatccgctattgtgcttttcgagatgattttatgtcgcaattgcaaatcttctgacaaatagctatgttatattttaaagtactacatgtctttcacaaagtgtggaaaactacagggatgctctcgatttggtatgttagagtgaagttggattgtatgggaatcccataggaatgtctttgatacggaaaagaatgaaaattctgatatgttcttgctgtggaggtttcagaatgaattggcatttcccttgccccatgaccttcgtggaacctagaaaccatactcggaaccactttggaacttgtcaattcctccacaagtagagtggtatctttttccctttggatctttatatcaataagtaaagtgtttatgcatttaatgtctgtcaacctcttaaacagaagttaatcactggattgagtatgtgttttttgttgattacaagaggatagaaccaataaaacaaattcagtcaaaagaataaacacgataacagcagaggtaaaactacagcaggattaacacacttgtatgatgtttgtccaattccaccttcgtaacattcatatctctaattctacttgtgtagtaattcagatagcataatgtcggatgttaatttagatatttggtagttgatactataatcatggtgattaaatgcacgtgcacacatttaagtgtagtaatcatattttaatgggtgtacattgggtacagagtaagtatgacctcaacatatcctacaccaacaatgcctataatatttggagttttgaacctaccctatgctctttattactcgtcctaaagtccaccaaaccatgaacctactaaatgtgtatcgcttatttgcctatacatccctacttggatgacccttcttgatgacattttaaaactgattctttctaggtggatccaattaggattatgtccacatcgtttaaccatgctgacatagaccttaaataccatgttgttaattgattctgtggtagcctatggtgcttggtacataaaaaaacgagattcttaagtgtgatactagccaagacattgacatgataactagatagtcatgtcaactaattagagtggttttgcatagaggatgcacggctcaatgtctagcattttattaggatctggtgggagctttctgattgattgcatatctacttattagtctttaacaacagataatgatcatattgcttatattgaactgattaatttgtttttggtgctttatttgtatcgagtcaaactggctttgatcaatgtctttcaaatggttttagtcatgcagcagagatcaaaagatataagatagaaattttggtgatgtgtaccaagcacctaaagtgtcttatatcaaaatttcaccttttgacccagctctggtgcatgctttgcatgtcaggaatcttcgtatggatagaattaaaaaacttgttgctaattggtggatgttgaatttttggaggagagagagtctccaaacaaatggtttcttgagatgtgaaacctgttaaaagcatgtcctggaaagaaaatggcaataggaaggaaaagaatgacttcttgcctggactttcattgttgagtatatctgatcaatctgaaccgttagactccattataactcctttggctgggccttgggaaaaggaactgtagtttctctcagtgtctctctggcttgaagtaatatagatgatattttttttttttttttggatttcataaaaaataaacatttgatcagatcatgaacttgacgtgactcatgatcccattctaataggattatgtttgaacttttctggataataaaaaaaatctgttttctatatgtcaatcaaacttgtagagatgagtaataaatctaattggatgccgggcttgaactttttcgtccatttgttctacccattccactgatttcttacagactgagctggaggtctctctgctatttctcttaggctatgttggggaaatgagataaaatggggggatgaaagttgggtggaaagaaaaggaaattttaaagtttttgtgtggagaaaaggagggaaattcaaaatttttatatttttctctccaatttttctttcctccgcatatccaaacatagcagtaaaagaaaaggaaatgtctgcttcacttaagctgtgctattcatcaaacttaaattccagcatgtccttcaactttcctaatttaactgctatttataagataatgactcttaaagtaccttaagtttggtgtcatacttgagctgtaccaaactaagttttgtctagagctttccgctgtgaattatctttgaagtatttcatgttggtgtcctatttgcctggtgtaggatgtctgaactgtagaaccctgatatttttatgagtccaaggagcaataactgtattgttccttagccatgctctcttaagaagatgcttcatatgtataccagtgcagctttgtatgtaatattcatttcactttccagcatatggtaggtacccagctagatacctatggttgggtatgccattgagttttattttgccttgttgatgtttaacatctctaccttcctgccaaaagtatgtgctggcatgcactttgcaataaatgttatttatatgggtttgccatgtttgtagtcgttaaatattttcaaaagatagaagagttgcaaatttttctgttacttgactcaaagagtttgcggagaattgtgctgcaagttataactacttgatgtcagaacctaactaggttgactttgatgagataaatgtattgcttgtgtcgcactgtgagtcttacttccttgtggtgggcaattgatcaggagaacttctacttatcagtgaagtttttactatagaatcatccaatttggttttctgggtcaaagagtaccctgaaaataaaaaatttgcttttgcaaaagttgagcattagcatatcgagaatattgatggagaaatgcttcctttgctatgggttaggtacttttgctcatcttttagattgtttctttatctagtcagagaaaacataactttggcataggtctcttctgaagataaatttgctactcctttcatatttgagtttcttcaaaaatttacctgcgacaggtaattgctgtctttgggattgatgcatcgttcttacatagtataaaggttactagagaactccatgtgttggacatgtgactttgcctcttttttttattacctttcccttgataaaatggggtatccgaatcttgcagttagactaatgccctcagataaatgcaagggcctctggtgttatcaaaaccctattgattggctccttgaaatagaagtggagttcttttgcactggttcttatattcactcttaaacctcaaaaaataatcagcataacttcagtcccaactgtcatgttgtatctctagataaatttctaatcctatcttcctcaagctggcttccatcttgcttctgcttgcttttgctagccttttcatctcccagttccttgttactttttttatatagcataacagcgtagatacaattgagttgtgtcatcggttgtatatttaggatatccccgtttctatctgggtttattgacattactttatctggtctgctatcaattatgcattgctgatttactgtggtactggggcaattgcgtcctgtaattttgtttcatttggttttacttttcttgtggtggattctgtgatattctgtttttgactttatgattggttgcattttgtaacgtttttttgcagattacagtgtatagattctaaagtcaacgatataatttctgatagattgacctatttttatgaagtcatcgatattctagagatcttttctgattttctatgatgaagatcatgaaactacccattctccttgcatctagggatattgtcatgcaggaatttcagttcttcaaaactgaacctgccctcagccaaattagttcttttgagtttggttcaatcttcaaagtttttggcttgggagtggattggcgttttcttcatctaattgagtaatagtattttttttttttttttgggtcggagagtaacatcaattaaaatgttgaaaaagttgatctcaccaaaaagtctcctccagtgatttcactctctgcccgatctctatccccattttcttattaattagatttgaatgcaacaacatggtggttaatttaaaaggatatgattgctgaacttgtcaagctatggacaacttagaaagcccttcaattcgaacttgcctagattttcgtgaaccttccatttattgtagttgtttgaaatagacttgttctttattgtagtttgaaatagacttgttctagacattcctaattcctaatattccaggtgagaagttctcagaaatcgttgggagtccttat

SEQ ID NO: 9813 - DNA, 2099 bp, Eucalyptus grandis
  Intron number 4 from transcript Egrandis_v1_0.002460m (loc us Egrandis_v1_0.002460m.g) derived from phytozome v7.0 (c hr-ID scaffold_3; pos 48099326 to 48101424 reverse strand)
ggctttccaggctgcccttaatcgtgatatcggaggtgatgcatcaacttctcgaccatcatcatctgataaaggtgttgttggctttaagtttttgctgtctggggattaggaatctctttttgggtagtgtttgatgcgaactcttaggttatcaggatgttgctgcatatcgggtctatgtgataataaaacgtagttagttcagagaggacatatattgtttttgtctctgtcacaccacattgaaagtttttaacttttaacaagtcaagtttttgttggcttggaatagcatgaagatttttccatgccattcaaggaaattgcttgcaaattttagtaatcgatctaattactgctgaatgtttggacctttatgcctggtttgatgtagatggggctttagattaaatttgaaacttaagtctagcgacatctggatcctagtctctttgttgattccttagaatagtgttgacctttcgttcaagtaatcaggtccttggtcatgactactgagtttacgtggaaccagagttaggcttcttcagatgctgtttgtgaggataagacaggagcaaatgatattcagtctaacgagccaattccgatggatttcatttatgttatggaatcttggtacatcatattcttgcatgactctagagaagttagattatggcctattgaatgggctgcgagattgaagggcaattaggctgttgaagattttgatgaacccaactttgtttggcctatatcaatccttagttccaatttgtcgggaatgcattagttcaattatgtctgaatgtaaattagagccaatcgagaaattatcatataatagcacatgaggatgagcatgatgatatgattctttggtgttttatcctattctcgattttggatttccttgctgaagccataaacatgcaaagcctctaatacaacagggagcatttctcttcttttttttttttttttttttggggggggggggggggggggtgagcaatcttctgtgatgaggaggataagtaggttgatattcattaccataactaagagattgtccaggggactcttacctctctgcattttgtccaacttgctgcttggcatcaaaagcccatcaaaaagccagcttattagagtcaaaagtgatgctgcaggaaaaaattgtcctctccaatccctagcctttgtccaatgccttttctatttgcatatagatgaatgtaagtgtgaaatgtaggagtattatgtattttagtagagcaacaaaattgtcatttgaaagcgtagactgcttttcaaccgtgagcattactgttccatgtctatgccttccaaagaagataagcactatgtgaatagagtttttaagctttaattatgttgttgtcattgagatgatgtattggcatcatttattgtcttctttggttgttacaaggtacttctttaatggattttaatgcaccctttgggtgtatataacaaagtttgcttatgaggcttgtgtatgaaaggataattagaccatttaagatgggcgattggttcttggacattatggttggatcactaaagaaatatgtagatgtgatgaggtttgagctttaaatggagctcagttgtgaaatcttctttaggatttaatcttaatgtctgaaagtgatgagaagccattttgttacaatgaaaaataaggttagaaaagaagacaattattcgtagtttcaaagcttgtggtgtgctgtgcttttgggtaatacttttagccagcagtatgtggatgcagtgtttggcagtgtcagctgtaagaagtttactatacttcgttcgctacatgaagtatgtgtccaatgaatggacatattcacttggcatgcttattgctttggtgtaatatcggacgaatgcaaacaaaagtagaatcttggtcagtatgtatactggagagcagctatctaagtcacgttgatcactccctcccttctctctgtttttgggctgccaatcttatatcttttgcctaaaagggtcttactcttaatcaaatttcaggtgtctctcaaggagacaaccat

SEQ ID NO: 9814 - DNA, 2028 bp, Eucalyptus grandis
  Intron number 1 from transcript Egrandis_v1_0.044729m (loc us Egrandis_v1_0.044729m.g) derived from phytozome v7.0 (c hr-ID scaffold_9; pos 22078360 to 22080387)
tggacacgcttgatttggcagtcctcagtatatttatgggctttttgtgttgcttcttgatggtgggtttgatttcttcttttggatattagtaggttttgggaggagtttttaatttgtgtttctagcttctgtagctgatgatcgtgtggttctgccgactatagctttaagcatcttgaaaattgttctccgttgagtgataatttgcactgaccttcgtcttgtgaacttcattgcctcacaggtctcactcgtaaagcaaagtttgttaacttcaataatttcttttgtggccaagaaattagaagcttaattgaaaggcaaaaagtcttgttaatcagagtagaccagtttttatacagtggagaaagacattgaagttaattagagttgatttaagggtctctgttcttacttttcatatcctgagctttcccattagttttggttccttctttgctgttcatttgcgttaaattttcatcttcattgaggtatcactatgttatgctctgtcttgtaaaattctgatgatctttggtttctccttcttttggtcctgctttgcttattgatgttccaagggataataatatcacagttttgtccctcagttgagtttcttgcagcatgctgatcacttatatgttatgcatgctaagttatccaaaaacatagtcttgacttagtcttgacatgctttttctacgaagttatgaaatatttggaatagcatgattacatcaatacatcttattgggctaactgctttaagagtgcttggcattggatacttaggtagcagattttgtcttaatttatgcaacatctgagctagataacaattaactgaaattgtattgggtcttaacaataaccaatggtttttgcgtcatttgtcatctattgggctgctgatagtttacatggttgcagcattcagcctgcatttgatacaacttgcgattaaaacatagtgatattgtccaaccaattctttgagaatgatagactacttcctgcagctgaagtaatggagtcttttacatattcccaagggtatgagaagggtgttgttcagaaccctaaatgctaacaggtaaacttctgttcctaggaatcctttttgggtcatggtcagctgaactaatttgatgttgtcatattgttgtaaaccgcattacccattcatgtgctattggagcactgaactgggtatcttaatataatctggtattactgagtgtgatgatcagaaggacaaagcttgatctgtgctctgtttcattctcaaatggcttatgtacaaaaaagagttcgacacaaactatgtgggattcatgaagcaaaatggtggtagagaacatagacattaaacttgtaggtaggatttgtccctctttactaaagtactattctaatgcaaattttagtgagaaggttaattttcttttgatggtgttttgcttcattatcatcttatcttcttgcttcattatcatcttattttcacctttttacagagactcactgctttacagggtatttcatgatgtttcctaatcatcaccccgaaacaatgctaggatctatttctctgttgggcagctatcttttctatcaccaccaattttcacttgcagcttcactacaagcaaatgttatttctcttgggcatgacaagaaatgcctactctttcatcttattgattttctccctgatgacacaagttgcggtatggtgctgtaatatccatcaacatgaatacatgatattctgttgacttttaaagacatgcatgtgtaagaaaatgcttgagcatacgtttctataaggctgttgagctttactgaaggttcttttattttctgaacctacctcttgaacattagtgcatcttgaccatctattttctttcttgttctgcaacttgtagattattgcatctgagattgagatgcactcttgcatgatgcagtctgtgctatgaaatgcaggaattgattacctgtctgttgctgcag

SEQ ID NO: 9815 - DNA, 3882 bp, Eucalyptus grandis
  Intron number 3 from transcript Egrandis_v1_0.043806m (loc us Egrandis_v1_0.043806m.g) derived from phytozome v7.0 (c hr-ID scaffold_8; pos 31350698 to 31354579)
gaactcctgataaagctcgcattcttgctgaacgggtaccttttctttctttcgattgcagaaatcttttcatcagcatatatgtaggaagccctggagttagtatgagtgtgattcatccatacagatataacaagactatgtatgatgtttgtacttataaaatacacattatcatggcaccataaatgaatgatgagaaaaatatttctgtttttggaatattcttttggtcagatattcctttgcttccgtaaatatttcactagcaacatgctgaatagtggcccttcataagcttgatgaatatctaatttgagataattagcaaagaatgacttccaggttaatttgtccatcatcttaaggttagttattgacatcttttaaatgaaatcatgcctgttgtcatctgaatatagagaatcaaaattataatgaggacatcgatgttattaagctaagaatttgatctcactcatgcttcagcatatggggcttcatttgttctgcagttcaagatttgaggtcatttgaaacattttgatgactcatgtaccacatgagcatccttttactgaaaattacatgaaagacctgaatttttgtcgggcttcaataaatgaactttgaaattgaaaagctgcaaatgagacattagcattatccaaacattgatgtgaaccctactgtgggacaaccatcgcttcttacctttaaattcatctaacacgtatgacatctctactttactcaacagaaagaagtccagctcatgagctaggatgtcttcagaaacaaaatagactgaagaaatctttctttttaaacccctaagttacttcttatcgcttccgcttgttcaatttagaccttaggtttgcttgtaaagaggttgacttcttttctaccaagtagatggacacttcatgcctcttgcaagtgttttagacaatagactttcatgcttcttgaaagtgttttaaactaaagattggacgtacgaaagtgaggaaatctattgtagccagttccgtacattcgatgaatacaatgaattccttcataagaggaatacatccctggggaaaatgttggtctagtggaacaacagggtccttcttataacattgtaaagtagaaggtctaatctgaaattcatccacttggttacaagcccatgttactgaattcagagattttgaccatatattgaaagcttaagaaaaaatttaaaataagagattttaactaatttttactctaatccaccagtgggcagttgtgatggttcagggcttgctccttatcgccgaggtcgcaagttcgaatctccaggttctagcgtcttaagtggggagccatggtggtagggtcatgtgctagtctcccccaaggtataggggcccggccctttggtgccgtctgggcacaggggggcccatgatggagtcctcagttaccaaaaaaaaaaaaaaaaaaactaacttttactctaaaaaccaacagtgatctgtgaacaagttaaaattagcaattaaccatcaatatcactgaaaattttggaggggtcaaattcagaggcagaaactggcaaaacagtggatttgagattaaagagggcctctaccacttttcactgttggcaacacgatgtggggggctttgaatgagcttggattgtattttcaggcctgtaactttatgggttcaaaagtatggcctgatcaaaattggagtgtgcaaacttcctttgtttaaatgaaattggtagaatttgatcactattctgttgatttgtttataattacacatttggattcatataatgtaagaaaagaagactctttttcagggaaaaaaaagggccgatcttttttatcaattggggtggcccccctgcctgcccggccgtgcagacaccaagtgaggttgcattattaccttatattagtgcagctgtatgaactttacccagcttacatgttaagacatagttcaagcctgtgagtttgccatttgacatgactgcccgggcccaagtcaatccaaagcgtgctcgaattaattgctcttaaaacttctctattgtgctgctattatttttcagaatgaaggaacagataactagtttcagatttccacatgttcagataaaatttgtcccggaaaatttagcagtctctttttgcttagcaagggttaacagagaagttagaggcactgtgcataattgattgaaagatacacatttcctgaacatgtggataactgttgcacaaatgtttagcttgccccaactagtaaaaaacttttgcacaaataatttagcttgcttgactaagaaagaattataaatccgtccttgaacctaagaaagcatgtgccctgtaaattgttataggtctacatcttgtctcttttctttctcttcttcctggttaatctgtgtgatgcctgagcaaaatataataggagaggtttatgctaagtacaatgtcttcatttgtctctcattcattctcttctaaggttaatgctccttctaaaaatgtggctcccatgtgattgacgttctttgattattcttatcagtggcagagcaaggggtttttgcaattgggggcaaagaaaaaaggataaatttatttcattgaataagaaagtaaatacacattaaaagttaatattgtatttttgcccccaatttttaaagttgatattttcgtccatgaattttttatggtcaatattgcattaaatatgggtcataactcttgtgcatgaccaagttgaatcataatataattagttttcgaatggaagcgaaccaagaatatctttgaatttcaactactaagagttgtataaaatgcatagtagcaatagaagttcaaaccacattaaaactcaagccataacttttgcagttgattgaactaaatcaccatataactgcataatccacctaaagaatccaaaactaacccaaaaatacccttgaaacttaagtcacatgcaagaatggcaattgaattgaagttaatgatagttagttcgtactttcagaagcaatgaagaagcctatggattaaacttctcaatcttcaccaaatctttttcggattgagcatctgaattgtcaattgggttataatttggattgttggtttctattaattcgccagtatcatatttattgttggaaaatatagtggcgtcaatggctattaaaatggcgggatcaaataggtaaatagcaaaaagttcatagttattgaaaacaaatttatgttgagtgggttcatctcaacaacatgaagagctgccattgattcttatgtaatgaatgttggacatccgattttaccattggtatgtggcatcctttctcatttgggcggaatggaagtgacccttagtaatcatgtatttgcattgagacgcttattctctttagttcctttttgagaataacctaaaatgacacatcagagccgagcctctacccttaagctcgaatgctatatggttagctttatcttaagaaagctagtttggttgaaacattttctagttacaccatgttctttggattctttccctcacctaattcatgacattacgagtattctgctagcatgctgtgtttgatttgccagtcttatgtggatcggctatttttagacgcttaaagagtgaagagcagtagacttttggacatgccttgggagaatgcaactttcattgatcaacaggagaatgtcaactctgtctactttctttattttaatattctgtgatttgcctggcatatactccagatgattatctcagctgacctacttttcctcgtgtcacaactctcagttaccatttccg

SEQ ID NO: 9816 - DNA, 2661 bp, Eucalyptus grandis
  Intron number 3 from transcript Egrandis_v1_0.047854m (loc us Egrandis_v1_0.047854m.g) derived from phytozome v7.0 (c hr-ID scaffold_3; pos 78848136 to 78850796)
ttgtggcattccttggggtggtcctttttctttacttaaactcgtactatcaacatgtgctgttcgagcttgtttgtaagttcatcccatcgtttccccattagagattgttcttctaagcattctgtaatggaaaaaataatgaaatggtgaagaaattttctttaatagaattgtaggcatttgagtctttatcatgcattttgaatgcttgactcctagagtgttcctgttgtattccttatcatgctaattataatataaagacatttttatttggctataaattgagagaaagtagtttagttcacaagcgcaatgtatctagcatcgacaaattcctataaatgttacccaagacataaattatttaatggttgctaccagcaatatcaaaacaaccagattttagtgtctcaacaagatcctactaacgtaaaggactgggcacgggggaattgctccaatttgacaataaaggcttgcattgcaggaccactacccagcagcctgagtccgcttttgtgcttactccttgatgaagatttatagcaagagaactaagcttatccaatacttaatgcaaaattgcttgaagaataagttcgactctactagcagaattttaagagcgattgtcttctgcatatgtatcaactcaaggtgcatttgtttcacgaaaaactcaatgatataggaaaaagttttttgataaaatattttttaagaatataattaattttcttttgtttggtggtatatgatcgaaaatgatttttgttgtttggatatcattggaaaataatttcaatctaatgacttaatttcatgaaaaaaaaagttcagatttttacatttaaaaaaaatcgaatttttaattttttaatttctctttttttattttctttttagaaatggaattttaattatttttaaacttttctcttttcttttttcttttttcttttctttccttttctttttctcccttcctccgccactactggtcgacgatggccaaagctttggctcgtcgagaccaagtgagccacaagcttgctagcctcgacagagcccgagctagccaagatcgggcaagctgtgagctcatcagccttggccgagcttgggctcgcttggattggcaaagcctggagctcgttagtcagcatcttggctaatcgtcgctggtggaggaagaagagggaagaaggaggaagaagaaggaagaaaaataaaataaaataataaaaatgaattgaaattttttaaattaattaaaaatctgattttttaaaattatttttataagaataaacttttcattaaccaaggaccctaagactaggaaaaaattttggaaaatgttttctggttttttcaaaggggaaatcattttctggaatttaagttttggtaggaaaacatttttcgttgactttgactaggcaaacattttccattaactcatttttctaaacgagccaaacgtcggaaaatgaggaaaatctttcccaaaaattttttccgcaaaacaaactcacctaatgattgtgccagcgattctttttccatcaccttaatgtcttttcaaactaaaccaacgtggaagatttgtcaagggtcgccctagtcacgccttttatccagaagatatctgggtcgagctatggaaaaaaaactgagcacataatgctgagctacatatatttgaggcaatgaagtaatgcaacagttcaacagaaaaacatgaagtgttcttcgctagtgtgcatgtagagttcagtggtgatgatataggctattgcaaaaataatgcgattctcgtcaagttaaactcactggcaacaaccgaccaaaaaaaaaaaaaaaactcactggcaacaacttgttgggtgctttttatttgccaaccaagtcgaatcttgtccatatgtgttggttcaatgcatctgccaaaaggatcaaaggagcaattccatcttaaattgattccatccttccaaatttgttgtatctgaacttatcaaggaactcgataggaggaaaaatccctccatcaatagacgatatgaagtcgttgatgaccttagatttgtcgaataatggcttcattgggcagatgccagagccaccagccataggttgtatctccctatctttactcaacatgtcaggcaacaacttgcgtggccaaatgctaccaagactactaacttgataaggttgaaatatatctctaaaagacaaccaattcaccgagatatgtcacctggcattttggatagctaagatttaaggattttggatctaagtaataatttattgtctggaccaataccaaattggaatggagatatccaatttctggaatttctgatgttgtcagaaacttatatcattgagcttctacagattgaattctctcgttgttttatactttggactaacaaatttcagtccaaacataccctgttgtgccaatgttacatttatgagattctttcatctacaaattcatgagcttactgggccttttccttagtttctttctagagcttcgtccatcgtcacatcgtatctacgggagatgcctaactggattagtttgccttggaacttgaagtttcttctactggaacgaaaccacttcgaaggttc

SEQ ID NO: 9817 - DNA, 7630 bp, Eucalyptus grandis
  Intron number 1 from transcript Egrandis_v1_0.012377m (loc us Egrandis_v1_0.012377m.g) derived from phytozome v7.0 (c hr-ID scaffold_10; pos 28891868 to 28899497)
gttcccccgttaagaagtacggcgacagtcaccacgtgagtcctctctctctctctctctctcatacgtggctcttcttccgcccgtgacctcagctctcattcttgacctcaaaatctatggccgatcctattctcgtaacccacctatcgaaaataaaattaaaaaattaaaaaaaaaattccgtaatttttgctaattatcagctttcgtttcttgcccccataattagcacacggcggcgtgggccacggcaaaggtgatgggagaaatttaaaggtgaagcgctcgtaactcacttaaaaaagaaaaaggagataaataggcttctttgtttgattcacttaatttcaccttaaacttgttacatgacctttccaattttcaatagatatagctaatatttcagaagagatgaatctctagaaacttacaaaataatcatcacatttctcaatatctcattatattttatcatatctcataatatctcatcatatatctagaaattatcattacaccacgatcagactcattaaaagtgacgtagtaattatgactcttcttcaatgtggatactaaacagtctttagtatcaattttgggatgttggtgtggaagtatcggcaactcaatagtcttggtattgaagtatcggcatcattaaatttggtttaatttctaacactcccccttaaaccaaattatcttccatcaatcagtccaagcaggttcttgtacttttcgaaagcatcgatcttgagaggtttggtaaaaatgtccgctacttgatttaacatttcaacctcattcccttttaacttgttctcaaatgaagtgatatcaaacatcgatatgtttgtttcgttcatgaaaaattagatttttcgccaatgcgatagcaagaatattatcaacaaaaatctcacttgctttcttatgctttataaaaatatctttgagtagttttttcaatcatattgcatgacaaacacatgaggatgtagctacatatttagcttcatatgttgacaaagtgacattaggttgcttctttgatgaccacgtgaatgtaatgtcacacaagaaaaatacaaagcctgtagtgctctttcgatcatcaatatctccaccacaatcactatcaaaataaggtctaagttggaaggattcatggcgatagtagtgtaggccatgagaagaagtacctttgatataccgaagtattctctttgcaactttaaaatgaaaggactccggcttctctatatatcaactcacaattccaacattatacataatatccggtcttgtgtatgtcaagtatttcaaacttctaatcaagcttttataacgtgttgaatcaacatcgacaccattatcaaacttcaaaagcttggttccgcactccattggtgtattaaccaaagtacaattcttcatgttgagtttttcaaggatactttttgcatattctttttgggaaataaaaatctttttgacactttgcttcacttttatcccaaggaaataattcataagaacattatcggtcatatcgaattctttcaccatcgatgccttaaaagcatctatcaacgccggattatttcctgtaaaaacaaggtcatcgatatataaataggtgagtaaaaaatcacatttttcttacttcaaatagagtgcatgctcgtatgaacattgtaagaatccattcaccttaaaatatgtatcaattttggaattatgctctcggtacttgtttaggcccatataaaactttcttcaacttcaacactttgttttcctgacctttcacaataaatctctcgggtcattcgacatagatttcttcttcaaggatgtcattcaaaaatactgatttgacatccatttgataaatttgccaatcattttaaggagcaattgaaatggtcaatctaattgtttccatacgcataactagagcatcatagtcgattccggctttttgcttgtagcatttcgtgactaatctagccttgtatcttgttgttgctcctttctccattcttgttctttttggccttgtacaaccatttgactccaattgatttcttgtccattggaagatcagcaagtcccatgtttgattcttttcaatggcatcaatttcttcatgtatggtttttctccacttttcttctttagccgcatcattatagacaagtggttcacaatctacaagaagaaatacaaggtgaaactcatcaatagcttcataaatattggataatctacaagaagaaatacaaggtgaaactcatcagtagcttcatattggataatcttcacactagcggttcatcgacatcatttaaagaggtcgatgatgattaacttaaagaagatattggagaagaaggtgaagaatgatcttttaactctgtttgattgattttactaggagcattcacttcatcttttaggttatcttcccatatgccatcttcatcaaacttgacatttctatttatatacactttcaaagtattatgatcaaataatcaataggctttggaagaggagtcatacccaataaggatgagctttttgctcttgtcttctagcttcaatcttttctggtctgggacatgaaatgctctcaaaaacccttaagtgtgaaacacttggtgttctcttggcccatgcttcttgtggagttccaccttcaagtctgaatgtaggatatcaattttgaagatagatagcacacgtaacaacttcaacccaaatctccttgggtaaaatttactcttcaacatgcttccaaccatgtcaagaatggttctatttttctgttcaactacaccatgtttttttaggaaaatacgaagccattaagaaatgcttaataccatgatcctcacaaaatttgttgaatatggttaaggtgaattctccatcacgattggtctttatagctttgataaaatagtcactctactttttagccaagttcttgaattgtttgaacatatcaaacacttttgtcttttctttcaaaaaatacacctaagttttgaagtaaaatcatcaataaaagtaaaaaatattgatgattaccatatgaatgaggagtgattgggtcacatacatcagaatgtatcaactcaagcagcttctccgcttgataagtcgcttcctttagaaagctagttctagaatgcttactgataatacacccttcacataattgattatgtggtaggccataaaccatcttctcatgataaatcaaattaagtctgctaaaatcgagatggctgaactacaaatgccacaaccatgaaggatcacccacgcacgccctcaggcatggagacatttcattctttatattgagagttaacatcctattattcgacatctttacatttgcaattagtttattgttcttgtctctaagcacaagacaaaaatctttcatatgagcagtgtagcctttctccagaagctattccaaactcaaattagtacttgatattttcgtgacataataaacattagtaataaaccgatgcgcaccattcttcaaatgaattagaattgtaaatttgccttcaacaagaattttagaattatcactagaccatactttccccttagttgtctcatctaactcggcaaacatctcctttcgcccgcacatgtggttgctcacaccaatatccaaatatcacatatcattttgttatccttcttcatcatctttgaatgccagtaagagaacttgatcggcatcattcattaaatttgccttttcatctgttccgttactctccttgttccattagttagaagtataatggccaaatttattgcaatgataacttcgaatttagatttttcataccattggcccgttgaattctttcctcttccatgaacatccctttgatacttatatctaccgccactttgtgcagcatctcctttactttgtccacgacctcttcatagaaagcgacctcagcctcaatcatgatcacgattttggtttgtctcgcgagtttgtgcgactctcttctttgctcctcatcttggatggttagtcacatttggagaacttcctccactggtgtaatccatttttttttcctaaacctttcttcatgggcttgtaatgaacccataagctcattgatcaccgaccaaaaaaaaaaaaagaagctcattgatcgtcatgacatccaagtctttggattcttcgatgacaatagcaatgtggtcatacttcttgtctaaggaccgaggtattttctttacaacacaaacatctgaaacatcttctccatttttttcatctagtcgacaatcgccaaaactcttgtaaaataatcaacaattgatttagattcttttatatgaaatacctcgaatttgcctctcaacgtttgaaggcgaatcttctaaactttctatactccttaacatgtgtttcaaagaatctcctatgcctctttagcagcgatggtgttcgacaccttttcaaacacagaatcatctaaggcttgatagatgattgacatggcatgttgatttttcattcgaaccttctccaaggcattcctttggtttcgtttcaaagtaacttcatcctcaggcttatcataaccaatgttgacaagttcccacatactgtaggtgtcgagtatagttttcattctaacggctcaattaccataattgtctttggtaaaatgaagatattgaagaggaaattgattatttgatgaggctatgatcacataccgtaagctccgataccaatttgatgggagaaatttgaaatttaaacgcttgcaactcactcaaaaaagagaatgagatagataggcttttttgtttaacgcactttatttcaccttaacgaaaactattacaagactatcctatttatagacttattacacagcctttgctcttcctaataaatatagttagcatttcggagaagttgaatctctagaaatttacaaaataatcattatatctcatcatatttcatcatatctcattatatctctagaaataatctttatatctagaaatatgaacagactcattaaaaataacgcaataattacgactcttcttcaatgtaagtaccaaacaatcttcggtatcaattttgagatctcgatgtcaaagtattggtaactcgatcgtctccgtattgaagtatcagcacgatgaatttggtttaatttctaccgggagggatggacttctgagctgcgcctctattagacttttgccgttaccgtgtgaggcgctgagattgatttacgagattcatccgtagggctacatggcggcttttcattgggcccgcgagttgactcgcttttttaatgctcattcgtgctttctcacttgactgagtgaacggattttcgtatgagtacgtccccgctgctttagcttaaaaaaagaagccaaaacttagtttatgctattttgtcaaaattcaagatttcaaaaattatgaattttcttttttggggctaatctccatgtcaatatacgcattcctttttaaagattttaacatttcacattaataatacattaaatttattttctcgaaatcgttaaacctcaacttgttcttacatattggaaacgtttcatatttttaagtattatgttccgtttattaaacagggaagaatgatttggaaggaatttttctaaaaatgatcactttagttaatgaaaaaaatagtaaatcataggaaaaagaagcctttagaatcatccccttgtggcagttttacaaagtacaataatatcaatatttccaaaactcccatagctcatagaaaagccatggggcatgactcttgcattattggtactatgtactcttcgaatcatgtcggtaccatcacggtccatctagaaaaatgattcatcgatgcatggctctaagggtagaaatgattttgtaaaaagacaccataattattgtacttttttgtatgacatcatccaccaatcaccctattgtcataatttttttaatcagttttttaagggtcataacttttcaaaaaaacattcatcacaagtgtcatgactcaagattttgcatttggaaaggtttttctcttttagaagtaaatgatcgattgaaaactcataacatcaaagtaagcatattaaagttatgacatttaattgtgtctctttccaaatgagttttaacatagcacgtcccattgcatgtctttaaaaccaggctttttccttctttttttaatgttaagtatgctgcctacagttaaagattttagcttatatcaacgagagaaacatgtgaggttcactcctccacgtggcttagtggtcataatccaatcaacttggacacatggttgacaattttccttgtttctttttattaattttttgaatattcgatctttacttcaaggcacgttaccggacgtggtccatcatcagatttacgttttgtttaaattagattcgaaacggtaaagatcaaaggtctccagttttttgcaaaattgttcgaattcaatgaatcgtttggaaagagaatgccatttttaataaggccactcttgcgttttgctttgactatgtgacttcgtagttgtgaccaccacaacgaataattatttggcaactcgaatatttgcatgtcatcgatacttaaaaaaaaattatatgttgtcaattaacatcaagagaaattatccaaaaaatcagaaatttattagatgaaggccaattcaatactaaattttttggtttttttttatacaatttggtctttaatattttagcaattcaccaatatagtccttttggccaactttgattgaaaattgccaacgtgaaagctccatccaatgtggcttggttgaccggcattgacgtggactgcccatcattgatttcgggccaaaattgattgaaataactaaatttgaagatcatcacaagacaaaattgaaaattgttgggtttgaattaattgccatataatatgtttaaggctttttgggcaatttatccagctaacatcatgtgaacatcccaccattagaaaacccaataaaaaaaaacttacaattataggtagagagagattatatatatatatatataaagaatatccatagtcaatggacatgaaaatcggatcacataaaatttgactagcagggtggaggcacacgcaaaagggtagaacctttgatgctgtatgggaaagttcaacccaaaaagcttaaatccataggtcgagagaggccatatgtgtataaaaaacatatgaactctattaacaaaggaagtgggatatttacatatgcatgatgtcgaatttaggattcagttcaaatgctatgattggcaggctcgtttgcaaatatcccactgttactttgggagcaaaatgctgctacttttttgtttagtgattctagtttcgggtaaatgcaaatgagacagcaactttttttttttcatcctaaagcaagatctaaagtagaacaaatgcttcgtgatcaatcacgcagattgaggagaaactagcgaagcagaaggaaatcga

SEQ ID NO: 9818 - DNA, 1833 bp, Eucalyptus grandis
  Intron number 2 from transcript Egrandis_v1_0.007756m (loc us Egrandis_v1_0.007563m.g) derived from phytozome v7.0 (c hr-ID scaffold_4; pos 40679520 to 40681352 reverse strand)
aagttctcgaaacgcgacgcagaagcttatccaaggtttgaactctgcttctcagcatttgagtgtttgtttggtaatatcatcctttacaacgacctttctgtcgagctgttctttcgggttatgtgtataggaaactgttcgtgttctttctgctgaaaacatgaaaaaccatacttgtcggatttctttactctttattgattttttttttcttttcgtaattttactgttatttggaaaatagatgcaaagataatgactagtcttcaatattcatctaaatcatccaataaagattttttttttctccatagtttcgaggaatgacagccattaactgatggaaggagagttttatggtcccataggtgttttaatgggatcactcccacattctggagaaaaaggggaaaactgcggtccatcatatctgctttgcataatcagttgtctgtcctaaggtattcacgttaaaaggaaagttagggacgcaaaggggatcaaaacttacacttgataatgaaaagttacaacaggtaaggcaaatcactgacacataggttgcaaaaatttacaaagtgtaaaggaaaattatgatcaaaatcacatacaaataataacacaaatatattattaatgttaggtagattactattttgtgtaatattacagatcataggacccagaaaacttattcctcaaggggagattacgccctctaaagaaaagttacaaaatgatattttattgatatattaatgtcagtgaagacaattatgtatgtcaaaggaaagttacattccatttgttaatttactgatgataagaaaagattttacaattaacttaggcagattggtatttttttagtggaatattatgaagataagatccacagaacttacaatgacaaaagggaaattacgttctgtaaagaaaaagttattcaatgatatgtaataagtaaattactatagtgaggaaaattacaatcgattaggcgggatcccatccatttttcttatactggagtgtagaaggacccagtgatacagatcattgaatcaaaaaatgctttttgagaaacaaagtttcaagaactctctcaaagggtaatctgatctaccaggtttgcatgttgcttggtagtttgcatgaaatggacaatggtctaataacctcttccctttcttttccgtttcatttgttcgtcttcttttttcttgggcaatctggcgattaagcttgtttggagtgtaatctactgtacattccgcaccattcagcttttgttagtatgtaagattctgcttagtttaagtggttccaatcattccatatgctatagacctaacattaaattgaaaactcagggtttccatattatctgtgtttctggatattctgtaagttatctaatttaaatgaaattgttttggtagtcttatgaaacatttctttaaatcatgtcaaacaattgcccttaataagatatcttttggtcgtcttacttagaaaaaaatgaaacatttccttaaattgtgtcaaacaattgcctttaataagatatcaacgtagtgaaaaataggaggagaatagtgctgataaatgaatgctcagctgcctgttaagttgcctttcgaaagtcaacactgattacatatattctagaggtattaacatcaatatatatataattgaattgactgctattttcgatgaacatgtgagtgtaagtgcttttctcttactattgttctcacaacatgagtgctttgtctttgcctttgtaaattgttatcatgacaacttaaagtattttgcacagat

SEQ ID NO: 9819 - DNA, 7239 bp, Eucalyptus grandis
  Intron number 1 from transcript Egrandis_v1_0.016269m (loc us Egrandis_v1_0.016269m.g) derived from phytozome v7.0 (c hr-ID scaffold_11; pos 41527460 to 41534698 reverse strand )
gccctagacctagaggctgttcctcctatttgcaggtacatatatgacttatgaaagtttaataattaaagttgctacgtgagaaatgagaacaattttgggcatttcttttactcaggacaggttggggtccaataacatactctgtattttcagaaatctgaaaccaggtaaattagatcattcagtgtatgatgcatttccatacagatcaaagcttggttgtggaaaactcgttaataaccttcgttttagggagtgcaaaagttgttccccaagtccaacatgcattttttttttcaaaagaaaagaatgcatataatgctataaaccctgacactagaaactcgcacacggtgatttcatttactcgtttgcagggaggcagtttccaagttcgagaaacatatcgcggagctgaagacatctttagccgaactattatcagaggcattgggccttggttctgattatctcagtggcactgagtgtatgaaatcggagacactgatgggccattactacccagcttgtcctgaaccggaattgactctcggcacgcttaatcactcggacttatcgtttctgactcttctccttcaagaccaccatggtggcctccaagtcctccaagaaaaccactgggttgatgtggttcccgtgaagggagcacttctagccaacatcggagacttcatgcaggtaaagaaaggtccaccttctttctgaccttatgttttctggcctacatagcaaatatgaaattgactccagatatgtctctctggagtcaattttgaacgcccttcattacatcaacgacacagtgagtccagataatattttctaagcgaccaatcgaatgtagaatgaacttaccacgataccctgagtacttgacaagaatcataagtgaaataacagagcaatgttgcggcatgaaaacacactgcattctatgcctagctcttggcggtcatctttactacgtctttagaagacataactccttttctggcctaacatgatggttgcagcttgtttccaatgacaagttcaaaagcgtgcagcaccgagtactcgctgggcgggacggaccgagggtttcagtcgcatgctttttcacctggagccggatgcaaaaaaccaaaccctttgggccaataaaggagcttctctctgaaaacaatccacccatatacaaagaaacctctctttcggaatacgtcacccattatacttcccatggcttgagtggcaattcagcacttcctcacttcaggataagtaactccaaatagagcagagttgtggcaaagcctgagtgagtgtgtcttgaccggctatatcatgtatctgagtttgtggcaggactttgtgacttcctttttcgatctgtgcaataaaatcttcctcatctaaaagaaatcaatgccaaagttgattcttctgatgcatagtggaatgtggctacgttcttcaaatgcatcgagttttagatgcaaaggaagattggtcgttatgaatctacaatattgaaaaaaactttcttcagtcaaatctttttgttactagctccaggaaatggaaactagcgtgtcaatcaatttcagccaaaattttgatcttggaataagtgatggaaccttatgaaaaggtgctgaacatttgcttaatcgttgtgcaagttgatcagtagaaattgatcgtcaacaatttacatcatatttttttctagcatcaataagcatgttggcttcaacttgtccgagtcagagcaattgcctagattagacaaattctacaagtccaaaaatttgattgcatgacaatttgacattgacattggaaaaagagtgcaaattgatgaaccgaatgtgcgctttttctttaagtactaccaccattcattggaaaatagttttggacataccttcaccattcgccttttccttcatgaatccatgattttctgtttgcatacaaaatgcgaagtatcgtccttcataccacacacagatttcatccccaaatccttctcctagcatatggcacacgtagcagaaggaaccgaggaccaaatgcacatctcgcagaatccgccctcaatgcaatggcatgtagcagcaaaacagattgaggcaagaaaagccgaaacatctgagcattggtaacatcatcactcacgtcactgccctgtcatgtaataatacagagtagtgagtgtggcgttcgtattgcataaggtgacatcaaatttatttgtttatctttctttgagttggggatcaactgatcttcatcgtcttctgcttgcaagttgcggcttttgatctcgaatgatcttaccaaactaatattacccgttgctctaggactctggtctccacaggcccctcacacgcagacgttgtgttctcattgctcaaagctaccgctgccgtgggcaacctaaagccagagtaaacgtctgcggggcctgttcatggataagagtgaagtctatgcggttggagtgattgttttcccaatgctgtgggggacgcagaatgtagatcactccaggcgtctggctactacatcatgcagatttcaggatttcatcgatgcatatatccacgaaaaaaaggttcttcgagtacgaggtggctaaactcgcaagaattgcctcttgcaccaacgagtatctctatgataggccatccgtggagtcagtgattcacgagctacgtaacgggcagcggctgtctcagaatgacaggccttatttgatacgtgttccaagagctgtttcgacggttgatggtgaaagctgggctgaagaagccaaatgtggccgatgtagtgacctaccggcttcgacatttttttttttgttttggtcctttgccgtagggctgtgctttcttgcgtatgttcaagcctgttgcggacgtattgctctagttcgtgcttgtacaagtgccttgcgaaaaattctcttcgggagtaggtacatttcgattttagatgttcgatatttctcgcgacgctctgcaattgtgtaggtgaaaatcgctgagtttcaacgcctgacactagccttgtcgccctggtattttaaatgtgaaagatcgaacgatagtagctagttaataaaagcgatttgtttttcattgctgatatatagtcaatcctcgaaaacagcattgcccttagtttattttgtgggccggggccatgttcttcagtattggattggatgtttcattaaactagaaactctaatccaggcacttgatcaccatgagacgatacgagtccctttcgatctgaccatatattggatggcaacccagcgcctactagctctccttgtttctgcagaatatgaggtcttgtttattaacatttctgttcctccatttttctgttctttttgtttctcaccagagaaaatagaaaatagatccatttggcaatatcagctaagctttctatttctcggacggattagtggctagcaaatagttttggaaccaaaaagagaaatagaaaaagcttacttttttgttcccggagcaaaaagagaattaagttcattttaaaaatacaaactcaatataacttaatgctcgtctttacacaattaacataaattccagtctccagacttgatacgagtctccatgatttggagcaaaaataataaaaaaataaagaatttagaaatttaggcaaaaatttaaaaattagattttgagtagttttactagattttagtgctagttctagtttataattagtttagtatgtaaaaatgtgaaaatatctggaagaaaattggaatcaaaattgaataagctttcagggatttactatattgatttttgaatgccattttcttttagagacaccccaagccctgtttgttcttctacttgttgttaaaacttatcaaatcatgttggctttggagtttgctgtaacaaatttaagttttactcgaaagaacttgtcaagttcggctcggatatgattcacttatacaaagtccgcttgtgacatgacacattacttgccatgccaaccttgaaggtcgatctccatataccatgaaactaatattgtgataaaatgcccaaaattaatgtttcatttgacttgagagctctccttttagtgtttgggcaatttggtcgctcacaccatcccttattggtcacaccctaaatcttcatgtatagagaaaatcatggagcctcatatacaaaatcaaatctattatgaaaataatatatatatatatatatatatatatatatatatatatatgtacatatgatacaatatcaagttagatacatgatcatagttctaaagtctacaaaaaagaataagtgcatctctagtgacttctacactaaacttgacaaatagcattctatcttaagtcataccaaacttgaactcccaaattccctcactgattccactctctttctatttgctactagttgtaaaacctaaaaaagaactaagatgaatgatctgagcaaattaccgcttattgagtagtataaatctcttttaagtagattgagtatcagttatgcacatttaaacaataccagaaacacatttatccaaattcagcatgtaaaatacattaaagattagttataccaatttaatacaactttatacatataatatatactcattcaatcaataatatcataacaaatgtcaatgatctagttcattggtcaatcatgtgctcaatatcaaactataactacacttaatgccctgggacaaggtctaccaagatgccctttggtatatgccttcacctatatcagtcgatggtttagcccaaataagatgcccagagaacattatacacactcaaaactcctttcaattgttttagggccaagggcatgaaaccattatcacactcttccaaccaatcataaaattatttcaaatttcatttctataaatcaagttcacaaatcaatatatagctgtatgtatataacctttcacattttcttccattaagaagaatacatttcatatagtattccaagaccatttcacaaataatctacccccaaattatttcaagagataccttactatgccatttccaataaccaaaaggataacagatgatacctctttcataacttgcaaaatatctaatttctatcatttttaagacattagtttgcaaatcagagaagggatgagcatgttcacttgaaaatgcgaaacacaacaacaaaagctacctcaagtggaaaaatttgaattcgtatcctttaagtgacaaatggatatcaaaattaagtagatagctaccttaattaagattcgacaaaagtaaagtaagcttatctactaaaagaactatttcaatgtgccaacaaaagctcgactaaagcagaatagctattgatgtctaatgtactgcggtaactcgtgcgtcaaatttaaaatggttcatttgaattcaatcaatgcctatttcaagtgggtctagagccattgaaaaactaacttaacataattaaaaggggcgagttatatggccaaggactagggaaaagtggtgttaagcacaataatttgaacatggttctagtataacaaacctcaaaatgtcacctcgatcaaaccataatcttgaattgacttatataaaatcttacacttccaagacgtcctaaagtttctttacaacatagtttcataccacaacgacctctagaatcaatccagcgacctaacatttcaactgagtggaaattacagcttaaccaagcatttttttttttcatttagataattaaagcttcgatttctatctgggcgcttcgaaacaaccttaatccgatgcatttaaatgtcccgacgagcttgaaccatacccctttccctctcgcctggttcgtttctcatttcagtttttccaatttttttcctcttaaactagctgcaacaattgtaaacaatgctgaattgttggcttcaaatcggtgggcgcaactcgtaagagaagagaattgggtctcctggacctgtctttcttttaagggcccacttgttaccatctttgacatcacgacagggactcttcaactaccgccagcctcgtcactggggaatctttgacagttagttcccttggccattggctgttgacttgaccatatttgtgcaatggcctctctagctaatcatcttcatatcactctcatggtaacagcctccccctgatcagggctcagattcatcaagatttcaacctttgtcactacaagacgatgccaaccttgtccagtcatgcacaattcatcacttgttgcgaccgggattatgacagagcgaaagaattgcaggaattcgatgagaccaaggccggagtcaaaggccttgtggactctggcgtgaccaaggtccccaggatcttcatccacccgcccgagaacttgcgtggtttgtcctccaactcgaatgggactggcctccaggtcccgatcatcgatctaagaggctgtcaggattttcggcggcgagatgtcattgatggtattcgcgaagcatcggagacatgggggttctttcagatgatcaatcacggggttccgctcgatgtgatggacagcatgttggagggtgtgaagaagttccatgagcaacaagtggaagcgaagaaagagctgtactccagagatgggacgaagagagtgaggtactattgcaatggagacttgttcctgtcaaaagcagcaacttggagagatagtgtcatatttgatttccaggatggtgtcctcgacccagaggctgttcctcctatttgcaggtacatgtatgacttatgaaagttaataattgaagttgctacgagagaaatgagaacaattttgggcatttcttttactcaggacaggttggggtccaataacatactctgtattttcagaaatctgaaaccaggtaaattagatcattcagtgtatgatgcatttccatacagatcaaagcttggttgtggaaaactcgttaataaccttcgttttagggagtgcaaaagttgttccccaagtccaacatgcatttttttttttcaaaagaaaagaacgcatataatgctataaaccctgacactcgaaactcgcacacggtgatttcatttactcgtttgcagggaggcagtttccaagttcgagaaacatatcgcgg

SEQ ID NO: 9820 - DNA, 4092 bp, Eucalyptus grandis
  Intron number 2 from transcript Egrandis_v1_0.015180m (loc us Egrandis_v1_0.015180m.g) derived from phytozome v7.0 (c hr-ID scaffold_3; pos 38621295 to 38625386)
aggtgacacacgtgaagccgctgtttgcaaatctggtaatttttgttttggctttttacgtaacttttagaagtaacattaaaatctgctgatcatactttatgcttttgaaaaatttggtatagttgctggaggttcatattatagtagtgattttattccacaaagatctcatatgagtcttcaatttgattacctctaatataacttcattcttggagctataacggttacatcacgtgtgcagctttcccaactgtctgtataaataagttcgaccgtttgatgcacgcgagccattgtgcagtttcctttcttccctttgtccttctatgtttctttattttggcttaggctgtatctcttacttctccaaaagggtcaaagcaacttccaacttttaaacattccttaatactgataattgcctagcttaaaggtcaattgagaaattcataaattttaatccagaagacagtctatggctgcacaagaactagttccaactcgttatgttttcctgttaatttggtcagagtagaatcttttcggttcaagatgttgatcgataatggacattcaccatgaaggtgaaggtactaagttgtacatcccgagacacagcactacatctttgctgattaatgtgttatctcgtctagtatctgatatattttggtgcaatagtacggttgattctctgtcatttaagtgttttcggagttgcataaactttatctattttcaacttgactctatttcattgagtctagatccattccaagtgggaatcgttgatgtgctccacattcatcgaacttgtgggaggactaaatgtgtatgtacattcaacgttgtttgtaagcagaatctgggtcaattggtcatacttttaatctgaaatgttctagggatgtaatgaaattaacacgactctgtcacagtgaggtatgaatagtttatacaaattagaaagatgtttttcttatgaaacactttcagaaggctataaattcgttatgaagtgactggacctacatgcttgagatttcacatatattgcatcatgcaaactaatttctaggtgtaattggtggagattctatgtggttggtactaccatagatggaaatagcagtgtgtaaagaagatttgcatataccaggttgttgggccagacaccacattcggccttagattttggaaatagcattagctgaagaatgaattataccatatccatttacattaattgtttaattatcccttgcttgctgaagcttcctgtcttcaagtttggttaacttgctatgcctcttgtttaattcgaatatttctatcctatacatcaagcatcgataattgcagtatggattgaaattaatttgctgtttttgcactatgtgattataataatttaactagatgttctggaattttgttcataaaacatgtaacacaatacgtatttttcttgacagttcttttgctggctcattctgacagaattatgattaatagggtttaagtgatacaattgggggatgtccctatgatatcatattgccaaatgtctattaactagtgcatgtctgttcaatgcataagtgataataaatgttgaaagtacttgtgagactgtttttatatgaatcgctgaacttatgagccaactgaagttttgtgttgcacttgacatggtcatttatgaactatctaatatggttggtagatggacttgagaaaagtttttttgtacactattacatctgtgagttattatgatttttctgatgggtgtaatacttgtggtggacatagggtactccaaaaataggcccaagcgatcctgtaaatttgcattgatgaaaactaagtattacgatggatacaatccaatgtatctagatttatggtgtatcttgtttactccatggatgtgctggtacatgtacgcctaagtgtccctgtgcctgcacaatgttagatttaatcattggatgatgtttcagcatccattatgcggaagatataatgttgcatttattatattgataggttcaagggattttgtgcatctttactattgttttggtcaaacttttacattaggtctacctcgattgaattgagctgaaaaagtcgaactattgtgtgtctcatctcaatttttgaatgtgcgtcactctttcaaatatgtatggataatttaagtacattaatgtgttctattgctgtctacctgaatgaatgatgttcacatgcaatccatggatgagcttgcgtggtctggtgcatctaaactaggtgagattgaatgctttgagagtcaaatgtattaatagaacaactaagtactctatgaatgagctcaaggactcaaatgtacacatatcatggaatttatgagcttacctcaattttgatgagtccaatgaaatgaacttaaaatttatggtggttttatttactttctagataaggttaacggacttagtgaatttgcaagtgctggattattagttaacaaatatctatggaaccacggttttttttttttttttaatatctctacttctatgagctcatgtagttttgatgacgcatgcactaaatttatgggtcttaagtactctatggacaggcatgagagacgtcatgtatctacattgctcaactgatgagtcaatttaagtatcacaatgtgtgatgtaatctatctagatttagttatagccagtgttgtttactcaatggatgaggtaggatgaatgtccacgattgaattatgagcttgtataagtttttataatgtgcacctttgatctatctaaatttgtagcaagtccacatcttgtatagatcatttaattatcccggtgtaattttatgcatctttttaatgaagtaatttggcttttagaatgggttcaaataattgattgaaacttgtggtgaacaaactgtctttgttatatatgtaaaagcacttgtgtgtttgtaaatcttatcttccctttttttttgtcaattcaaagttggtctcatcggttgatcgacacatgcaaattatttaggtgtaaaacatagttgacattgataggtagattgagataatctcagttagtttatttgtttaaattaaaattaaaggtcaaaacgttttgaagaagtaagcaaggacagttgagcatggcatgggtgcagtgccatgtgtcaatgcatcataggatctttctctggatacctcaactttactgtatactgcaagattataagattgtaagataagatgctaagttgtggctcttcttaagccaaagctttctcctatgtctgttttgtttagcacatttataagacagagctgcttagatgatgttatgaaattgtttgaatgaaaatagaaagtcaagttagtcatacaaatttccttaatggggtggtcatgtggattgaattcaatttgatttactgatttcagtaaaatgacagcctacctgagagtttatgttgaatatggttttgtgggttgaatagaggcaattgcagtaggtcatgcaggcttatttttactcaagccaaacaaaaccgaaatttgaggagtctaatttctgaaatggctgatcttgaaatacctggactttggtgttagaatcgttcatgaaaatttctgttttgtgacctgaaaaatacttcttaccacaccattgccaccaaataaagaagttaggctacacattttaagtgaagccactgtcgggtgattaatgaatttccagtttacgtgttatcacgagtttggccctgctgcgccgtttgctaattatttggccacagttattgtcttttttattgcctgacatgcctcatcttgatttggaaagattttgcatgatgcttttattctgataacaatgccagcaattgtttagttatctttgtatcattcttctggtcagtgcttgtggagtgttgagcctctacgctcttttactagttttccattctgatttgttgtgatagtgacgtcatttctttaatctggtgccaatagtttctaaaaggaaaagaaaaaagtctcggcacgtc

SEQ ID NO: 9821 - DNA, 5892 bp, Eucalyptus grandis
  Intron number 1 from transcript Egrandis_v1_0.025622m (loc us Egrandis_v1_0.025622m.g) derived from phytozome v7.0 (c hr-ID scaffold_9; pos 11464006 to 11469897 reverse strand)
tcttctggaaagctcttcgaatactgcagttccaggtaatatttcctcccgtcctccttcttttacctctatattattccatcgtaccgtgttcaggttcttatttttttacacatcagtgttactgttgggttttctttattttagactgcacatcggactatggagtgggagaaaatgtgatgtgcattaaataaatattttctagttggcatattatgtgcaacttgggtgtttgtttctcgtcggattgctaaattgtcacgaaaattgaggtgataacgtccagaatggtatggtgcagtatgttcacaaaaataggccagtagtggtgggatttgataggtcgaagtctgtatctcatcagactcaaattatactgtgatggttattatttatcatatacacgttttttcaagctgattatggatgtggtttcttttattggattgcaagtttaggttttgaattcatgacgtggtctccttccctttccctggctttctgaggttattttgaaactgtgaaagattgtcgctcagaaagggaattgtttgatgaaggaaataattatttggatttagagaggacgtatgtgtctctcccttggtttgtcatttagctagttgtcttgtgtgtctgaagaatatggaaggatcacaagagggattagttgagaaggggcgtctgtaaatgttgtagtatcttcaacagagagggagagagaatcagtaaccaatatgtctttactcaattggcttgaatttacaaattattaaagggtatttatatctgaacaatatgcatagcaaaggaaattagctatcttagagaatcacgaaatatgaaataatatccatattatctaataatatttctaacgatattctctaacaaggaaatctctaatctccataaatatgtctcatcactcccccttgagttgaagcatccaacttgcatatgattggggcaattttctttgaaagtctatgatcaagcgccgtgtaaaccggaccttaacgctgaacaaactggatttgataagtgctagagaaacacatgcttctcatgcaaccttgatagaatcgtgtggaaaccctacttaaattgcgccaaactaaaccaaattacccaacagtgctcatctttggctacttgatgaagtgtgctttactttggcactcgtagctacctagatacttgataacatcaccccatgacactcatctttggctgtccagtgaaggtgtgctcaactccggtgctcacatctacctaaatatttgatggcaacttcactcgtcgaggttgcttgcaattagaaaagaacaccaccagcgaataacatttatggtagcgtaataaaattgggaagttagtgaagatgagacgactaaagacaacataaaggaagaaaaagctaaggtttgattcaatacgttctctcttggtggctttgataccctgtaaatattagtatcttcaagatagagaggaaatcggtaaagattgcatctttacaagttattagaaaatgtcattcatattgaacaatatgcataggaaaggaaattaatgatcttaaagaatcatgcaatattaaaaaatatccctgatattattacggaagatttgctaaagatttacattcacggattgctaaagattacattcagcttttcctaatttttggcttatctcttattatcgattaggatttacttttttgttttttagtaagcatggcatttagatcctgtttggtaaccatttccggaacaactatttttatttttttgttcccgggaatgaaaaaagaacataaattcgtttggtaaaatttttgtttttgggaatagatttgcaacataatcaagaagtagaaaaaatgctattttttgttttcgagaacaattcctattttttcatctcctcttttcttctctttccctttcttcttcttttttttggccgatcaccggcgaccggctacaaaggaggaagaaggagagaaaaagaaaaagaaaaaagagaaaaataagaacaatataataaaagtattaaataattaaaagaaaaaaaattaagaatcttaccaaatgcatttttatcttgggataaaatttttggagagataccaatcgtatttttttgctcagaaattgttttcgggagtataataagaaaaaatcatttctgattaaaaattattttcgggaatagaattgttaccaaatgcgttcttagtatatttcttataattagccgttcttagtgtatttcttataattagctagaaatattgggtagatattttctttctcttttctattaagtaatatgttgtataaatatttgtattgtacattcagtaatagaagtgaattacgatttatctcatgatattagagttaaaggttttaagtttaaatcttttcaggtctcgcttaccttcccaaatctaaaaggttgagcttttgtgatactattgcctactattttataagcttaaattattagatgaaggtgtggtttgatatttaattattcaagtttttagaacagttagtagtggttttattaaaatcttatatggtttcagaacaagaggtcctgcgttcaaatctttccatactccatttgcctttccaattaaattttcacacttagtatttataaaaaagaccggattatgtgtgaaggggagtgttagaatatttaaataataagaatagttggcagtggccccaccaaaattttgaagtgtgcatgtaagagtagtgtagtggaattttttcctttatgacgttactgctgaagtgtaggacttggcaaaacaatggacgatgtgagagaagatttggatgaacaagatttggtttaatgaagaattaagcttgaggagggctactttcgaggctcctatatccttatctattgaggcacattgggtttttctggaaaatatgtgaaattattttgagcatgaagaatatgccgacgggtagggttttctcattgaaaaataattaaaggacttatagaacctttaaaatgagcttattacttaacataagcaatgatttaacgtttgatatgatataatcaggtactatagcaaaatgtagtcaaataaagtagctcataagatcgaagtagaaattaagatttgcgtccttgaggtatcgttatatgtggcatccttgagatacttgcagaaattaagattttatcctttttatcttcttaaaaagaaagtaccagcaatgactatgcgaacatttatgccattgcgttcgattctgaatgaacccttaccccacttagaatatcgagagagcaatataaaatatcaccgtctgattttcttttttcccattcttttttgttggggaaaagaaaagagaataaggggagggggaatgctaagttagctggagatcttatgtaaacacttgactgatttatccttctacgcaggagcctgcaaattagcagatgaaccaaacgaatagaattaagtttgtatagaactcactttgtcagtagtaactatttgggaggtgggtttttagagtttgatctttgacttgttttctggcctattgaggctgtgcgctgtagtaggaaatgtattctccgctaggtgcctcttttcttgggaaatctagaaggtaatgcatgcttagatttgctgttcgaagtgccaaaggcatccattcaacggaaactattgactgtccacatgtttaggtatctatctcaatataattgcactttgatggaaatatgaaaagaaagctaagatagcccttgataaacaaagtttggttgcaaattctgattaagatgaattttcggcttgtgaggattaaacttcatgcttataagaatctaaaaccatcgaatctttactgaagtatgggaaaactattggatccattattttggtgtttccggcgctctaatcatcagatctccatgcctctgccagttagcatttcatgccattcatttacctgagatcatgatctattttttaccatgatgggaattagtagactttcgtggaagtgtcacaatatacaataaatagaatgagttatgcagcaggaaacgcgtgctttatttgatctctttgttgcaatctcatctaggtctcacggttcttggacttgtcatagcaaattggtcgatctaatagaattagtctgcagtgacactcctctttcacaaataaattgaacttgacatggtaattcattactagtcatgcgattgaacttgcaaatgtgcttgtcgtgtctgatctcatttaattttgcgtttgcattcgcttattgatactgaaggaaggttcatagatatgatgcagtaattgtgaaacatgagaggttttccaccgatataaatgcaatgctaatcagtttgagatttggctgagccgcttaggcttagggaacatgagatgagaagatcgacttatgctttgtacttagcgatctttgtcataggtatggaactttagttctcctttggagtgcttttcgttgaaatttttgcccttgaagacgcttcctttggaatttagtcttttggagcatctgtcttcaatgatacagagacaaatgagcctgagacagctatttgtagtccactaatatagttggtgaaacttttatatcgttctagatattagtaatgttggacattttttgccttcctatgttgtggaaagtcgaattaagtcgtaccattggataggcttgccaagatatggagaaagcaaaaaaggtgacaacatcgttctaaacatcagtcacaattgtgcttgtccaaattcctctcctttctgggcttgcaagttgcaattatgaaactcaggacatatcaacattgcaagttttgtgttagggaaaggcagagaagtcagcttgaatggaaaataggaaatctactcttccatactgcaacaatagaaacgtatagtacattgcagagaccaaaaggagaaacattttatgcctccggtgatgaaaagggccctgcaagggattacatctttgctttgttgggacaattcaaccatacgcttggtacaatgaaatgaagtatgagatgaaaatggaactgagggagaaaaagaatggaaagagaaacgtgtgaccaagaagtaccggggaattttaaaggattattattacatgtcaaaatttcccttagaaaggaatattgagatatagaaaaatgaagttatgcttgaaatgaataattattgcttttgttaaaaaggggcggagttgcccagtccggtgctagaggaatgagagttgcatcaggaatatccttttggtatctagtaaagtgcacttaactgaggaacagtaaagggattggaacggcaattccgttctggcccttttcccatctactgtccttaaaagaggaaagaacatggagggatgaatattcatatgaagaagttggtaagcagtcttgggtaaatggagtttggactgatgatgttgtatacactttatattttcatgctacttccgtgtcaatttcatcaaagatagagtactctgtggataatattcattcatagtggaaaactgaagtgatataactagtttttgcttctgcatctttgtccgagtaacattagcttcccgttatggaagaatgagccagagtacaacttggctatgcttactaagaatgatgactgaccacatagttctgtggaattagagttccgacatggacagtacattgaacttttgtgcatcatctcaactactgatagaatctgtaacttgaaaactagctacttttgtctttcatccggttatgtttcagcctgctgaaatttttgcattatgtagc

SEQ ID NO: 9822 - DNA, 7503 bp, Eucalyptus grandis
  Intron number 7 from transcript Egrandis_v1_0.003519m (loc us Egrandis_v1_0.003519m.g) derived from phytozome v7.0 (c hr-ID scaffold_4; pos 7486756 to 7494258 reverse strand)
tcatcgaccccgatattctcaaggtatagtttcccagcattgttttccctctttcacgacgaggaagaatactgtgaaaaatcacgatgacattgctaacttattgcattaccaattttttttcttctgctcagcctgacatctcagccccgggagtgaatatattggcagcgtggagtgaggcagattcgccaacgaagttggaaagcgatcctcgaatcgtgaagtacaactttgactcggggacttcgatgtcgtgccctcatgtggccgccacggccgctctcctcaaagccattcatccaaaatggagcagtgcagctatcagatctgcccttatgactacaggtaaaacatctcaagatctcatttttaaggtacaatcagggctgacagttcgtgtctcaatctgctcttaccgtgtttacaaatgctgaccatcaaaagattcaccgaggatgaaaatgtgtttattcatgttgataaacagtatacagattaaggttgttgcaccgtgttgtgtcaccattaagttctttttctaccatccatattgcgcattgtgtctcattcatgtctgatcatgtcgagcattgccttcaaccgacctcgccatgacgaaaattagtattgcctaaccctttaatgtctctcatgttgcagcttttcatttggacaacaggggcaagcccataaccgatgcagcaggcactctcgccactcccttcgcattgggagccggccacctgatgccgcagagagtggccgaccccggccttgtgtacgacgcatcgtactcagactacgctgcatatctttgtagcttcgggatcaaggacccaagcttccagtgcccaaaagagcggatcgtctcgaggaacctaaattatccgactctccaaatcagtagactcaacgggacgatcacagtgaagagaaccgtcacaaatgtaggcggaaaacacaacagttgttatttctcacatgtcaaaccaccgacagggttcttggtgacaatccgaccgagtttgctggtgttcgatcgcatcggccaaaagagaagcttcaccattaccgtcaaagcgagaaatagcatggtgaagaggattcttggagatgactatgcctttggatggtacggatggaacgatggtattcacaacgtgaatagtcccatggcaatatctttggcataggctttgcccaatttctttttttaatgcttgcaattgatctctcattttatctaatggagaaattagaaatgtagagataagaaaaactaggaaagcattccacaattcgagtggtttggagaaaattatctgccttgaataaagaaagattaacttgtcccttttggcatgatatgatataggtttttagaattcgatgcaaataaatatgattgattctgatcacctcgattacattgtatgtatgcacgaacggaaccatatgataaccgggacttaggtcttcttctccttctcctttagatggcattgatggataagccatactattcttgaataagatgtggagaggagactatggccttttttaaagcatattctaacagaccactcattacaaattattgttagattatagtagttcaatatcaagcgtccaatcacattattatcgaatataagacgtgcaaaactcgataaccaggaaaaattacaaaaaaagtcgtaaacctattattattatactgtcctaaaccttctttttttttgacatataggtcctaaacaatttgcatttgtatcaatttaagtcatccaaccaattcaagtcctatgtgattctattagcactgaagtggacaaaattttataatattttaattttttttaattattttttttcttttatttttccttttcctttccttcctttagccggtccttggatcagagactggccaaaggcgagggtgtgcctcacccaagggcccaacctcacccatgaacggtgaggctcaactcttgccaacttagcaggcggcctgggtgaggcgtgccctcgcgttgcggactcgactaagatttttttgtcttttttcttctttttttaatcgaaacggcgtcgtggccgagcgttcggggatacccggcccggcccgacgacccgctccatgacccggctcccagcggaaaccctacccgacccggctccggctcgcgacccgacttccgccacccccagatctcgcgaaaccctacccaaatccgactcgatgacccggaaaatcgcaaaccctagggtttgcgaatctgcggcgccaagggggggggggaactgaggtgtttggcggcgacggcgactacggcggcgatgacgaaggcgacaacggcgatggcgacaacagctaggtcaacggaaaacgactacgatgaacggcaatggtaatgacgatgcttttttttgccttctctcgaacggggacgacgacggcaacaatggcggcaacttagcttcctgatctggcgcggcgtcggtggatcgatcacggcaacagcttcacgggggtggcacgacaacaagccttcgaggcaacgacgtcgggacttggtcgggacgaacggcggcggcacaatgtccggcggcaacaacagcagcaaaaaacttcagatctgaggtgcagatctcggtcggaccttcctcggcctcgattctctctcacttaggccagatccgagcctccaccggccgaatctgaccttctcgaagttgctcgccgccggccttccccgaagtctctcggtggagggcgggctgagcttgcaactcgagttctctcctaggctcgcccttcgatctttcccgatgtctctcagtgaaagatctctgagctcgccacgccctccgacgatgcttgcggccacctatttataggcggaggaaatccggtcaacggaggggctcggttgccggcctccggcttgcccaccggttccgcttggctgaaccggtgtcccatcgagctttccagtgaagcttgctcagcattaatggcgcctgaggtcttatcccctccggccgacgtcggcctactctcctcagccgtaggccgtccttcgcgcgtcggcttccctcgcgcgagtgagttgtagcggcgaaggagagggaaggaagaagaagaagagagaaaggggccgggccgaggggtgaagaagaggagagtgggcctaagggctgtgtgaaaggggagggggctgggccttggctgctgcttctgttttctttttgtttttgttttgcttttgttttttgtttgtttttatttgtttattattccgaaaatagacaagataaataaaataaaaacttaattaataagataaaataaacttaaataaaattgaggcgtcaacaactacggccatttcggaatcactttccgctccctcgtagacgactcctatagttataaatacccagtcatcgtccttctcacatcgttacctactgggaagaaaagaaatttagtgaataaacaatgaagtaccacaactttttatgtcttttgttcgttatttacctccccattctcgccctctgctcagaacgccaggtacgtccgacttgtttcctggccaagattggatttttttccgattccatcgctcgcgattttttatttttttttgggttattctcaatggttgtattgcatgtgtcaggtttacatagtgaatctcggagagcacgatggaggcaaaacaaagcgagaaatagaagaccaccatctctctcacctatcatcaatcaaagccattgatgtcgaagaagcaagatcttctcttctttacagctacaagaacagcttcaatggctacgccgctgttcttactcctgatgaggcctccaggctatcgggtaggtgctccaatgacaaagatttgttttttttttccctctctctcactctgtcgaagttcgagtaattaaacttcctgcgtgatggcaatttgtggtggggcagagctcgatgaagtggtatcggtgattcggagcgacccgaggaagtactctatgcacacgacgaggtcatgggaattcttgggtttggaaggagtgaaaggatcatggaaccctcataagataagaggaggcctcttgcagaaggccaaacatggaaggggagtcattgttggggttctggatagcggtaagtgtctacaaaatgtaaatttgattttgcgtccttatcttgatgggttagattctctccgctactgtttctcacgtgattctaggtcttatcatctatgtagtttcgtgggagattcaattagggttttactgtgctttttcttggagtgctgctcatcgatggacgacatgatttcatgcattggagggtgattgattggttttttcattgcttctattttggggtcatcaggggtgtggccagaatcgaagagctttagcgataaaggaatgaggcccattccaaaatcatggagaggaatctgccaaactggacaagagtttgatgcgtcccattgcaacaggtacttagtcaatgtcattgttttctattattggacttttcacgttgtttgaactcatagctatgtcaggcataacttttatctcgtgacttagccaatgtcctttcgcgtcaattagctaaaacttatttgttttagtttatttctatcacgacaagatgaactttacttagattaagaatagaccaattatcaaatcttggatggaaaattctcttacccatttctcccctctcataattgttatcgatcttgtttgaactgtaaaattgcatgtgctatatatggttgacgtatttgttagatatgttggtttgaatttcaaacgctataattaggatgagattttgaagtggtgagaccaaacatggtaaattctaaagcagtccattaatttggaaaggaataaaaagttaatacatatgctattttatttatttatttttttaacaaaactctcatccatcaccattgatttggatagtccatcgacaattaaaattagaagtacccaattaattgcgatatatactaaacatgaagatgagtagtatacaaactgtaccatacacgaatccattcacaatcaatttttattcctaaaatagtacatgggatattgatattgataagtttagtctagttgactagaactttaaaaaattgtagcccaatttagagaaagttaggtgatattctttatcatttctggcagaattttagccaacccaagatctgatttcaagttttgaaaaaacacaacctaattatctttataaaactatcacgtgaggattttttagagcatggcgtaaaactagaacacttaacgtcgtgctggaatcccagattttattgtttgacctcctatcttctagcccccaaatcttaattatttcttttttttcccgatattctactgtcaatttcttaactttatcgaaaacgccatgcctgtacaaggctttcaccatgccctacaggctacccaccctgtcgtcttgcaaaattcttcgtcggattggtggggatagggcttcggacattatgttggctataacttcggtttgtctagttggaaacatgcaacaaacaatgtgacaaaatggagtaaattatagattttggtcctttgcgattgccatcctgtgacctttccctccatctggcgagtttcctttgcattatgaataataataatggccagtcttttcaaggattttatatgcgatgaagagagagagagagagtttatgttgtgattgatttcatcaatacatctcagtaagaccaatataataaatgatgtggcaaattattgttaggagatggatatagctaacttaattaactgacgacttgcgatgtacaacacatatgataaaacaattttataggtattgaagtgcttacatttttctttttaattttgaaagatacaacccatgtctcaaaagtaataatttaaccgattttataaattggtattgaagtgcttagtatttttttttttttttaattttgaaaagatacaacttatgtctcaaaagtaatagttaaactgtaatgaaattgtaggaagcttatcagagctagattctatgtcaagggctatgagacccactttggtcctcttaacaccacactagactatcgatcaccacacgatagagatggccatgggactcacacggcatccaccgttggaggccggagggtggctaacgtctctgcccttggcggcttcgcccacggcaccgcatctggtggcgcagcgcttgtccacctggccatctacaaagcgtgttgggcgatccctaacgtatccaaagtcgatggtaacaagtgctttgaggaggacatgttggctgccatggacgacgccattggcgacggcatcgacgtaatgagcatctcaattggcaccaggcggcccttgccataccaccaggacaacatagccctaggggcattttatgcggccaaaagcaacattgttgtggtgtgctccgcaggaaacaacgggcctgctccggggaccctatcaaaccctgctccatggatcatcaccgtcggtgccagcaccatcgaccgaacttttgtcgcaccggtagagttaggaaacgggatgtcgatcgaggtgaaaattaaatcacttatatgtttgatagttctgtatatgtagcacaactattaaatactccaatctctcaatctatacactgataatatttccaaatgctgctcaacatatgctaaaaactcatttgcacagggacaaacagtcactccatatcactccaacaagatgtatccactaatttatgctggagatgcagtagccccaaacgtatccaaggaggactcagggtgattaatcgttcatttttagaaaaattctgattgtttttacctaaaatttggattagttgctaattaatcttgctaatatgggtattctttgcagtcaatgccttccaaattccctcaatccaaagaaggtgagggggaagatagtgctgtgcattagtgggaacgggccgagagtcggcaaaggcatggaagtgaggagagctggcggtgccggattcatattgggtaacagcccagccgacggagctgacctgacatgtgacgcccacgttcttccagcgactgccgtgactcattacgacgccactcggatttatgactacatccgatctaccaagagtccgacggcgagaatagtaccagcaagaaccgtcctgtacactaagcccgctcccgccatagctgcattaacgagtcgaggtccgaatgtcatcgaccccgatattctcaaggtatagtttcccagcattgttttccctctttcacgacgaggaagaatactgtgaaaaatcacgatgacattgctaacttattgcattaccaattttttttcttctgctcagcctgacatctcagccccgggagtgaatatattggc

SEQ ID NO: 9823 - DNA, 7381 bp, Eucalyptus grandis
  Intron number 2 from transcript Egrandis_v1_0.010790m (loc us Egrandis_v1_0.010790m.g) derived from phytozome v7.0 (c hr-ID scaffold_9; pos 7811342 to 7818722)
aacctgattttgatacacctgctgtcatagcagaggtaaaaattttcaggtctcttgactatctgatctgtatgattgagtgaattattattagcttctttcacttttgttccacaggctggaattaatgctatccgggaaggttatacaagatacacaccaaatacaggcacattggaactgcgcacagcaatctgtcagaagctaaaaggttattctcttgctgttactccatcaccgtctaaaaggactgatcaatggattgacatcaagtcctgcgcagaacatgtagttatgacaattattgtttattgcttgcttattaatgctttctatgtctgttttctagaggagaatgggatctcatatacaccagatcagattgttgttagtaatggagccaaacagagcatttttcaggcagttttggccgtctgttctccgggagatgaggtctgcccattgcttaaagaaatcatgccagtgaaatttttttcatcatgatacatattcagttatttccctgttttaattccaactccaaaagtcatctatgctgaagcgaggcaattttgcctatgatatatttgaacctatggagtaaattagcagttgaaagctgctttaagccgcttcttgtttgatgcaatgtcttctgataggtgacatgactttatatctgtgaagttgtaatgagtgaggcattttggtcataaagtgttagtagtttgttatgcatctgactgaataaacaattccacactcttgttatcacatgctgtaattgaattaaaatttctttttcctgagtcttgctcctggcacctttttgtcttcttgaagacacttcatttgatctcaacctatgatggagtatgtcatgaagggccgggcatggaaggctgctgcatgctttaggcatgtgatatggcccattttacttcaaatatctttgcagttctatgagaagttttagatattgttgggtttttgtttgttggtataaactatattctaagaggatgtgaattgtggccttggcatagatctcgtttgttgtggggcagcaagtgatgaattcatatgtaatttcattttaaaattgcaataaaaggttatggaaagaggatattggcagtggcttcatcacaacaaaaaggtgtgtaaactctgaagttcaaaatttgaaggttgtgagtatgaaaggatcaatcttattgatttctctagtgaagttagagcaagagaatttccccaatccagatgtagccatcttacagatacacatctggtatcagtaaggcctcaaaatcgttcttttcaataattcagtctaggcagctagccattcaattctgatccaatgtacgtgcattctgttaatctaatccttctgccacgctcaccttttgctttggaattttgcctgtcacttttagtcttgccacaattattcggttatgaagtcccctttgctcttatctcggccaatgtattggtttcattaatcttgccccttaaatgatgttggtcattctaaccatttctttcgtccttgtccataattaaatcatttatttgcatagtgtttcttggaggaatgttaagtgttgtttttctaaatacggttttgtgttcttcccttgtgtatttacaaccactattcatgtcccaggttataattcctgctccctattgggtgagttaccctgaaatcgcaaggcttgctgatgccacacctgttattgttccaacaagcatctctgagaatttcttgatggaccctaagcttcttgaacgctcgattactgagaaatccaggcttctgctactttgttctccatcaaatccaacaggttccgtgtaccccaaaaaagtacttgaagagatcgctaagattgttgcaaagcatcctaggcttctggtattggaaaccgactaagatttcattcgtgctccttactaatgtttgaattgacaatatattgaaaaattccatgcaatcttttcaggttatgtccgatgaaatatatgaacacattatgtatgccccagctacgcatacaagttttgcatctttgccaggcatgtgggaaaggacattcaccgtgaacgggttttctaaggtaatcagaaccctttccttctcaagaactaatcgcctcctaaatttcaatctcatataaagtttactttttcatctagtttttgcttctaagctaggatatattctactacatgcccttataaaagtgtctaattttaaaatgttggaatatgtataggcattcgcaatgactggctggaggcttggttatgttgctggtccaaaacacttcatttcagcttgtgcaaagattcagagccaggtacagggcagcatcaaaaatctaatttgtcatagaaagaaccacagcaattgatgaagctgtcaatagaggttgtctaggagttgatgagaattaaacttggtagagaggaaattttatgtcaatgaagaacttaatgtcacagagagagaccattggtttctgaaacctagtaagttgaagcaaacttaacattggtacgaagcaagtggttaagatggtggccaatttgtgtaacacaaccttttgaagtgattgcttcctgattcaaagttccctgagttttgtgtctggcactatctatcagcatggggcagatggatgaatacgttttgcattcttgcagttcacttctggtgccagtagcatatctcaaaaggctggagttgctgctttgtcaatgggatatgctggaggtgaaactgtcaaaaatatggtgaaagcttttagggaacggcgagattatttggttaaaggctttggggaactggagggtgtgaagatttcagaacctcaggtactaaatctgagattgacctggcataccaactaatcattcctctccagtcttcctctgtccttactctgttttgctgtttctcatcacttttcgttgcaatcccatattccacttgcttctatgtgcagggagccttctatcttttcatcgacttcagctgttactatggagttgaaattgaaggcttcggagcaatcgacagctcagagtcactttgccgatacctgcttgacaaagcccaggtatggatcattcaagtgctcgtttatcttcctctagttgccgggggggccaaaaaaaagaaacactcttgcagatgtgtttgtaccggattcctatgtcgcccctctccaaaatgttaacatctgaaatgctgataagatataacatcctggtgccgtttccgattaacttttgggtaactttctgagcaccattttgtataggtcgcgttggtcccggggggcgcatttggggacgactcttgcatccgcatctcctatgccgcttctctcccaactctaaaagaggctttcgagaggattaagaaagcacttgtcacgctgaggcctgctgtgccggtgtgatgatcgcagagttgtcacagcatttacatgaagtagctgctgctgttgtacttcctgtcataatcatttggtcagatagacttcgttgccgtaatccatttgttgtcgtctctacttgttttcttaatcataattagtaaagataagaagcatgattagatgcagatttaagatatattatctcttaagtgtataatcgcatttcgttccaaaagaaaatgtccatgtacattgttatttcaaatttatcactcataagtgacattttactgtttgaagttttattcacctcttgatacttcaaggaatggacttttcaatggaaaatccgaaaaagagaggagaaaacagttgccgtgcatcgtgtccaatcccggcctttgtcatccgtaccattattatgggcaaggttaaatttttcattcagcttatttgacaaaaaaaaaaaatgattactttcgtcatttataaaaatgaataaatggaagccatttttgtgacaaaaatgtttagatattacttatcaccgttaatgaaaatattcagagatatcaatgaggatttcaaaaaaaatattatttaaaattttcatttttagtgaaataagcgaaacccagtatctcattttgatttttagcagaaataaaaattgtggttccttttacttccctaattcaagcgagactaaaagcgtgtgtatatatatatataatcaaatcatatcaatgatggtaatatacgataagagtgatgattttagatttcgtgcaaatttcatccaaaatttactccttgaaacaaattcctcaatttttgaaatctagatttgtatatatagtcaaatcataccaatgatggtcatacaaatcaaacatatggcaataataataggtgtaagcggttttacgtttcgtccaagttttacctaggtacttaggaacttggaacctatcttttcataattttcaagatcaaattcaaggtctacctaggttatatatgtattcttaattaaatgattgcaatgaatcataatctttaataaacaatccagtgattacaattcatattcagacattttatcatcggaaataaaaatttagactagtaagattacccactcatcattggatgccatggaatgttgtgagattatgcaaagatatagaacaagaaaaacacaaagacttattccaaatttcaaggtcttgattcttggttccgcttggataggttttccaatttttggaatctaaaaccaatcctgcatattttaaaacctataaccggaattttttccactgatccgattctcaagttttaatttctacccaactccacttgaatgcaagtatagataacatttgtaacacattagatgaagccaagcataccttcaaatcattcctaagaaccagtttgcatatacgtgtgatatacaaactaaacaaatgattgcttcatgaaaaattctctttcgatattttacttaaaaatctctgacagttggaaatctgtaatcatactccctcctaacacatggttgctagcattggagttcaagaccagcctatactcaaattcatcttaggcaaaggaaatttctattagcactttaatggtgattagtcccagctcctctcgaataaactacttcaactacaaaatgggtctcctttttgcccatgaattttaaagttttgggatgtcgactttctaacggcataaaatagaagccggctctccaggaggatgactccacgttgcttagccaatagtaggggtgagcagcgatctagggtcgaccctggactgaccctggaccggcccaaccctgccggtcctggtccggttcccaaggggactgggtcggtccttggtcctgaaatttcaagaccaacactgtacgggttggtcgtcggtcctaagagttttgggtcggtccaaccctggaccaaccctatatattatattatattatattatattatattaattcttttatatattcaaacctaagtaaaatgtctgttatattatattatattgagatgttctaccaatagcactaatagtaatttcaatttaaaacttttgttgagtattaattatgtgtcgtttgttttgttttcaagtgtttagaagttcaagtgaattaacaatatgtgaagttatatattcatggtttatattaagtattttgaactttttatggtttaattgtattttactaatgaatttcaactgcattttgctttttaatttgtgtcaaatggtagaagtttctgaagagtagagtagtactgcagttgctacggtgattttctagtcaagtggtgtgaagctcattttttggttgagtggactctatatgatcgaatgcaagaaaacacttttgcatatggtgttatgaatattaaagatagatgatcacaagaactttctatcttgtcccatatctcgatgagcggttagcatgtacaaaatttctattattgtgtcttcttaaatttgctaaatatgtattggtatttatagtttagttgcacaatgtcgcattgtcgatggatgtgtaatttgaatttgtaggtttgtttttttaggaagtataaaaaataaaacaaaaagaattatcgatcggtaccgggttgaccttgaaaccggaccaaacccattgggtcggtccggtccttggtccgaggctcaataggatcggtcctcagtcctaaaaattgagaaccgacattgtatgggttggtcctagggttagggggtggcccggaccaacccggaccatgctcacccctagccaatagtgctggtgctccctgacagtggcttttcacagtctctcacgcgcatccgaagcagcgacagcgcctccccaagttttctttccttccctttcagtttctctcccctcaggtacgtccaaattccttccttctgcttgtagctttcgctgggaaatttcgagttccgatgatgggtcggtggggaaacccatatcggctcctgttctgtctcgaagttggtttgatgctcgtgttaaatgatttggagtatgcgttgactgcttaaaaggttcaaagtttttagtgggattcgtattgttttgttgttggcagagggttccagtcaagtgggttagttcattcacatattagtttgctagatatcggatgcgatggcagttaagtcgtggcgaggccgaaattggtgatgtcatgtgagttatggcttatacatggcctcgggttgatcactatgagcctacgagtgaaagaaggaagtatgagcctacgagtgaaagaaggaagtaaagagtaatagggaatttgtaggaaaagaaagagcatattgtaatttatgctgtttgtaaatggtgtcgatgtgataacgtatgtcatgcatttttgtgataacgtatgtcatgcattttgttgcggtttgtgggtgatggaggttctctactgctgtttaagcagtatattgactattgaaaactttcatctcgccttattttagttgggttgctagatttcactgctgatgatccttttcacttgccaaagccgaagataatactaaggaaattcagctgccttaaataactgcagtggtgaaagcacaaggtggtccaggacaaatggatgttgacctcactctgagttcaagggtagatgctgtgaagccttgtaaaacattggctatacttgaccaggcgactgatcttttaaaagctggtgtacctgttattatgttagcagctggagaacctgattttgatacaccttctgtcatagcagaggtaaaatgctccgggtgccttaattatctgatatatataagaccgagtgaactgatattagtttctttcactttcgtttctaaggctggaatta

SEQ ID NO: 9824 - DNA, 5639 bp, Eucalyptus grandis
  Intron number 1 from transcript Egrandis_v1_0.028694m (loc us Egrandis_v1_0.028694m.g) derived from phytozome v7.0 (c hr-ID scaffold_4; pos 8742671 to 8748309 reverse strand)
gaaggtaaattaaatttgcatttgattgcataaacagctaattttcttgatccttattttccgaccgttgcttaaagtaaacatcagccaagactcaatcctcacctaacccaaagaccaatttgacagaagcatcgacactagaaacaatctcaaccatcaattcgttgcgaaattatcacaacataacgcagatctaccgattagagacgggaaaatacctaccggtttgtcactgtttagatagcccaaggactaacaagtagcggttgatcttcagctatggaggtatcatcttcctttcactcgtaaaccctaggctgaaatctcccaaaaccctaatcaaagacttttcgcgacggttacgtttttagtagtacgtagttagagtggaaaggttcaggtgagctactttaacgactgcaacactaaatatttgcacatatcattagagagagaggtataaagtcactcactctctctttctctctctcatattatgagaagcactgtttaagctccataattgtttttaagaaaaaagaattataacttcttttcgcaatgggttttgtcacttttgtgattctgtgagattttgtgttccccatggatggccatgagagataaaatagcttgcgtgttaattatgaattagatataggaacatggaaggaatgtcgattttgtcgctagtatctacaattcgcatataatattttccctaatcactcagcgaccatttcttcctcagatgttgctaaccaacatcagagttcacgaacatggtttttttatattcttgttgtgcccacggaatcactccgtggcaatgtcagagaatctgctgcgtcttgggcagcacattaaaatataaaaattaccaggccatgcatagatttttgcatggcagtacggtcgttctctgtcatgaattgttttcatatgtgtactcgtacctgtgctagtattgtctcgtacgaacgtcctttcttctgttctttctgttggttggactggacatctttgtttcgagttgtctttgcttttgcattttcttggggacacgcagattagcgcaacacacgcaaataataatacatacgatgtccatcgtagagtgatgctaggaaaattgaatgagtgccaggtttgatatctgtgtggccattaaaagttccagaagaacccagcgcatgaccatcagaaagattaataaacaccacgactattttcttccatttgtccatttgggggtttccaccagatacattacgagcacagtttggatactcttggttatgtaccaacatagtcttgttctcatttgaatgtccttttccatagttgagactcatctccatcaacgttatactctttcaatgtcaacgaggtctaataggatatgccaaggagcgtagaaatatctttcgcatcccttactgaaactgaagtctttaaacacttgcctcatcaattttccctcacaacttctagttatagttcaacctttaaccatcatggctgtatatatggctcggatgcagcaaatcacgttcttgttgaactatgaaatatatagctcagtgtactctaaactgtagtttttagagtaaatgatggcacatgctactttgaggggttgagtcaagtccccttatacctagacctaatccaaccaggatagagagcaatagtcaaggcaaaagagctcaagcaaggtgcggctcattgagttcagtgctttaagcgaaggagatgttactccccaaatcaacaaatggaagagggcttgtgatggtattcataagtccatccctataaatattctgacttcaatacttcttttggagatatggcctgtgttgatcaaaccgatagttacaaaatcgtatcatgatagggaagcagcgctaaagctcaataccttcataatggggagatccaagaggaagccacaattgtctacattgacacacatagttagaactacgtgcactcgaaacattgagctataggtaaactagatatatcatatactcctagtcatggaaatccaatctgggatttatttttaccctcactcctcgcgcgtaaaactactaaaagtcttcgttgtgagctcatcaccctgggcccaactccctcttaattcaaagtatagtactcttttgcgataataaatttcaacccaaatttccaaccatcgccgctagttgccaaatgtttcttcacccgctgtctcttctttgattgcgaatctcactgggctgctatgatgattcatcgaattatttgttgaagttatagagatgctgtccttgttggagttaatgaggtgccgacacacgcaaggcctatcatatcgacaatatcaacggccaccctttacacatgggaagagggagggagggggtttgaatttccacattctcagaaaggttgggatggggatgatttaacattaggtgtggatttcaactgtcacagcctgtatagaggaaggtagggtaaaaatctgagatcaagagttagaatagaaatagagtagaacaaaaaaaaaaaaaactatatcaacatttatactagtataaagctgaatgcacaaccatttattctaaaggatttagttgttggagtacaatacgaaaaatgggtaaatgtggtacaaagaattgaactcaagatctaaaaccaacttacagtttaatactcaagtgtttactctaaaatctctaatatatagaatccaatacatattttacagtcttgcgagaatcatagtgatgcccaataagagtgaccttcgatggttacacccatcaaccagtgcgagcggagcgtcacctgatgcatatgactagggtcgtttgcatgtattcatagagtcggttgaccgaaggtttgaatacccatgtcatatataagttgaaaccagtatcttcggtttaaattggttgttaaggatgaatttgtagcagaatgtatcattttgaagagtactagagatgacgttgccattgaaaatatgtcttgaacttgggcccttaaaggaaacccaatgtaagtaggtttattaatttgaataggattcctagttagagttcaattcttgtcaagatttcctatttaagtggtttcctagttcgaatagtatttccatatcagatctaattctttctatacaagaagtggatcttcttcgtgaagagcatccaagaggttgtttcttcatagataacaccttgaaacaatacaagaatgtttgaagctgtgaaaatcttgtgggtaagattttgtttaattcctttctgagattgagatattattttgtgaaaatttgtgagagctaagcactataagttattggatgtaattgggggttaggagatactaagagtacttgattgactcgttgtgtggtagtatctctgttttgcacttgatctatgatggaatcctatgctgctctcctcgtggaataagtatcaacgcctaaaccacataaaactagtatctagtttaatttttccttctgtatattataaacttcaaaatatgttgatgttgttggtctgacttgctatattaagtgctatgctgtctgcaatcatatagcaataaaattacaagatctaagatggatatctttctggggtttaacaagagtagatggagtttgggggttgagataatggcaccataggtcactctcccgatgagtattagcactctcactgatattggcagaaccatgtatacctcacacgtctttgggttcttcaatggtcttgttagtctgtttcttttgatttggtgctgttcgcacactctgtcttcctaacaaattggcattctgtttggcatcgtcatcacttgacaaaatatttggtaatcttgtcagttgcttgtcttgttagttgctgcgcatttaaaaatttgtattggaagagtaactttgattaagcaacttctattaaagttcttatagaggtgagatatagtatctataagtagatagactggatctcaatcttatttattagggtgtttttaggcttttgggaaatggcaaagccaactgttaactatacgtaacttatatgtttgataatatatttttaaaaggatgtaacaccttaaaattggtgccataatcctctaaaagttgctatagactgcagtaatcttgaaggtaacgcagcaatgagttgttagcaaaaatcccacaaaagttatagcacctcttttcatagtggaagctaaaaaaaaaaaaatcgtaccagacagattctaggtgggtacaatcacctccactcaacttccaaaagctgcatagtcgacccaaattgttttgtagattttgagcctactaaattctctaaacaacaaatttgaccatagcggaactcaatgaactcataatatgatagtggttcattttatggacccacacaattttttttagatatttttcaaaaaaaaaaaaaaaagaagagaaaggaataaaaggctaatatgcgcattttaggtactattccctaaatgtcttacctttgcctgccgacagtctctaattctcctgctttcctctctttcttactcctaaccgatactaaacccttgtcttaggttttcacggcattggcatttcactttagtaccatctaaagtcccacgtaaaatgatgggtagagatttactaagtaattctttgtaagttgagagactcgcatcgaaggtcactacttaagtgcacttctttggaggaaggccctatacacttgattaatgtaagagtcttcatatagtattttgccttcgtaagtgatcacaaccggtgaggcatcacatgatcaattatgcacaggttaactatattcttatttcagcatcacatggtcatcctccttgtaatagttagtttcacttgtggatttcttgttcatctcattcattgccatattaatttagggaaaattcctaatttagtcctaaatttattgtgcgggtgtcaattcaatcctaaacttttaaatttttccaatataatcctaaattttggatgaaatttcagtgaatttgtccacataggacagccaacaacagctagacaccgcattaacaatttcctacagcaatgaggcagaagaactacattggcaaaatgaaaaagtctagagttgaattggcattggcaaaatgaaaaagtctagagttgaattggcatccatatagtaggtttgaaaccaattgataattaccacgattaattcaacttgtcccgctttcatttgatatattaaaaacattacaaaacaaaaacaaaaacaacgatcatagcaacatgagaatctggtatcatgtgatctatggttaccacgaagtgtaattaagtgggacatttcgttcaatattgactgccacgaatattttcaattgtagtagagaagagatgcatccttccgggagaacaaacttatcatttggctaaaactgctttgctagtaatttgtctgcctattcaccagagttcaatagatttattattgtatctactgctgatttgtaacccgtaagtaataccgttaagttgtggcacagataactcaaacctggtaagctgctggattggacgg

SEQ ID NO: 9825 - DNA, 1617 bp, Eucalyptus grandis
  Intron number 2 from transcript Egrandis_v1_0.006159m (loc us Egrandis_v1_0.006159m.g) derived from phytozome v7.0 (c hr-ID scaffold_7; pos 45460440 to 45462056)
gaccgcgaattctcggacaattgctcggagtctcggtgagtctcttcttcgaacttgagcggagtgtgtgcgtatcgtatgtgcagtttttctgctgtcggagttcgcgaatgatgccgggaatgtgcgatctccgtccgtgggttgaccgtgactgcgaggggcgtgatgcaatgcagcgactggtcgatcatgctttgcttgggaattaatctgttcgtcggaattcggaaattgctacttgtttatatctgtgtcaacgtggccggtgtttggatcggtgcatttatgctcagttataattggatcactctgggcgagtgctttgactgggtttggacggccttaattagacgatgagagctcgatcctgattccgaattgtggtctatttctccaagaagagtcttttatctgaaggttgaattgaattatgcgccggactctagattaaggttgaaatcttgtaaggtctgtgtaggagcatatgtagaaagaatcatgacatagcatcaatgaatggatggataaatactccacatgatggcattgatgctgggacatgcaacagaagcctgataacttcatttggggagatcaccaaggaagagcccaaaactgagctcgtcaagatatccaattgtactcaccttcgttcaaaggcttaagctaatgctcttgggccaactaggatgtattgcctactccaccctaaccaaatccccaatgtctgacttcttttgcctacattttcacacgagcaccttaacaaatctccctcacgtgtgagccaattgtgttaggcttggtcccccttaatcttggtatccttccacaccaaccttatctcaactcaagaatctccattttgtcttagctaagtttggctcactctcccttaatctaggcatccttttgtagcaaaccttatcttgactccagaatgtccattttggcttggctagtttgtcaagatgttggtgagggcaacgtctaccctaagactccgcctctattgtcctcgcccaacgaagcttggtgagaagctgggaacaccatctaccacctcgaatagggagttacataagaggtttcccttcattgagattatcaccagacactgatacacattgtgagtgggccactaatcttccattgccaccattaagagagatcaccaagagagagctcacatccaagcttgcctacatagccaccttcactcaaaagttagccaattagttatggcccatttatgatatgttaactattccacattactatacatccccgatgtggacttctttctcttgacaccctcatatgtgcactttaatagttgattcctgtccgtctaactgctctatgtagttttttatgttggtgcatgtgtgattaatagttgtttctcatttctggactcctttttactcagagttacaatatttggatgatcatatttatcttctgtaatatgcaatatctgattcttggaaattttaaaaggatcatgttaatcttaccctataagttgtgactgcagtatttgcattttatacagaatagtaacatgttctgacgtttgatgctttttctgtatatggctgcagatatttt

SEQ ID NO: 9826 - DNA, 2452 bp, Eucalyptus grandis
  Intron number 1 from transcript Egrandis_v1_0.024281m (loc us Egrandis_v1_0.024281m.g) derived from phytozome v7.0 (c hr-ID scaffold_6; pos 45046689 to 45049140 reverse strand)
ctctctctctctctctctctctctctgattcgagtgtatgtgagtccatatggtttggatttaggtggctcgcatgattattcttgtagatctcatagaatttgaggcttgatcggcctgtttcggggtggaaaaacgtcgagccgtggctgttgatgatggatccttggggatgtatcttgtatgtgcgttcacgtggtggtgttgttttacggcgaacctttggctgcggatactgttcttcggtcgttattgtcatttgtcatttctacttggcttggctgaggaacgttttagacttggtaattaggtaaggcgtgctaagttctactggtgactttgatttattgaaggcgatttcttttggtttctctcggaaggaattcattcctctgttaatacctggtaggttcttgaccatatatgtgggaggggaagtgtttggagtgtgtttgtgcctaggatcttgcttgtcagcctaaattatatgtgtgtatggcaaaccggggctgggtgaaattgcctcatgggacaatttggagatgcatatctgtagaatcacgcatttatatgattacagcaggatatgttaagattacatgggcaaatgttgtatccagctggattgcatccaagagaatgtagcattgctaatttaatccaaggcaggaaagtcctaaatagtgctgctgcttgtctttaaaagcagtcctgatttatctgtcttgaactcattgtctatctggattactctgatctgttaaaaaagtttctttaatgttctccttgctttagctgcattattagaatgttaccatccagagcctactttctcttatgtgcttgtgtaactggaagtaggaagggcaatcttgttagggaatcaaaaaattgagtcacgtttatagtactgttagtctggggatataagagcttcattcaaataacttagtgaataatggagaaaccatattttgtttcattttgcaatttctttcaacaaaaatgtccaaaatggctttttggtacattgaccctgttacttgacaatcaatggtttctggctgtgatctactgttcttttgtttgtcgtaagacttagaaagtgaggatattgaccttgagacaattgcctttgtggaaacgagcattcttgttagcagtttcgctctttgtgaatgaagaagtgttgtttatattttgtttatgctttagcagtcttctatttgcgtgatgtttctgtaattttgttatatttctttttatataattcagtaggtagctgtgtactttgatttcatagcagttttttcaaattgtgccttcctcattgaccgtgtaactagattacgaggttggaagttcacctgttttattttccttcttctatcaattgtgtttatctgggaattaaggaggactcgttaagctctcttagaatattccgtgtcttttgatgattaaccatgttctaaagcaatgatgcatttttttgctaactcaattgcattatgaattttccctcttagaagatcctcccatagctacttcactgtaattgtcaaatgaactcatattctagaatgaaaagtttatctgcatccatctcataattgaatatcacaagaatcaatgttaagttctaatgtagctaaaaaagcataactcagtcacaagtaggtattactcgagaatctacgaaataccgtcacacaacattcttcctcatcttttcgagtcatgaatctattcaattttttattataagattctgaattaagttgtgatgtagcttaggaagaaattgaagttcaaccccaagtaggtacttctttggagaatctatacaataatttcttatacaagttcaactttgcaagccgaattacaaagaatcagaagtcaatatttccattttcattttttccagacattaatataaagagaagaagaggaagcagagaatcatcccagtcagatcagttgcaatgggttgaaccattgaattgaatttttctagcatgccgcttattgttgtggagcccaatctagaatcagatttggattgacttaagtcttatctggacagactgtagaaattagacttatgtatccatgaattgagggttttttgagaactgtgctgaaatggtaaattgtgacagaatcgtgaatgcaggcaaatcttgattaagtctaactgattcttcctgttcccatagtcacactattttcagattttaattaaagcaaattttaattccattcaaattgtaaaaagagtttttttaactaccacattatatatcataagcaatgaacttctgctgtacctttatatgcttgtatggtcgtgggcggtattactgcttctgattggttattttgcttacatattgcccttgacatttgttcagggtttcaaaaggtgtaagagagttacctgggaatt

SEQ ID NO: 9827 - DNA, 1497 bp, Eucalyptus grandis
  Intron number 2 from transcript Egrandis_v1_0.007183m (loc us Egrandis_v1_0.007183m.g) derived from phytozome v7.0 (c hr-ID scaffold_5; pos 70793925 to 70795421)
cgagctttaccgcttctataatcagcattctgaaggtaattaattcggattcttttcttagactgtgttgttggtcgtggagtaccgatgcctgttgaaattagaaattagatctggaaaactaccaatgaaggtatcttctgtatgtttcctgggttgagagttttatggaaacagccagatgaagaattgcacatatcatagtaacaaagggcctgcatggaaacactcattgtttctgtttctgaacaatttttttgtttttttgttcctgggaacaaaaaaagaacagaaacgtgtttggttacgtttacgttctttttttgttttttttgttcttggaacaaaattgaaacaaaaaaaagaaacaaaaaaaacttacttcttgttcataaacaattttgaagaaacacttcttcttctctctctaatcttttctttttcttttcttcttcttttttttttgaccggtcaccggcctcggccatggctggcgaccggccctcgagggccggcgacgccggcccccggcgaggccgagcatcgccggcccttggtgaggcttggcctcgccgtggctaggcgaggctgctggccccgtcggccggtcgtcggcctccggcgaccggccgaaagaagaaaaaataaaaaaggaaggaaaaaatgaaaaataaaataaaaatatttaaaaattaaaagaataaaatttaccaaacgtgtttctattcattttttattcccggaacaaatttaccaaacgcatttttctggtcaaaaattgttccccggaacagaaacacttttattttttatttttttttatttctgttctctgaaacaaaaaaagagcagaaacattaccatgcagccccgaaatcttgttaaaagttgtcaactaaccatgagtttactattcggggagaaacagaactgttcacgaggactgagcggtactgaagctcggtcatctaaatgaggatagtaaaatcaactatgcacgaggaaatcctttgtttccatgtgattcattctaaataaacaacttttcagatgaaagttctcgtattgagtttttattgaatataatggatgtatcagaattcacctacttatagtagagtaagtacaaaatacgcaagatataaatttttcagtgcaaaatttttttacaacagagtttctatgacaacagaaggattggattgcccgatgattgaccagctgtcgtaaagaattttactgacctgattagattccaaaatatttggtaattctttattagttggcttgatgaaaagtcctgttggaaatcttgattcatgagctgatcctaactgtttctattatttttgtagtcagtaaaatttccttgctgactgcttgagtactgctcgagttctctctgtgggagttggaaattggatttttaacatttcttaattatttgatgatgacattgtaggcttggggaagaaaagaataattttgttggtcata

SEQ ID NO: 9828 - DNA, 1431 bp, Eucalyptus grandis
  Intron number 3 from transcript Egrandis_v1_0.016262m (loc us Egrandis_v1_0.016262m.g) derived from phytozome v7.0 (c hr-ID scaffold_2; pos 61427150 to 61428580)
tcaaggatccgcaggtttggttccagaattcatacgctagtcattgcagagtagttcttttttctattttccattaatccttttttgccaccttttatttattgaagccaaccagcatgtgtcatgtttatcctgagagagtcggaatttattcaatattaaccataaccaagttcattaacttcatcacccccgttttgttttgttatactatagctttgcctttttcaattatgaaaggaaatgaagggtgcctggaaactgtagtggaagtgactgtattcttctgctctttgatttgcataatccgatattctcatctaagcacatctctcattaccttctaatgtacagcttagcaaattgtttgtgaaaatttgtcgggatcaactgtatatgggattttaagttgtctggcttatcttttggtcattcgcttctatacctttactctagtatccgctaatgtattctctttttggtgcgataatagtttggttgtgtatctcattatgtttccttacgtgcgtaagttaaaggcaaggaaatagagcatgtgagtccgaggacttacctaatttttcccttagaccccaaaagattcaaattttcatttattttgttacatttttacttggtaattgatgataacaaagcctgtttacaaatggatttatctcaactttgatatgattcttttatggatgagcaagatcatagagtagcatgtcaacttctatcagttcatgtgttttgggagagaaccatcatttatatggggacctccctcacacttgcgcttcttacaatgttacatacaattagttctcttactagaactacacagaatcaatggagatcctactattgttgaggacatactagattgaagtttgtgaagttagacggagttgagagatatttgaattattatttactaaggaggtgtctccatttctgatgctaattgaattcttcagcaccccatttcttatttaaatgatgtgttaggtaattggctaacatgactaaaacgtcatatttcctgagtgccttgctaattagttcttgcctatccaggccaaatgagcatgtaaaaggtcttcattgggaagttttctctagattttttttttttttgggcaaatgctgttcgttaagtcaaatatgtagccttgccttatcccatgcccttgtctttgtcataatttaagactatggatgtcaaaatgctggctgctgctcactgaggaaccttgaattggcgagagtaggatttataattcaagttctaggtgtgcactgaagattttatgacatgtagtgacacaatctgttctctcattatttcatctaatttatatcttttggcaaattaatcgttatcatatttcaggcagaattacttgatccggctgtgaagggaacact

SEQ ID NO: 9829 - DNA, 2355 bp, Eucalyptus grandis
  Intron number 2 from transcript Egrandis_v1_0.034872m (loc us Egrandis_v1_0.034872m.g) derived from phytozome v7.0 (c hr-ID scaffold_4; pos 18969351 to 18971705 reverse strand)
cctactctacgaacgagtatttgtttacttccaatgtaggcatttgactacactttgtcatttctttgtttggctctccattaaatgatcaaacttaccctgattggtgatgtattgtaaaaatgtacttatgtaaggtgcctagtggggatcagtgtacttatgttgtgccgtcaaaagattaaaaagagggcaaatcaaaaggatgattctgccttgttggaatcgggcatcatttttagtctataaacattttccgggtattattcttttgttggtcaatgtctatctcagtgaatgtaaattattagtctataggttctcggatgttatgttctgatggcagaaagttacctcccaattcgaaacagaagagatgcttgaagaccgatagctaatatggtagcatttcaagtgtatgtaaatgcctagataatttagtaactccatactcaagtttctcctggatttgtaaatctgaattcttaaatgtaagaaacgtataatagttctttgatgatgatggaatctgcacctggaaatgcttactagattatggtagggggaggatgacagataattgcttaacctgtccctttcatttttagaatcacttcatacttttaggactcttgagtattaggagtattcaagtaagacagaagttgaatcggaataagaataatcattaactaactttaaggaatctatatatactattattaaagaaaaagcttaaatgaacctaatgtagatgaaagccatcattatgaccttagatatggatactgataatggcacgaggggcttgggctggagtctggttgttaattgtcctcctactttcatgctagagattgattcttcggtccctttggtttagtgaacttttgtagatgcacagttccatagatgctatgcacaatgtggattccgcagaaaatttcagttccagttgtctatgaacagattaacagtgtccatggataggcacaaaattgactgaggaatcaattttcccccatcacctacctgaagaacttcctttgacagttctctatgtacatagagcaactttgacttccttggctgctattggcagctttcacaagttatttgacatgacgaagcctgtgaaaggaatactgtgaagtgcgtctgctttccatgatgcagaagatgcgcatgttctattgctttcttgttcccctctccttcccattcttaacaaagatgaaagagcaatgaaggaatagctaaataaaaattgacatgcaaagtttctgccggaattaaatgaagtactgtcctgggtcaccttagttgactcaccggcaacttggtgaagttcatattcatgctgttggtcaggatcgtgatcaccaaattggaaaacatttatatcacaacttacatgctcataagacacgagataatcttggagaactacaaactctactcactttttattctcacgcgctcagcaatagaaagttttgctttactactgttacttttcttcactgtgtagatcctgttattgtgattgctacagcctctgctggcagatgcattcagtaatacatgtttaaaagtgttgcggcaaattagtgtgcagtgccatctgcattggagatattcatagttcaacattcttgacaaatttcgagtttgtttataactcgctattattaatgattttagatgttgggcttctaagaatagttaaaataggatctcttcttatttacaaacacagaatagtgtgggtggacgagcacctattgatgacttatctaaaaattgatctccaaaattctgatatcactggtgtctctgcgaggcattactgtggagttgcgaacaataaagcaggagattcatcattaggagttggctacacaggcacccactgttcaattggtttttttttactgtatttatggaagttaaactgttcagtttgacatggataccgctatagtttaccaattgaaagttttcatgcatatccatgataggacataataatgttttttaactaggaattgtgtttttcaagtctgcatcattggtattcctgctttctcctctttgtagcctttgaaaatgcactggataatattatatccttaaggaaatagcttgcaaagtatgcttttcagaaagtaagtaatttctggaagccagtgtcatgactagtccaccaatttctctttataattgcggttttcctagttattctttatgtagccattttggagtgttcactctaagtttctctctttgactaaacgcctgttcttttgaaaatttgcagtttgtacgagtgagaggatctaaaggcatattgct

SEQ ID NO: 9830 - DNA, 4087 bp, Eucalyptus grandis
  Intron number 1 from transcript Egrandis_v1_0.004987m (loc us Egrandis_v1_0.004987m.g) derived from phytozome v7.0 (c hr-ID scaffold_6; pos 34782875 to 34786961 reverse strand)
ctcaggtatgtcaattattatcttagactttacttccaacattcctacgattatttggtcctgacggatggctcggtccaacactgctggtgggcacaatcttgactcgataagtacagctgatcccaatttgaattatcgtgaagaacatgatagataacatctaatcgctttcgttatttgattaggcttaagatgttaggatgaacaatttgtttcagtgattagtatgtcgtagtgcttatgaagttggggatggtccatgtctcctaaacattctttgttctgtgctcaccccaaccaaactatttgaacaaatcattgcctgatactcatttcactggatcaaatccttgggtgtctgtataatcatctggtgattttggaactcccaacctctcagtattacttacgccggacgatggaggactccggcgcatttcgctcctccctcctctagttagtgttgaaaactctccttttctttgttctctgtcccttgatgtttgctttttcaaggtttcaacggtcgctcttcggcagtcaaagatggcctgcgggctaccaactaatttgtcactacataatattttttgttgtttttcccgataagaaaaaattggtcaacaaaggccacccatgaaaaactaggcagacttttcttcataattttccctcatcacaagttgtgggaaggatatgcccctaaaaaacttaaaatgctgtctttcgctggagtggagatgcaccgatcgtgtacatcttcagtaaacagtaaatagaaacacaacaaatctcttctaattagattgggcatttactttataaaagctatcaaaagcatatttatccatgttaggtatctaatatatgtaccaaatcaaagatgagtcatatccattcaatacaactttatacatattagaagtactcaatctattactaatatcaaagcataaatttgtgggccggtccattgatgaatagagtagtgaatatctcgctatggccatgcttaacgccccctacaaggcccacctagatttctctctttgcgtaggttgccacctatattagacacgaaatgactaaacacaacatttaagaggggtaaattggttgttttagtgaaatttaaacttcttcaagaatgacatgtaaaatgtgctgctgtagaggaaaacagttttgaggaggagtatcttccatcgaacatataataaaagaattaaagtgattaaagacgaccaattcatagtgtttcggtcctccactcgatctagttcactcttccgtctctaatagccataaacaaggctacaatccactatattatttttaaaattttatagtttgtagagtgtggcttctacatgaagctcaatagacgattttacatatacaagcaactttgcaacactactcattgtcttcccagattaaaagaatataaccctcgacagagaattacaatcagaaaacactcaattctgcacaaatgagagctagagatttgatgcgatggatgagaatgaaagttgttcttgccaaacttcacagccacctttgatttgtttaaataggacttcaatgttcaaaatattcgttagaagcaatctttagagtcaagggaccaccaggcctgcatttgcgcgattagacagcactctaaggacaaagtaaggcatttctagaaatatatcatctgcttctgcgatgtgtttgatactctaacacgccttcacaaacatggcaaaactgctatgataattaccaggctgctttttgtggattccggggcttgttaacaggtgtgagacagcaatttaaattcaaatcatagttacaaatgtctaagtcttctttgccaagattgtaaaggcacgtatgtttgttgaccatctacattgtccgtagtaggagctattactgcaaagggttcttccaaaattttcactcttctcactcaatcatttgcttaccttttacacactggtcctttaagcatattgaagtcctcatattcaaaatgatgttcaccttctattggtccattcaagctttaacgattcctcattctacatcttattcgccttctacaaaggttcttccagccttagacacatttcctatctaatatcttgctctcaattgtagaagcagtgtattaccatgccatcagacatcttgtttcaaaatctcatctgcatattggcctgtgcatctacaaattgttctacgtaattgaatgcacacacttgtagcctttgtttattttgtcatcttcaaaccattataatggattatttcaacaagctggtggcgaggctgaaaacaaggtgtactgagaacaatatttatgctcacaacccttcaatgggttcagatcatagcagcaagagcataagaccattaacaaaatcctccaatcagtcacaaaatcatttcagaattatttcatgaataaagttcacaaattaatgtatatatccttttagcattcctgccatctgaaataatgcatataatataacatttctcaaactattccacaaataatcaactcctaaactattttaaaagatactttattatgtctgatccaactttatgcaacaaatattctctaaacaccactttttcttgttaataaatatcattatgcgatacctaatttttgaacttagaaatatctatttctaataatctttaggatatacgtgaccaaaaaaaaaaaaatcttcaggacacgagtttaaaaaatatagaagagataaaaactactcatttgagactacaacaaagctgggatctacatccttctatttttgattgattatgttgccccgtttttgttgtggtctttttcctctgttgtattcttgttactttttggttttccttgggaaccacggcatccttacactctctttaacttgattgtctttttgagtgtttgtcccttgtaggtgccgggcctcattccttgtatatattctgtaaaagctatacatttttttaactttaccaaaaaaaaaaaaaaaatacccatttgaaattgtgaaaccaaacaacaaaagttaccttgagccgaaaaactcaaacttcttttaattgagtgagaaacatttattaaaatcaagtaaataactacattaattaagacttgactaaattaagcttattctgtaacaaaacgacttggatgcgtcaacgaaaagctcaaccaaagcagaacaaccattgatatatgtcaaactacgataacttgcgcattgtatttaaagtgattcgtttcaactctttcaatgcccattttaactgggttcggagtttttggaagtcaactcaacatacataaaaggcgaacttagctcaacacaaaagatggctagaaacgggctaaaagcagcaccaaacacaatagttataattatttctagtagtgtaaaacaaacttaaaaacgtcaccccgacctaatcgtaagctcaaatcgattactgtaaatcgtacgattccaagatacccaaaaacttttgacaacatgatttaaagctcaaatagcaaccttgaaattcgaactgatccaaaagtacagtttcgtcaagagaatttattcacttatatgacctaatgcttatgcttcgggtacttattgggtgctccgaaataacgataatcaatcacattaagatgtcctggacgagcatgaaccaaaaccctttctgtctctggcgcagtttgcttttcttttctgtttcccaattattctttttctcttttctctaattttcatttccctattaaacctgctgcaactattataaagaggctgaaggaagttagtttgttgagcttcacaaatgcagcttgcacggtctcttgggcctgagatccttgtttttaaaaggaccatatgtcacagtaaagaagatatttaagttatttactaatgaatctacaagagtttcaccaaatttcttagacacaatttgcatcagattcctgtaactgttgtcaaccctggaaataatagattttccttttccaggatccagcaggcagtttatattgtccccaggtaaa

SEQ ID NO: 9831 - DNA, 1974 bp, Eucalyptus grandis
  Intron number 11 from transcript Egrandis_v1_0.002462m (lo cus Egrandis_v1_0.002462m.g) derived from phytozome v7.0 ( chr-ID scaffold_1; pos 19838378 to 19840351 reverse strand )
cctgaagttgacattggtggttgctgtgtctgcaggtcaggcaattgttataatttgatactttatatcttgtgcatggctggagcagtggcagccttatctatacctctttcctttactattaagcggtcgtgaggttatagtgtgagactacactagcactagatgaattgtaatggtgtgattgagctatcaagatctacaaggtgttgaactggacttgatatgtcagcttaagcttaactgaatggcaatatcgattaagctcacattttgttttgatagtgatattaatacttagggctgacttaaatatttttaaaaatatataacacccttgtttttcctatgaaagtggtccgtgttagacattacttctgaattgatcatgcaaataagaaatcagtggagttgcacaaatttgagatcatcagaagttgtcttatatagtgacacagggaagtcgactaaactggagagacgccacgcaaactggatgaccacacgttaaaatttttaaaaaaggagtaaactaataaccgacaacctatctgcgaagtgaataaaatcctcttcaaatcttctatgaaattgatagggaataaattgtaaaatctgaaatcagtcacagcagaacaacaataatgagtagaagaggaacctccaattaggtgccatttctcaattgtgagtttgagagagagagagagagaagggggagaaaaagaaaaggcaagggttggggggggggggggggtttgaaaactctgcaagatagaaagcaataaaaagcagagaagaccggtatagataagcaggcataagagcacatttaattctttagtttttttgctatatttattggaaaaaacaaggcaccagccacttatgcttgtgtttttaacctcttactttcatcttttcctattctttttttttgtcattattattactgttaagtttgtgctaaatgaaaatgtgaaaaccgaaataaagatatcggtttcttctgagataggcatgaattccccaaaggtatatagattttagagttcagatgatggtcaaagggaacataaaactatcatgggagatgatgctaatagtcctcattgaagtttttttttttttttttttttttctggatggctggtgttcatgccttcatgcttctattttaaatctatctcctttctagacagatcagggtttgttgcaatacatctctctctctctatatattcgtcttctgaactgccttgtgactaattttataatctctaattactgcttccagaaagttttgtttgacagcaaaataagcagccagataagtttaatggaggcatatattcatcagtttattccattcttccctcttttagaactttgcttttttttcctcttgttgtttgtggcttataaaagacaatttaggtttagggaaggtactctgatgtccattcttttctttaaagtgcatatattgacacttaatggcaatcccgccatgtcatttctatagaggacgggaatatcatacacagcatcactttttcaatcctccttgatatgtatgtctatgattttttttttaaatttgctttagagtttgatcttcccaatttcgattattttatacatgcagttagtggaagttacagccataattcatctctctagtgattgtagtaaaaattaagtctaagtttcttgttttaaagaagattcagaacagggagctacattcaatttgacattgtagtcagtagttaggattcatatattgacaaacgcgtgtagttctgtttcctttgaagttgatttaatttatctttgtcgtgtttaattgtttgattctattcctattaaggttcaactcgtctcctcccctctcccctcccctatatctttttttcttttttcccctcttcttagaatttcataaatttcacatcttttacttcaggagcc

SEQ ID NO: 9832 - DNA, 2046 bp, Eucalyptus grandis
  Intron number 3 from transcript Egrandis_v1_0.001118m (loc us Egrandis_v1_0.001118m.g) derived from phytozome v7.0 (c hr-ID scaffold_5; pos 31002105 to 31004150 reverse strand)
aaggcagtatcacagaagtcgtaaaacactttaaggtgagcatttatctacatagaccgttttattatcctacttcatttgtatgggcatatgcgtgttagatgtactattattggtacggaattgggttccactattttagaagccacttctctattttctttcagaaggacgttaactacttgcgttggaaataatgtgcagcaaactggcatctgaaaaactgagggaaacaactttactagaaatatccaatggaaacttattgctgataaaatacacaatacgaagaaattttattataatatgccgaaagagaaggtcattggatcatgagtaaattcaaatgttaatatattgaaatatgtgagagataaaataaaataaccaatttcatgtacttgtccatgggttttatatttgtaaaataagcaattgaggctcatggatggaaggaataaaaaagaggttgtaatccctcacaattagaaggctttattacgttatgaacaaggacaaatatgtgtgtgtgtgtatctaactgttgatgtagttttatttcaaaatcaaatctacctagggaagaaattaaaaatgcaaatatgctagtataagctatttcgcctaattctaactatgtcactagtttacatatgaacatttttatatacaaaaaagaactgtataatgatctaataaaaagaataaaaaaacacgatgaaccaacccgttgacatatattcaaaagaaaaaaacaaccaaggaatagccggctgaatgaacaagcatttgatttaggtgtggttggtcagatatatcaattacaatatctcatattcaaaataaccttagaggccacgtagtctccaagttatggagggttatccaatgtatgtcgtaaagggcgggttttatcctgcaccgtgttgtaaaagaggcatcattaattgctcaaatcaattctgaatgagaagcatttctaagcacacgtaattaaatgtttattagacatctttctagtaatgcatgtgcaactaattccatataagtgatctcgtaggggcatgccaccaggaattgtcaccaattataaggtgatataaattatacctaattcattaaaaaaaaataaaattggcatcccttaattcaatatttgttctcaccaattatgaggtgatataaaatgtctctatccctataaagtaaaaggaattggcttttatcatatcagagtaatttagaaatttaaactaactagcccttaatatttttccaggtttgttaacacgcaattcttagataccaaatgtaattatctgaagtatacataaaaaaaaaaagaattatatcatatttaatgtatcgaaatatcatatggtatgattttattatttgctaaaattattttttgtttgatttatagtttttttttgtttgtaaaattgacgtgtaattttctaataatcatggtatatctttcattggtggagtatggagaatcatgttatatctaactgttttgatgattgtctaaaataatttatttgtgaaatccttttaatattttgtctttatatattatataactctttatataatatctaaaaataaaatgataagagttatcttttattcgctaatgtgatcatgaaaaagaaattgctgactaaaacttgctcgtgagtgtatgactcaacctcgcataagcttttattgtatatacataaaaaattgtatttaccagtaaagtttctaagggtttagtaatttgtcaatactatgtatataataactttgaatgaaaagttattgataggttaagaaatttacttagaaccctatatagtagattccaaattgcctgatctaaggatgcttcttgcttccttccacaagaagagaattatggcctaaggatgaaaatctttaaaagcagcaacggcattatacaagcacccttttttccctttcagaaagtttatggtagttggttttattgtttttgcaggacttccaaaaactgaggtacattaaattgagcaa

SEQ ID NO: 9833 - DNA, 854 bp, Eucalyptus grandis
  Intron number 8 from transcript Egrandis_v1_0.038331m (loc us Egrandis_v1_0.038331m.g) derived from phytozome v7.0 (c hr-ID scaffold_18; pos 124566 to 125419 reverse strand)
ggctccctcaaacaagtcttgcgaaagaaagataggtataaatccatcttaattatgtacatggaacttaatatcataagcagacaaacaaataagtttaatgtcaataatttgaagttggaaatttaagtacctgacctaatgctgctgcttgcttttgctttttgtggattcccatatatcagttttaaaaccagttggtttggtttagttgccttgacatcctggaattccgaactctgtgaattatcaccaagatcataaagattttaagttttgttgcagagagtaaccttgcattagcccgtcactttgtattctggcaagtttattctcctgttaccgtctattctggcattaacttggcttgttcaggtgattatagggttgtcgacattcttaatgaagttgcagtgaccattgtcttgcactgttctattctaaagtcccggaaccaattcctgaattgaagcaggcgcatatgcctcctcagtactgactaaaacaaagaagttgatccaactctatgcttgttaagagggatgaaataaattatggagtggagaacgttggcaggaaaggaaaaagcaactcccttccctgtaaggtcttcagtctgaaattcgaaactgaagtataagacacgttctttatactgatatgagctgtgggtagttgtaccttagaaatcttctcaactaaaaccatttgtgaaatattcacatgaccgtttcatctctgttgtgcggacaaattcctgttttggcagttatggaatttaatttaaggccaattgcttatgtttccactggatgacaggacgattgatcgtcgtaagaggctgattatagcaa

SEQ ID NO: 9834 - DNA, 1867 bp, Eucalyptus grandis
  Intron number 12 from transcript Egrandis_v1_0.000011m (lo cus Egrandis_v1_0.000011m.g) derived from phytozome v7.0 ( chr-ID scaffold_6; pos 5459568 to 5461434)
tctcaaaggtaatactttgtatatagttgataatgcatttttactcttatctcatatggtgctttgaagttattttgctaggaataccattactttgtcccctaaattttggttgaaatattctttccattagacaagctgccagggcatggtgataagcagagcatttgtaggttttagctggtcatatcatctcgagacttagctctgtatatttcctttaataatatattttggatcattccatctttaacgactttagcctacggcctgtaacgtcaagtcctaacatcctcctttgtttatcctacctctgtgcagctacattagatattgattttccagcaggtaatctaaagatgacaatggtgtagattatcatttcactttatgcactcttggttgttctttcacattgttggatccaataacatatttgtggctgtgttgtgtgggaaggttataacttaaagttaatttatgatcttgtcgagaaatccctttttgtttcaagagcagtcctggtaatttgagtgcataactttggatatgccttacttcatgaagtatggaacatggaataactgcagtgatacagtgagattgtggtgcctttgtttgggcttgctagagagatgcactaagtggatctgtgcctttggaataacttttacaagtattacagtgcttgttatcttccatctttaaaattttccatttggctatggtactaaaacgttgtccctatcgacttgaattacattagtccctccagtcaagtgactccaggtctgcaatggagaaattggataaattcagataggctttttgtgacatgctcatatattggttattgctattaaagagttcaaggtcattatcttcatcaatttcagagatgctgttcctgtggttatggcaactgtaaagtaggaatatctcagggataaattaggaattctgtgctttaagtaataatgttaatctaattgggcagttctttggagaatgaggatacttagagtgttttcattatctactgactgatgcttaatgttttggctgcatttagtagtgatcttactcaaagaaagttaatgatctcatagatagtaggttgaattgttggggtttacaaaaattgaattgcctttctaggcaaattggtactcctacagaggctgtacaaattgcttagtcattttagcttgaaggcacagcaatggcgtttctggttccttattgatggaaatatttgcaaaaacttcctttgaaattagtagcttctaatccttccttattggaaagagccttcaggaagagtgttgattgtttctgatcctttcaataaaactgaggtttgatggaatcatttgaacatcgagtgtggtgaggacaacagtttcacagttctagttcatactttgcccatttattctcatgcgagcacatcatttttgtgaaacctgcgcacagtatggtgtgaaattttcaaccgacttttgttggattttcatgaaataacttttttcattaggacaacctatttggcatatgtttaatgagtgctgatcatgggtaacctctattcatagaacaaaagaaatattttcaggtagatccaaaaaatgagtaggtcattctcaatatgttgaaagattgaaaatgacctatctataagtaggttttcttattctgagcatattcattttgttgatttgacataatctttctttgtactatttttctgacccagtagaagaaataatcgctgtgcaagaacttataattgctaggttgttctgctattggatttctcttcattttggcagattgcattcagagcgcttgttggcagtggttacca

SEQ ID NO: 9835 - DNA, 1892 bp, Eucalyptus grandis
  Intron number 4 from transcript Egrandis_v1_0.001036m (loc us Egrandis_v1_0.001036m.g) derived from phytozome v7.0 (c hr-ID scaffold_7; pos 230485 to 232376 reverse strand)
atatctaatcgcgtcagtgcctggaatccattcttgtatgccacaagacactttggatctgactgattttttgtctgtaagtgttctattttgttgcgtagttctgtcacttgggaagggatacgtcatcaaaaattgtagtaggagttattgccatagctcagttggagcggaggaatcatatctgattgagtctgactgtcgtttgtctcaccatctatgaaatagcaactataatagggatagtgcaggtacaagaaaagacgtggagaaaaaagtaacagaaggggttggattagttggttgaattgtgataggcttggaaacattctctttttgaggtcattcacttttattttggtaatctagttgttctttcgcaatgaattattttgaaattacagattaactacaatacaagctccaattgattaaatgattaaatagacttgttctgtctgagatttttttccccgaatccataagcctaaattagatacaaaatgtataatattctggtcctttgaagagctagcaaataagagttagctggtatctttgaattgcgtgagaatgtgaaggggttgatgggctagggaaatggtctgggacacaaatttaccaaaaccagattgatgaatctggatcacagattggaagggaatatagcaatcccgggtacgtgtagccagagactagctccagtcaattgtcatgagatgaaaaaagatataccttttttggaagcttgatctttcttttcagcataaaatggatcactgaagaaaaattcctcaagattccttgatcacaatatctctctgggactaaaagagggcttgtgaagtttgtcaaagatgctagagagtcttgccaaaaagttgctccacttaaagagtacatttatgcctcattggtcttatgctttaagcttgtgacatattctcacatatttatagttttgctggaattgtgacattgatgaagtgtaactggagggtagtatttgggtaggtcatcaaagagaggtttttggtgatttaaatgtttatttttggtctttctcagtttttaagcttcgtccatctcaggaatgcatcgctcaagaaagctttcatcttggactgctgctatctttttgtttgatgtctccagacttcctatgagggaaattggtttctaacaagattatttacagatgtttatttatttatttatttttttgctatgggatcttcaaataggtttactacagacaaagattttattctctttttttgtttttgtttttttttttttaaagatcatttgtaattcatagagagatgcttttaggtgcttgcaggaagggccatttcgggttacttctacttaagttttgactttctgtaaatctagcaactctcacactgtctttatttaacttgaaacacctgaaacctttcaaaatattccaatattgacatgtagaatcatatacaatttcttcttaatttcattaaatttaaaatattttttactttttcattgcaattttggagggaagttatagtaggagtaataagtggtttttaggacttccaaaatttattctatattatagtcatagtgttaggaaatgttgcaggcagattgttcatgatcttcagcataaggtagacgacttagttaatgatgtgataatggataaacataatactatactatcaattccttttaaccttaagttttgctttttaatcttttatagatttcttaggacatgactccatgatttcattcttcacaggacaatcacagcacgtcatgtttagcgtttccaaagcacattgccatggttaaggcatccattgctggcgtaagtcacctattgcatgcggtagcagactcag

SEQ ID NO: 9836 - DNA, 1194 bp, Eucalyptus grandis
  Intron number 11 from transcript Egrandis_v1_0.017349m (lo cus Egrandis_v1_0.017349m.g) derived from phytozome v7.0 ( chr-ID scaffold_11; pos 18117249 to 18118442)
cgtatcccttttccacgtcaagctgcagatcggaagtaagcattttacattttacatatctcctagacctttgtgtaaggttgattttctggtttatgttgctcttttaaacattttcagcaatttcacattcttttcaaaatggacttctgagcttctcttcaatttgttgttgcatgtgatgcaatagatataggacatggctggtaatgtgatttgcttaactatgttgcagtagtcaaagtgcagtacataaggtggcagattaagtcttcatggattagtttagagttttgtccatattcttgtgtcctggtgcaaaaattttgaatggtccctcagccaatgtaaatctataccttttgtattggcttcccttaattttaagggcattccaatcgaatcagtgcttaggactgaatttcttaagttatttatttcttttgtttggatcatggctcctgtctcttaatccaaattgactgtttaagtagggaccatggaaatcatccgtggtgataataagcttcccctcctttagtaaacttcagaaatttggtccccctttctgttgaaagctgttgttgttggggttatgccataaattgtcgaacatcgccttctttcttggaggtggtccagttttgtgaattttgatggatagttataaagatctcaatcttaatgcacacagaatgttatgttagatagagtgaatgatttcatgctttttagatattaaaagacttttggaggcttttatttgcaaatctattgcagaaagggcagtagcttcttgatcttgtattatccctactccttgttgtcatctttatattagaccttttctttttcaaactttcaggtaccattttttagtagttcctgtatgcattgattttgctctctcttttcctctcacgaaggggaaaaaaataaaataaagaatggctggcttcatttggtcagcaaaaacaggactgtttctgtgaatatcttcttttctttatttcttgatcattgatgattcttctggattactttattttattgtggttataacatgtacacctgacaatgctagaacagcaggcaattaaaaagtgtgggggaaccttagcttcttagttcatctattgaaccaacacaaccacctccctgacggaagttgaattaatcttgcatttctcaggg

SEQ ID NO: 9837 - DNA, 5670 bp, Eucalyptus grandis
  Intron number 2 from transcript Egrandis_v1_0.017951m (loc us Egrandis_v1_0.017251m.g) derived from phytozome v7.0 (c hr-ID scaffold_8; pos 69719064 to 69724733 reverse strand)
ttcttcgattctagatctgtaccgagagcattctggttagtagacatggtcttgtgcttttctccggcgtgtcgctttcatgtgcgattcttgcttcgtggttttgtcattcatggcttgagtgttgtttgtcgggggaggcttcggttgagagggaacgtggctcggggaagtgtcgggtttcgggttgttatggttattatgagaggttgggtgttaatgggccgcgggccgtggtggcggtgctggttccagcaggggagctgtagtggtgcgttcggtgaggaggggagtcgtcgaggaagaagacagatttagagaaggaggggaaaacggacaaagagaaaaaaaataaagaagaaaaacaacgtagaaaaagcgaaaaggagacgaagacagaagtgggcatcgggaagagagaatcggagagaagaggtgcagggaataggacaaaatagggaaaagacagagagaaaaagaaaaagaaaatagaaaattttaaaatatatatatagaaaaatttcgtttttgtaagccaactaggttggatccgagtttgggttaggtcaacgagttagattgagtttatcggtttgaaccccttccgaatataataatgtggaaatgctacacgaactgatatataaaaagaaagagaatcaccttgataataaaccaaattgagctgtaccaacacgtcctctgtcaccccccgttgcgcttacggctctataccccaacccaatttgctctgacacatagggtctgtttggttcagcattcccaaggggctttcaacctcgaaagcccattgggaaaaatttcaaccgtttgattcagcatttagagccatacttggggaaatgctagcatttggaatgctctggaatgctgaaagctcagtttctattcctcagtaggcggaccgtggcgaatcatagcctagttccttggtacttgagagatgagacttgccaatgatgagattgtcactgcttgagaatatgctctggcactttcatttcggaaggggtattaaatattaaaaatatgttaaaaaactttagaattaatttttttaaatgaaaaaataaaaattcaaaaactttaagagaacattaaaaaattcaaaaactttcagaaaatataaaaatttcgattttttttaaatagaaaattcaaaatttcatttgaaaatttttataaacaaaatttttgagctattttataaaaaaaatggaagctttttgactctaaagttatgctaaaaaattgagtaagcccttagggctttaacttagggttttaattgttctcgaagacaattacccttgtttgtatgtttttgctgtttgtgactccctttagtctagttaggattatcatttatctatttctttggcgttaggtattctttctcttgtaatctatatgatgctttctttagttgctgattgttacgtaattattgtgcactcgtatgatcacttcacatgttaatggataaatataaaatcaaattaaactacatgacaaaaacatcatttcttttaaatgaacaagattaagtatcgaaaatgacactaattggttaattagtgtaattaggtcctgattctagattttctggttgcgcagtaagtggaaataagtggagtacactttcatacttcatttggtttctagatgaccccaaaagattagcggcgacttcatattacaaagttcttaggaacattcccatggcacatgatatatgagtttgggagagttggtgcctaatcatgggtcttaagcctgtcatttaggcaatatttctaaacctatttcctcccttaaggaataggtcacgacacctctaaatcttatctcgtgataggtagttgaatttccaaacacaatttatggatggcctgcaaaattctaggtggctcgtatataatccatttatatgaatatgggttaataaatgggttttggacccattttaacgggtatacttatgagcctgctattaacccttttttgtaaaactattgaggaaatatttaagctcgaccgatactgtctagaagagtttaaccaattgtttgatgaatagcagaagtagagcttgtagtgaaggcattgattaaagcacatgcaatcccacaggtggtggcctcggtggacccattcttcaaggcaacaagttagagaaagaaaaaattgccaagaatcaaatcctatgtcgagtatgaattgctaaaattctttcgtataaaaatggttcaatttgaattgtaccattttcgactcgatcctgctcacttatttcaaacatacataaaagtatcgagactcccgtaaacaagactcgtatcttaacgggtatttcatgactatttttgtcgtaataccataatcaaaatttctgctccgactttctccatggagtattttagctatctttgatagtcttctctcaaaccttatctttggtactcaatgagtgtaaaagaagtgacaaggcacttgttgaacaattagatcgaaaaaaagtgtatgatttctagtgtactaatttttctagcattatgtgtaatgaattatctaaaagttaagaaagttcgtatttcaatataagactatctaaatacgaaatacttcagaaatatcatattaatgtaacgatgttgctctatctaagaaactaaagggaataatcaaaagagatgaatagatcaaattgcagagtacttttatttgaatttaatgcaacgtgtcttgatgtacaactaaatcattttactagaaaagaatgaacatttcttttcataaatttggttagcttgcagcttttcatcaatagtccctaataagtctgttggacttggctcaggaacattcacaaattgatcaagtatatggggaaaattataaaaaaagtcataaatttattttactatggttctaaagatttcatttgcactaatttagtcataaacattttgatggtttattaatttagtgcattcaatcaattttgattgtaatttgttaatgcaaatgctagttgttttagctcgcacgacaatttctaatgtggacgtttctgcaaaattttcgatttttaatttttcttttcttttctttatcttgttatgcacatagttttgtaagaagtactagcagtctctgagagcttttgtgtcgtgtcatgtcggacacgtaatttcgacacgtgtccaatactcggtcaatacgtatcgaaaaattcgacacctgatcaactttctcgacactttccaacacttgagttggaattccgatatgcgagttcctaattttgacacgcgggattaattttaaaattttttaataaataaggggttaaagtgtatatatatgaaaaataataaaaataataaatagagaaaaaaagaaaaaattagtcttttattctcttttgattctcacttttcataatacaaaatttacacctcaagttttatttatttattttcttccgatacgtctaacacgtgaattcatgatgtgaattgcttgttttccttatccaaattttatgaattattggaataaataatgatattaataaatgatagattaatatttttagtataaattcattctagacttttttttattaattatttatttatgaatttgaattaaattaattttattgaaataattataaaaataatagtttattatgtatatataattttttttatatacaacacatttcttttttttttttttttggtcagtcctactctaatcctactctacactcactcgcagacttgtgccctgcctcttgcagggcgtgggagtcgcaacccactctcgaaacttacgcgtccctacccccatccccccctgaggaggtggggatttgaacccctcacctcccccttccatgttggaagggtggccactggggcgaacccccagtggttatatacaacacatttcaatatgtcgaaattctctattttttaaaagtaacgtgtcacgtcgtatcgtgtgtcatgtatcgctacttaggctcgataaggctcgagcccttggtcagaccaggcgagcctcttgtgctccgacgactggtcattccacgccgcggtgatcgagattactcagatcctcgagagacggctccccgcactctagaaggactcgggcgacgacacgtggcatgctgacgtggcggtggactcgtagaagggcggggcgaagccgagggcggggtgtggagcggccgaggtagagagagagagagccttaaaagctccacatttacgtcctcacctgtcgctctgccaccactgccaccacttcatttctgggttggtccaccacccttcacgtctccataaagcagtgctgccaagaaagggaagaagaagaagaccctaggggacacacacacacacacactctctctcctctctctctttcgtttgcttttcattgtttggtagatcctagaggcgaagcgatggcgaaatcgccggatcaagagcatccttgcaaggccttcggctgggctgcccgagacaagtccggccttctctcgcccttatgtttctctcgcaggtatcgtatcaggcgacgagcccgggttcacgttttttctgtatgagtgactccgcggatggtgggttccctgtggttttcgcggcgtttcgtccgcgcgagttcctgcatgtgatgtatacacagagagagagagagagagagagagagagagagagactatggacgtgcccgatccatggttgtttagtttaatcggctacacgtgacgatgttctacttgcgggttaggtgataaagtattcgggtgtgggtccgggttctacttttggccgtgtgttgattaacacagttggtctccgagtccaggggttccacaaccaaacaggtctttatcagatctctgcagtgtgcaacggagtagattagatcgtttcttcctgaattaaactgagaaggacgcatcgctttcttacgccttggacttatatggcccaattattggtcatggacatgtggtgaaagttctgtttcagtaattgaccctgaggttaccctctatttcaagttttagacttgcctcctgtggatcgcctgaggatggcgaaatgacgcatgggttgaggtgatgggtttttccagataaaaaaataggttatagggatgaaaaaaggggaagacgaaggttgaaaggcatacaattgatctcagggaaacaagaacgaaacttgggttgatttcctttttgaaaggactttcctttgagctgatgttctccttagtgagatgacggctagagcttttacagggttggttttccatcgatattgaaacctctttgacttctccctcatccctgaattggtgttttttctttgctatcttattttgaaattcagttagtgctgctgaggcttctatcttattttggaattcagttggtgctgctgaggcttatggaaatgtagttcttctgatgagctaatttagtgcagaacagtgtcaactcaacttgtgaaccaaacacttttctgaacatacaaataagagtctgcttctcgaagtaagtgatgcaattcatctgaagagcgtgtctgacactatatgtaccattttgcagggaaa

SEQ ID NO: 9838 - DNA, 2851 bp, Eucalyptus grandis
  Intron number 7 from transcript Egrandis_v1_0.001404m (loc us Egrandis_v1_0.001404m.g) derived from phytozome v7.0 (c hr-ID scaffold_10; pos 91549 to 94399)
aagcaaagcttcagattcttaacactaattttaaggtaatgtgaacagttataccctactttattttaacttttgtgtgaatggtttcgctaaacccaccttacttctttttatagttagttttcaatatatttattctgttcacatagatagtaaactctatactaatcaacaaactataatggtataaaagacaagttcacaataattgaggtgaaaatcagtcaaaatccagttgaagttgaactgattttggtatatgtatgccacttgctcatattgcacattcctaactacttcctacatctagccaagcaatcacgttagagaaacagggcacattaaagtttagtgaagaccaactccttttcaactgtgctaattgttggtaggcaagtttctgaagatatgcatcgatgtaatcatcaaagattgttatagaaccaaacaggtgattgaaattatagatggatggaagataactttctatgatgttgatgaaagttaatatgctctatctagaaaagttgtctaacttcttcaattactgttgttaaaacaactaagccattcatgaattgtaaattgaactgcattggctaaccagtattgtctcccccttaccagtactgtcattagttatttagaaaaaaagttgcagaatttatgaaattatttggtgtgtagcattactttgaaatgctcccataatcctcatggcaagaatggatttcattctctatttttacattagattagattagtaattagatatttctgagcagtacagaatttggcaccagttatgcatgagagtaatacaaggtgcagagaagaattcatgccaaggtttaacaacccagggggtaaaatggcgagtttggaagcttaaaaatgagatgctgtggagatacttaaatttgaagattgtgatttatcatggagtaaatttagcagaaaatcaaaagaatgaaagagcaaactggagtcattccacgaagaatctgaagaaattgacagtcagaggatttgtatgaatgctttgactaattttcttttcatgtgaccaaaattacactagtaggtcagagttcccaaatcacgtaagaagtatttgattaagttcagctggaattgtcattatgtgcttgggataccttttccacttgttttattctaactatttttgttggctcatgcttattggaattggtcggtttggttctgattgctgtgttctcaattattgttgtcaatctcaagtccactgttcaaagtcacccttatgctcttaccagattcacattgtattgatgcttggaactttgtatcttgaactaagttctccacaaggtgatgttgttgaacaggcttcatttaaggtgttgatgtactgagacgtggggaatctagttctgttgttgcctctaaattatatgttcatttcttataggtggcttttaattactgggtgtggagaattgttttgatcatattgagcatgttggtgttgacttgttatgcccaacctacttcacataattgtcacagttaatttttaggaagtgatgtaagaaatttgaagtaagtggacatgtcctaggtaattaccgattgcacttattggagttttgagatggaaatatctattccgtgatgtttaagtgccaatgccaacttttatatgtttatctgctgagtccacttatggcacatgtggacatgcacatgaataaaaagtcgagatatactcgactcctgggcttaattactgttaagcagcccctgcttacattgggtcatattggcctgactaaatagttttgaggttaattattgacactgggggatcctttgcccgtttttgacacatagtagaaaggagtgccactacagtatggcattgaaggctttctctcactgcttagtatgtgtatgtccgacacatatcaatgaaacttttttaaagtaaactttcttactttaataacatcaccttggtgaggacaagccttggcataaaagtgaacttaccagccttttactggattgtgagttcgagtcatgttgactgcctctttgtggaaaagcaagggaaaggctgcatatgatatatgatgctcccacagtgaggtgcctcatgcactggggcgccctctaatgaagtcagccatagaaatatctggaaataatttgagctgttaggtttgttcatgctgtcaactttagacaaatatcacactgcattgaatggttaaatagaggctttagtgacataactatatgttatggctttattttgacatctgattttttcacgagaatcgtatttgtagtgtagttcattgatgaaatataatataattctatttgtcattctggccacctcatgctgtctcagcatctaagatggtaactatttcctttgggctataatatattgaactttgtctctcttcagtcgtaagtgaatgtcttgatgagagcatagtcatttatatgaagcaaaataacaaaggctgagaaaattcaaatttcttgatttgcatgacctgttttacttggtatatcaaggtagacaagccaattgaaggaacaagttgcaatttgaaaattgtaacctgaaaatcctcgtccctgtatctttaaaaaatggttatcttcagagaccaggagcaatgcttactatatttgtttacatatcacctgtcgatctctgtgattgcttcagtatatgtacttcctttgacctgttttaccatgcctatgcatcggtatatttactataatactatatacctattaagtatgctgaagaacaatcatgtaccttctctgcaggtcttgtttg

SEQ ID NO: 9839 - DNA, 1750 bp, Eucalyptus grandis
  Intron number 17 from transcript Egrandis_v1_0.000331m (lo cus Egrandis_v1_0.000331m.g) derived from phytozome v7.0 ( chr-ID scaffold_4; pos 33286810 to 33288559)
cgggtggactatttgagataatatactctggcaaggtaaggattttgtcttttttctcttgatattgagaatgttaagttaaggtgacaaatggagtagtaagttcacttaaactactacttttatatgacaagctaggacattgcaagattggttcgtctggaaacagcttgaaccagtgaatagtaaaaactagggttcttcagtgtttgaaattttggaacaattttttatacgttgttaccttgatagcattatcccatctccagtagttagactcccgtcacactagcagcaatagtgtagtcaccatgatactgccactcgttttagaatgagattgtgattgcagctacttaatttgaaaatttgcttggagaaataagtacctaaatgggttgaggttgcatggttaatctgtgaaacattctagttgagtatactgatgttcgtaaattatcaggtgtgtctaggattcatatcaaaaccaaaatcttaaatttgttaagtatttaaaccaaaaaaaataacttcattcttgctttagttcaaaccatcaacagtttgtctacctataataacaagtccaatattaactcagtcctagaactgtaacatcaaatgagtaacctttaaaaaactccccctaatgctaaagaccataagcatgcggtcaattttaaaatcagaaacatagttttgttgtcttaacaatgagaggggaaagaaaaattattctgcctataggaattttaattttctttttattgtttataaacattacatttcacttccaatctgtaatcagtgaattgaacaaaaatctacttgttttgggaagcagttaaactgaaattgcactgctaacacaatgaaataataagccagaacaaacccggaccaaacaacccaaattagctcaggtttttatttttgtaaacacttggcagtggagtttaggaattttattttatttttttatttcagtgcttcaagttagaggtgctgcacataagatccttaagaaaggaatgggaaaacctacctttttttttcttggggacttgctcgatacttaccttttgcattgcacgtggtttcttaagtttgggaaggtgtcttaagatatactaagcctggaatattgcttctgatgaaccaactctcaggctagcattttaatattgatgcaagctccacagacaaagtcattgtccatgctttaagcttgagattgtttgacacaggagaggttctgagaatttgccaaaccaagggtttaggaatgtcaattcccttcatgataacttataagctattaactgccattaatacatcgtagggttctgagacgaaatttatcaacttttgtttctcttttaactcattggaatgtttggatgttgttaattaacagagatgacaattctatgaaatcgagaggcttcatacttattttcatttagtttgtgagtccaagtatatggttagctccatagaaatgtttgtcttctaaatgcccgtcacatccttaacaattcttattgatcattatctatcttcacgtatattaagtggttgtgctacttacctgcagagccatccttaatcagtaccttgactagtggttctcttttttgtaaaattgatattaattagtttcttttgaaaaaaggatgacctgtgtttgaatttcaggactacctttattttagaacgttataaacttctatttgtattgatcaggggc

SEQ ID NO: 9840 - DNA, 1426 bp, Eucalyptus grandis
  Intron number 15 from transcript Egrandis_v1_0.000962m (lo cus Egrandis_v1_0.000947m.g) derived from phytozome v7.0 ( chr-ID scaffold_7; pos 44868228 to 44869653 reverse strand )
gtattgagaagcagaagtcctttcaggtgctcaaggtactcaccgtctctactttttgctcgtaaaaattgtgaatgaactctctacttttttattgtaaattgcaaatcatctatttgcaatgttatcattacaagctttctgccttttgaggatggtgtgccctcgtatgtttggaatgacgtagggtagaaccattgcatgagcatgatataaagacataatatttcccgctgaagggatttctgtaccctccatgcttaaatttcttgttcatcaggatccaccactacccaacacaaaccagtattctatgctgttgatcctcaattttgagttttagtttgtagttgaaatgatatcaattgactcaatgaatatatcttttctgcatttgtttatttcacaggtcagttaaaatggcgtaacagtttttttattcattttaatttccattagattagaatttttcatgaagccttagatattatgctctattagtctcgtcatgacagtaactatgaggtggatttgaagtcatttattcctaattagaagggaagctggtatttttaagaaggctttgaacttgaagtggactaataaatgatttgaagtcacttaatgttctaaacaaatgctaagcaggataagggttccttattttccgactcatcaattgtcctcctatgttcatacatccgtttactatggctgaagagatagtacaagaagaaggcagaaagatgggtggattgaagtatctgcatttccatttcttctcaaagagggtataaccaatattttgcaatatagcgaatctgttggtggtcccaattaatggcatttggccaactgcttactggtttgtggcactttgatggttctagttactgaagctgattgcgcagtttccatatgagtgcatggaggatgtttgcaaatctgcctatctttagtttttgttatggatgtaaattgcaccttgagcattttagttgaaatccttctgcttgtttttgttattctttctacgtttcttgagtacattcatgcatgtcaatttgtaggcatcgagtctggttgacttaggtttctccagtgcttgttgtatctacattatgctgtggtgatggcatgtaaatttgggtgttgatatgctttgagtctgtgacggatctgtctcatgtttactccacaataggtgatcgtggatatccttacttttactcgcccttctccttagttctgttagatgaccacttgctgcaggtgttcatatgcagcatcctcttaaggtcaaactgcatggcattctggcatcccaacttttaaaatacctttttgttctcctctttttgttgtattatctaatttatgtttcttcttaggcggaagtttttaaagagtttggcatacctattga

SEQ ID NO: 9841 - DNA, 563 bp, Eucalyptus grandis
  Intron number 1 from transcript Egrandis_v1_0.045968m (loc us Egrandis_v1_0.045968m.g) derived from phytozome v7.0 (c hr-ID scaffold_5; pos 65586468 to 65587030)
gacaacttctacgttatcttacccagcctgcacaggtaagaaaatgaaatctattggaaattagtaggaaaagaaagctatagttatcgctgcaaacttaacttctatgcttatatatggttagaacaaaatcgaaaaataacgattaaattcactggcatgatggattctttagctttgaatgttgacagaggagatttctacaagggtccaagatcctagaaaattgtttacacccttatttttatttcagtcccctacgaagaggtcaacttttagcaactcattttcctggtctggctctgttttctcagtatttctgttagtagcttaggttgctttcgttcagtgagtgcagtctctagtgaaacttatatcatagagaatctgaagagacttagcttatatatccttcacaatggctaaagccaaatatgcaggaaaattactgaggcaatctacttaagctgaaaagttctaattagcctctttattattgtaggatgcacttcacaattggcatagacattaaatctctctccatagcctattgatacttcagg

SEQ ID NO: 9842 - DNA, 2166 bp, Eucalyptus grandis
  Intron number 3 from transcript Egrandis_v1_0.013589m (loc us Egrandis_v1_0.012547m.g) derived from phytozome v7.0 (c hr-ID scaffold_8; pos 71475394 to 71477559 reverse strand)
caacaaagccgtattgtggacctagaaggtgtgataatttgattgtaagcatgtgttttcctcatgttgtttctgtagatgactggaatgatatggattgtatgcaaccttgcagcatatgaatcttttttagtatttgtctggctctgtgcgtcaggcatattgcattctgcatttctggattcagccaatttggagtttgatcgcatttgttgtgatgcactgacttatagaaattcaaaattttactgagcgactaaaactgaaggagattaattatcattcttgtgctgtgaagttctaatacttgacctctctttgatgttggaagaatcctgtttatcattcatcctactcaatctgaaatatatttgtttgtgaatatgccttgatttatttgcttcaccatttggtgtctgaaattcagaggataagaaccgacaagatgaagaatatagccagatgaaggctcttgttcaagatcttgaatgtatgttagctagtatttctgctccatttgtttgtacttctttctcattttattccagcatgctcattctagttgtaatccagtagatgattttaaatataatgttatgaaggccctaagtctattctactaatctcgtattttgatggcctttctaaaagaattatgaaatgtttgcaatacaaaacatttagtattgtgactctgcaagattgtcaaccgatacacttattgatttatgtagaagttattgttaattttttttacttgctataaaaaatttgtaaatgattatcacgatcaaataatcattgttgtggatgcaattttctagatgatgtacttttggcttcatgaatgtgtacaatatttatctacgcagagctttcaattgaatttacttcttcttttttttgttaactttcctttctctattaaattgggcatttagtatttcttatagataatggaggattttgttaataagagaaatgttcttgtacatcagaaatgtacaaaagtacaaattgaaagaaaaacaatcaaacaaaagaaaaaatcactagactatatagaataagacggttaattgttggttttagttagttgggcacattatggatgcatgagttgtagaatatatttagattgatagagataggcagcagaacctaaagctaccatcaagcaggacgcattcaaaagagaaaatcacacaccatgtgaggcaaagccctttatatcacataatcccactaaaccgggggttggatatataaccttgtgcagctcggaaagtttgcaaaacatatggtatttaggttctggatcagaaaatattcagtgaagggattgacttcttggaaattcttattgagtatatacgtcaaggtttcaattttaccctagcttttgtatccttgctgcttctttgcccacttattgctgcttcactgactacttcatatagtactcaagtctctagctataattcgtaaagaagaataaaggagttttaatattccagaatctgttcaggtaggtattgccaaagatctgcttatgcagatggaaccaaaatggattacaccaaatattcctttgctccaacttcttctgtctagtggttggattggtaatgcaaggctccttgaggagataaaatcaatataaacgttttgtttgagagaggaggggaggggaaagaaaatggaaggcggtgttaaaatttgggaaagattcaaattttcagtgagaagaaatggggggaacatttgaaaaaattctcgattttcttcacttattttcattcaatccatgtcctgaacaaagcataaaggatcacagtgggtggaaatgtacaaaaattagttctaaacaattaacagtagaaacaaagaaaagcttactgagctgtcttagatggatatcctcctgctgacaaattgaatggagtgattccattatttttcagtcaatctccttaaaggcaccttatagggtttttattctgttaattgcttgcatgtctatcagtttgtttcattgcatatcccacttttacattaaaattacacactcaagcatatggaataccgattttgctgatggaatgtcttaagtgctactaaagtaactgttttgctaatcttgcagttaaaggccttcaaagacgg

SEQ ID NO: 9843 - DNA, 3187 bp, Eucalyptus grandis
  Intron number 1 from transcript Egrandis_v1_0.000471m (loc us Egrandis_v1_0.000471m.g) derived from phytozome v7.0 (c hr-ID scaffold_2; pos 58733056 to 58736242)
gctggtggaatctccggctgggattcgaggggcaggtgagtaatcataaccgcgcgattgtctccttcgtacttactccgaaagttcatgatgaatacggtttagaatcagcagtcgattgaacttaaacccttcttcttcttcttcttccatctttgatcggttgctcctgatctgaactcggaaactgtgctgcagttgctgttcatttctagtcatttcatcaaaaccgtattcggggaagtcagacatactcgatctatttaaaaagttttaaatgtccgtaatgaattccaaagcctccgtcccttccgggcgctctgcagagggtgactccgagcagtctcttctgtgtattcgaagagacaaatcgaaatgacgtgagagttcggaaaaggggacgtacgatgaaggaataaagaaaagaaactgcgtaataagaaagctggcaaagggtatcttgctttgtagtagtgcgtcgcacatggtggtttaaagaactccgattcggacaattaggagcaacaccggcgcattttgtgctgaggaacacgcgatctattaaagtatccatcgaaagtacttctctgtctctttagccttcggcctcgagtttttcatccttcgagcttgctgctgcttcctttagggtatgcaatcctttgctctgataccaattattggttatgcaaccctctgctctataccaattgtagagtgcgcagctttcactctaatacaggctatgcggaagctttgtggtgataacacgagagaattgtaatagacaattcgagacacttattatactaaactgcggtacaagtataactctcaaataatgtctcttacacaattattacaatacaatttctctcacaccacatacccaaaatactcacactcaaactaactaatacaagcctacactcagttattatattttcctttcttaatcacggaaggatagcttgctcacacaaagctactgaggctatggcgcctctctcttagaagttcaccgttgcacctggtgacttcctattctgaagctctcactgctggaggctttccctgaagctcacctttgcacctgatggcttcctttctggcttgaggttctccacctgcgtgtggtgtgatgtcctctctctggcttgaggctctctcctttaaatttttaaaaataaataaattaaatttttaattaaaaattaatcaaagggaaataatgaaaaacactcacccaattaaacacagataaagtacaggtacattttcaaataatctgaaaaaaatcacattttcaaattttcctaataacgattacacacaaactataccaaagagaatgtctaataaattcaataactttgacattgtgtccctcaactatgcggatgataaagtgtcttcgttgtcctcttgttcatgttggctacttttggccgcactcatttcttacgataatcgatcatatccgtagacagccatttctacatctttcgctatcaagctacgcctgttgtctggtatgatccactggaatttcctttacatactgaacgttcttctccatctagctagcactgcaattgcttgggggttttttccggggaagggtcttgatggagactaggttaaagcgtttgcccctgaaattcctcccaaccattgagtcgttgcatctcgtcatcatcaaatttgccttgttgtgaggtatagttggcacgtatatgttgttgtcacggaattcactaaacgagtcctaagataattgcacggtgaaatccggattgagttaagatgatcggaaattattactgttatcgtcgttccctattatgatatttagaacacaatcaaatcgttgtaagaagaaaggagatgaaattgggagaaagtattaaaaaaagttataaatctattatattaatatctaaaccttttgattagaccaattttatcctaaacccttttatattgatacaaattcaatccatgtaactaatttaggtcggaaattgttgacgtaaatattggttgtcctacgttgtcttatgcggcatggctggtgatggagaatggccgacgcttactttgacattttaaaaataatttttaatagttctttttaattttttattaattttatgtttgcctcttttctttttctttttttccatcaatggccagcgagcattgggtaagggttgcgagcttgccagccactggatgagggtcacagccaaataagtatacccatgttacatttactccaaactacccaaaacatgtatgatcataccacatttaccataaagtgtagttaatctgagatttttttagtgtaaatgtggcatagagattttttgtgacacaaaaatgaatttggagcaatcgtggcatgaacataccaatttgggattgtgaatggttttcatttaatttcaaatacaacactttcattcaagtgcatgcttatgatatacacattgctcagtatacaccaattttgcataacaacttttgtgtagctagcattactaaataagttatcacaatggtaaataatgataatgataattcgtagtcatttctgttttgtcagtgtaatactccattaacgataaaaagaatgagcacatgcataagctccaagccattaacggtaaaaagaattggaaaaaagaattccatcatatttgcggaacgaaacacaaactagaagtgcctcgtttcaactttatattcaattaattttgcatatttaattgatgtctacagtttgtaacctaataatcagttggaactgtataagattaatcactcaagactcatatagaagaagacatctctttcccagcacgtggatgaacatgttttatattctgaggtttggaaaatggaaaacatgaccttgacagaagatcatccacatccttgatgcagaagttggctgctatgtattcaatttctaaatcaatgaatgcgaattcaaaaaatcgttttggaagaacatttcctaaagtgcatacctgagtgaatgtttaaataagcgagctgtattcaagcatccgggaattcgccacaattccattctctaagttaatcctcatctccactttacatggtgaccacgtccatgacagggacgaagcggagctaatccaatctctagtgaaga

SEQ ID NO: 9844 - DNA, 5985 bp, Eucalyptus grandis
  Intron number 5 from transcript Egrandis_v1_0.003763m (loc us Egrandis_v1_0.003763m.g) derived from phytozome v7.0 (c hr-ID scaffold_6; pos 5689768 to 5695752 reverse strand)
tttttggttcaggtatgtcgtccatccctcgtaacaactgagcatgagaagtcagcttccatggagacaacctttcctgtaaattagtacagcaattcaaataatcgcgtatatttctttcttgagtgttttagttcatcggaacaattattgctggttcgattaaccttggcgtggcgtggtggctcttggactccatccccaacatttgccacaagaatgtcctcccgcttaacagcccttggacatgccccaccgaccgtgtcttcttcgacgcatctgtgatctggggattagttggcccgaggaggatctttggctccgaaggagtctatggagcccttaattggttcttccttggtggcctgctgggtccggttgtggtgtggttactgcacaagtcgtaccccaagcagtcatggattcccctcatcaacctccctgtccttctcggcgccaccgctgcaatgcctcctgcaacggctctgaactacagctcatggatcgtcgtggggacaatcttcaacttcttcgttttcaggtaccgaaagaggtggtggcagaggtacaattacatcctctcggctgccctagatgctggtgttgcgttcatggctgttgtcatttactttgcctttgaaatagaggatcggaacctgcactggtggggctccaacccgaatgtcgatcctgagcactgcaggctggcgacctgcccgacagcaaagggtatttctgtagatggttgcttggtcttttgacggcttattatctcaaataaaaccatgaatgttcttacaaacagctgctgtagcatccatctcaatgcacaaattcctctgctgttcctcccttgctagctgaagagaacttcaacctgcaagaaccatcacagttcgtcctaatgttgttgaaaggctttagggcttcccaatccaccttatttttgtcctttcctagacagactaccctccgttttgcccaacacgatctcctttcacaattttctgcacttacccttatcactaatacaggactaggggcttttccttgaaatatggctgcatttctagctttccatgtgaaccaggcaatgtaagtactcgttcattttcaacagagcttgtttttctgatttggacgatatcatatataataggcttgaagcctggcaatgtaaattttcgctttaacgtccttcaattttccttgttagccataagagaaatcgaggaatcatcagcaaagaataaatgcaaaagcacatgataatctctgttgagtttaatgcctctatggtccctgatcctaccgcgtcacccaacatacgagacaaaccatcagccacggtcggcgtggtcagccaactacctcgttggctagagttggaaaaaaggaacaaagaaaagaaaataaataaacaaaggaaaaataaaataaaataaaatattaataaaatattaaattattattaaaaattattcacgttagtaccaattatattacgtaagatgatcagtatccacatcaatgattttcggttaaaattggccggatagacttgattgaataaacgtaaaaagattttgagtttaattgatacaattaaaagatttagaattaaattgataaacgtgtaataaattaaaaactttttgaataaatttctctcaaaatttgtcgttttgaacccaaatcgctgctaacctaacttattcggaaaaaaataagctgcgtttggtcgttcggatttctaaacggaataggactggataggatatgataagaaatccatagatttcttcatatcccatcaattgtttggtgaactacgaatttaaagtcggatatcatcatatcttatcaaatctactgtttggtgaactacggatttaaagtaggatatcctcatatttgcaggtttaatattcacaaaatcatccaaaacaatgtatctttttcaaattagcatattctcatcgaatttcatgattacgcatcgtaataatcttttccgttcctttgaaataatcttttggataaccccttcaacatcaaacattttagaataacctcattgaatgaaaatcgtatgaaagttatatcactcataagtaaaaaacactttacaaagacaattacttaaaaagtcgacaggaagggaaagcatataatcttaagtatcataataatgtccatttgtgatataaaaaatatatatatatacactaaaacgaggtagcaagagatagatacaacttgtcaattttccctgttgcagcaactaatttgctcaacagagtagcaacacgttctcaagaaatcctttcgcccaagcaaaaacccagaaaagagggaagaagaaaaagcaaagaaaattcaaaacctaagcagattgagactgttgttgcatatttccatgccaaacccacacaacatccttcaaggaaggcttcaagtcatggtcgcaaaactcctggtactccagtgtgtcccctgcttcttctgtatagacaagctgttgtctatggtgaaacaattgctgtaggagatgcagtagccttggaaatctgggtatcaaataaccgaaccaagaacgaacaattcgcgttgaagatatcaaatattttgcacaaaaacagaagcctttataaatctacaaattcaaaactaccaagaagacgatctccaatcaaccagcaaaaaaacaaatagaactacaattctgacctacgtaaaattcgttaacgttagagagagagagagagtgattctttacctttgaaaattcgtcgctttcgtaaaatttcgatgagaatcgaagagctattgaggagaaggcttcaacgtcgatactttggaaacaaagagacgtttgtgggtgaacgacggagaaagaaaaaaaaacgtagggttttatgtttcagataaaagaaatcctatccgaccttatcccacctcccccctcggatttttttaaatcctatccgaccttatcccacctcccccctcggatttttttatcctatttatatcccgtctatatccggccttatcctatcctagacagctaccaaacacgggatatgataaaatatatcctatcctggtttttatccggttgaccaaacgcagcgtaagtacatatatttgtggactccacatggaatttagtattaggttttttaactatgaaaaaaaatggttttaagggaatctttttcttctattttcgtttcaagactttataaagccgattcaatcgccctactttctcaccactccaccaacgaccctctcttcaacaccctgcaccaaaatatggcgactgcgatggaagtccaaggaccgcccaagttgccaccggaggatccacccgtcgacgagtcagagctctctccggtggaggaggtccggctgacagtgcccaacaccgacgacccaaacctgccggtatggacgttccggatgtggacgctcggcctcatctcctgtgccctcctctcctttctcaatcagttcttctcctaccggagggagcccctcatcataacccagatcaccgtccaggtggcgaccctcccgctcgggcggctcatggcctccatcctcccgaccgctaagttccacctcccagggctcagcggcagcgagttctcgctcaacccggggccgttcaacatgaaggaacacgtgctgatctcgatctttgccaatgccggcagtgcctttggcaacggctcagcctacgcggtcgggatcgtcaacatcatcaaggccttctatgaccggagcatctccttcggcgcctcgtggattctcatcataactactcaggtttctggttccttaattctctctttgttaaaaacaatgctgaacaaaacctgttaagattaatgtgaaaatcaattaaaatatagataaatactttttatgatacatttagaaattaattgtgaatctgtcattgattgttgttatctagtaatttggatacacaacagatttgttagatacccaatagatgatttgaaaactcattatttttgtcaaattataaaccaagtctatctatttatagtgaatttgaaatcttttcgaatctttcggctaccacaatttgatttttatggataccaaaggtccgaaagattccaaagcatacaattcatcacgtatagattcattagtaattttacagaaaatgacacttcttttaattttggattcttcaagtggaagtaaaatgtaggacaaagtattttctctgtgtttctataattttcaagacgtaggcagacatctttacaaaactgacatattaaataatttgttccattggaaggttttggggtacggctgggccggactcttgaggaagtacgtggtggagccggggcaaatgtggtggccaagcaccctcgttcaaatctctctcttcaggtaaagattgtcactaatgggtgttacatcgtatgcctcggaggatttgtatctcgttcttgccaaaatgcatgcaatttagttaatcaaaatttgcaggacattacacgaaaaggaaacagaggaagacaaggcacaatacagtgtctcaagggtcaagttctttgtgatggcaatggtgtttagcttcatgtggtacttggtcccagggttcctgttccaatccttgtcgagcatctcgtgggtttgctgggccttccctaactctgtcacggcccaacagattgggtcgggccttaacgggctcggcgtcggagccctcactttggactggtcaacggtggcttcgttcttgttcagtccactaatatgccccttctttgccatagtgaacgtctttgttggctttgccgtaatcatgtatgttgtcatacctatcgcctactggaggttaaacgcgtacaatgccaagacattcccgatattctcttcagatttattcaccgcgcaaggccaagagtacaatattacgctgattgttaataagaactttgagttagacaaggcggagtattcgcaactagggaagattcatatgagcatgttcttcgcactcacatatggctttggattcgccactattgcttcgaccctcactcatgtggccctgttctatggaaggtaaaaatcctctttctctttcatagatgatgtgtggtacttagcttggcgtagatgttttcttgtgtgatatgaattgcttgtatcgcaaatcttatttatagcatgatatgatgactagtaagaattttttgtttagagagatatatgatcgatttcgagcttcttcaaaaggaaaagaggatattcacacaaaactgatgagaaactacaaagacattccacaatggtggttctacgtattactcgtgatgacaatcatcgtctctctgatactctgtaccgtccttaaaaaggatgtccaaatgccatggtggggtttgctctttgcagtagctcttgccttcattttcactcttccaatcagcattataacagccaccacgaatcaggtgaaaagccttattctagttttccatgatttaattgatttagcatattgggttgctctctgtttaaagagtcactaatgctgattctattgcttttgcagactccggggctcaatatcatcacagagtacataatgggagtgatattgcccggacatccgatcgccaatgtctgcttcaagacctatggatacatgagcatgacgcaggcaatatccttcctcagtgacttcaagttgggccactacatgaaaatccctccaaggtcaatgtttttggttcaggtatgtcgtccatccttttaccaactgagcatgggtagtcagcttccatggagacaacctttccagtaaattagttgaatacagcctttccagtaaattagttgagcgattcaaataatcacgtagttttcttttcgcatgttttagttcattggaacgattgttgctggaacggtcaacct

SEQ ID NO: 9845 - DNA, 1289 bp, Eucalyptus grandis
  Intron number 2 from transcript Egrandis_v1_0.032870m (loc us Egrandis_v1_0.032874m.g) derived from phytozome v7.0 (c hr-ID scaffold_7; pos 46985961 to 46987249 reverse strand)
tggacacctctttgtttgtcaatcgtatagtgctctgcctagatggttaaggttaccttgagtcattggcgtgaatttaatataaggtactgtctgttgtggtctcactaagagaaaaacagtttctcagctttgctacatgacataaccacataacgtaggtttggcagttcgagtttggaatgaaacaagtagagcctttagtcctgactatcaaatcacattaattaggatcaaacatattgcagaatctcaatatgagacgctttatcttctcttatctaggaatgaatttcatcaacctctggcctttccatacttcatgtagtagtagtaattgtcggaagctaattattttattggttttagatcatttatatgtcatatgtctctgtttttctttatgaagaatcttgttgatggtaagtggtgcgaagaagctggcagaaaaacttgttagaactttagaatgtctctttaaggagtaatcaatgatctatctaaactgtcatttttctgggatttacctagactgcctaacatacccaatggtaattactcgaggtagtcgaaccattcttaattctagccagtggggaagagtggaaagaggtgggagcttctgtggtctgccacatgtgaaagtggaagatgctaattttcacaaacatgtttagaagccatccccacttaataactcgaagtggccctgtaattactcggtttcgccggttgagttacaaataacctaaaaggatgctgccatggaattcaatcaatattctttgtagaatgtctgtgatggaacttcttttaccctttttcattctttaagatgatcttattaatgatagatagatgcaactgacatctgcaaatggaaattttttctttcttttgaaggaaaaggtcaaagcatatcaagtataatcttctgcattaaagaggattatgcgtaacgttttgaacatttgggcctccacaagaatatacatgttatcaattgaactgaatcacagactagtgcaccattaacttcatgctgtttatttccgatccatattggctgctcatacgctggcatacctgtgtatggctctttgtgcttataccgaagcctcatactaaattattctgtagaagtagatcttagctaaaacaagaaaggaaaatttttatcgtgtgaatcttatcaaggtcatcttttggctggtcatgtggggttggtattaatgtggtctttaagtaaaatatatcatgtatatttattgcagcggcagtagcttggc

SEQ ID NO: 9846 - DNA, 1013 bp, Eucalyptus grandis
  Intron number 5 from transcript Egrandis_v1_0.004301m (loc us Egrandis_v1_0.004229m.g) derived from phytozome v7.0 (c hr-ID scaffold_4; pos 30153209 to 30154221 reverse strand)
aggttgttatgttctctaagtccccgatatctgaagtttcaatttcaagtccacttggtcttcccttattagccctttctgccgactgattctgtgcataaatgttgatactgggtgtgagggaaaatttcttcctttattctgcactctagacttccaaaatcttaggaatgagaatcgtgccaggttttcttttagattccctccccattcacgttattgcaatttggaccccaaaactgttgctttcttccacttaacttatggaggtacatgccaaaagggtatcctgccacaaaattctgatagtttagatagtaaattgctgtatctaagattttttgcttatataacagacaggcaaaagcgaggttgattgccatttttctatacccttttttccctccaatttgactagtttctttgattttctttgcacttgagttttgtagtttccttggttgagcacaatccattcagggcttttgctccttgtgctcctccattacgatttcttgggtattgcaatggctaacactttggggcatttcttggcactagatgcttcttgaagaggagattaataccataatgttgctttgtgtgtaaatagttgtgtcaccagaaagtgtgaaaaagatgtggacattagtgggagtttttccatttagcatctcactggtcccaaatggtctcttgcaagcataagtgtctatgatgtttcatttcaaagaatgattttcatcttcttcctttgaatcgcaaattcaatattataaacttgatgcaggatgcttttcacttctgattggtgctattaggcaatttccaatttaaagagtaactacacgtgtttacacttgtttaagtcaaatctgtccttttgatatcaactcttgtcttggtttacattgtggaatattgcttcttagtagctttatgctgcatgattgattccattgatgctacctttcgcagttagttgcctactttgcagagcgtctaatctctgc

SEQ ID NO: 9847 - DNA, 3903 bp, Eucalyptus grandis
  Intron number 11 from transcript Egrandis_v1_0.006507m (lo cus Egrandis_v1_0.006507m.g) derived from phytozome v7.0 ( chr-ID scaffold_6; pos 18886418 to 18890320)
tgagcaggcatattttaaggtacattgattcaaatacctgtacaagtttccatatttcggtcctatatgttccatttgattaacttttgtttcttgtttaggggttttcatgcatttgcgcattttatttctctgtatgtggtcataactttcctgaaattgttcgtttctttatccttttgaattttaaggcagtgttgttcctctctttcctttattgtgcacaatagagtagatgagaatgtttctttatcgtttctaccttctacttccacccattgcatttcctccctagatataccaagagaaaaggagctcaaaaatttaattctgtgggcatctcatcctgaaaagggtgaacatgatgagggtctatgaatctgcttcaattccgtgtggaaacatcaccactagcatttgtgtccttctgagtggagatactatttatggtcattccaaaagaagcctttctaagtgaaacaagagtcattgtattgggaacttaaactttgcctaatagctttccaggttgacgtacctgtgtgggaagtattaccaaattgtgcaggagaaagctctctggctgaatggagttccatcttagcatagtctatatcttaacaaaatatatagctaccttttttcaagttctgttgggttctaagagaagagctactcctccgtggtaattattgaaagagacgatagaactggttattcagaagcccattagatcaccacccatcttgtttaaaaaaattatacgtatcattgctggattgagattatcttgacaggtaacctgtctaatcctctgccaaccaatgtgtctccttcctttccatattacttctgcccatgcttcagtgcgcaatatttataaattggaaaccagattgagtagtggttcttatatcattggaaccttcagccactagagctttgttcaagtacacctcaatatgatctcgcagcatctccgcgcttcaaaagtttcaccacttcctttcttgactaggtggaatttggaatgctaacttcaatttccccaaaagtggagagaatgaggttcataggatgttgtgatgcattcttggcatgtgctctcctttaagaattggagtttctctattcatctgcagattgatggttctctttacaagtacaaagaataagaacaaccctgattctcacttcttgagtgtagaaaatctatgcaaacacctcctgagagcttcttaatccatgctatatttatcctcatcaaagctgtctggccaatagttgtctataaaaattgaggtatcctatgcgatgtcacttaccttcctcgttgcaaagggatcattcctcgattattgtgattccacttcagcaaatttaactcttaggtctcatacaaccttaaagtaggcagggttgcatcaaaacttcaaagagctagggatttacactagctccagaagacgattgggtcattggcgaggacaatttggatgatgttttctctatcttcccttcttgtcatggcatttgagacttttgttcttcatctcaatgaagttattgcttgaagtgccactttcaagagcaacaagaggaatgaaatgaagtagatgagaggttgaggaggttgagggtacttatttcttagggtgtgtttgttttaacaaaaaatgcttattggaggaaaatgtttttgttaaaatatttaaaaataaatcgcaccttcatcttacagtttaagtttttagaacaatagacagtggtcccacaaattctcctatagcatcaaagctgaaggtcctgagttcaaatctttgtaggccccatttcccttcccagttaaatatgtccatgcttagtagttggcaaaaaaaaaaaaaaaaaaagaccatacttagtgtgggggagagtattaaagtaattaaatattaaactcacgtcttcatctaatagcttgagcttttagtataattgatagtggtattacaaattttcataattttctatgaaaactattttcaagaaaaatgattagtcttcagttgtttggaggtatacagaaaaaactttgcaatgtttagatcttacttttaaaagttattctctccattatagttgtatttgttcccaatataagtgtgagatattatgggaccactgccaactgttcttaaagcttaagctgttaaatgaatacatagtttgatattcaaatattctatcacttccccttacgcttaattttcactcttagtcaagtactaagtgtgcatatatttgatcagggaagcaaatggggtatggtatctccagctttgataccatgggagatttcatgggactatcgtcaattgttctaaaagcttaaattgttagataaaggcgtggttcaatattcaaatattctttcaattagatactaagaggatattgaaatccttgtctaaaatattactaatatatgaagcacaaatttcatgttttgttatcaaaatgaagcacaaatttcaagttttattattaaaatgaagcaacctaatgaaagttgccaaaaaaatagaaaaaacaaataattgacgaagttaatttctaagtgcttataaatcctctcgtgagaatggctcttcatattgtgtggaaaaggagcttgggaaaatgatttgttccatttggagtaatcattttcctcaaatttaaaaacagttgttttccttgacataaaatcttttttgttggttatccactttttgggaaccaaacacatgaaaagttaggaaaatcatttcatgaaaatcattttcataaaaataaaacagccttttaaattcacttagttttctgccaaaaatagaacattaatcaacattgcctgcttccgcttcagtaggcctttaatagttagttatcttatacttggctcaacttacttggttgtcttgtctagcatcctattttgaacatctacaactgtctacagaattttgcacttcaaagaattttattgttgggtgcgaaaaaatctgtgtccgcattaattctgttccccaggtatatagagtagattgctatcttgcttatatgagctcttctgacctttttcttttttggtcgaagagttcttctgaccttgaaaagtgataattaaacttgatttggggtaaattttctagtcataattaagaataccatgaaaaagctaacttgaacaggaattttgaagaaagaacttgacctgtgcatggttggggccataatgctagattacttaaacgaatgaacagagccaacagggaaaaaagaagaagaaaacatgtaatttttaactattagattaggctcaggagcttttagtttgagtggcactgattcagtccattattcaagctactcaaactcaaaacccattcatctgagctggagtaatatggccgccaagcttgagcatgtcatgagtaacgtgactcacgtacaacttattttgtgtaactttctttatgtcgtcataaaaatgtgaaacctacacgttttttttagccatggagatgcgtctgcaacagttaactgctttcataggatagaaaggtatatattcattatatctcctctaccaaggaagtatttaatatgtcaaaatggctcattctggaagagcaaatgaaggggaaagatgacaattatggagatccccttagaaaagcatgaacttacacatttgtttatcctaatattgggatgggtgactcgattatattcttaattctgattgcttttgattgtaactagaaagtgttagcatcactcatcctctatgatttaagtagccatctttaatgtgtcaaatgagttcttgttgcctgtgacttatctgttttttcttggtctgctatttcatggcag

SEQ ID NO: 9848 - DNA, 1054 bp, Eucalyptus grandis
  Intron number 5 from transcript Egrandis_v1_0.011380m (loc us Egrandis_v1_0.011380m.g) derived from phytozome v7.0 (c hr-ID scaffold_11; pos 16597655 to 16598708 reverse strand )
tgcttgtgaaggttcaacttcagcagctataactggtaagaagtgagaaatgcataaagtctggtgaatttatctttgtccttcatgggaagcagcattttggtgtatcaaatagtaaatattccttctggggcatttgtaagcaagagttttaattttgtaaggatattgcctaaagtcaactcctgaaagtgtttgaaataccttatttattaaggcttggcctagaattacctctgtggaagattacaggatgaacatcacctgcttatgataaggaattcaggggcaaaaattccagactaagaacaaattatctgtggccgtccagttcagagtgttttgaaatacttcaaaaattttgttatcgaggaaggtcatcaggtttcatggcaaacctaagggcaggttaggtagttgtgattattggttgattattggtctcctaggtacagtggcaaatacggaccgaaattttgtatataatgctagaattagaactaatgttgagttgatagattcggttactctagatatggagactttgatagtgctcgtgcatcatttgtgataaacctaagttttatgatataattgagatgtttgagtaccttatcatccttctcttcatagcagtgtgcagttttcctgcgtcagtgaagcttttgcccaattggccaattttataggatcacttctgtagaatgagatgaaatcgggtagatgagtccatcattgagttaaaaagttagcactggcagagggaagtatcatctcaaaatagcacaaaataatgatagaatagtcttgggaccaacatcctcaattccctggacatttgtaaatttatgctcgactctctgacattagggttccttcaagggttgcccttgcagtagtttttgtgcactttggcttgattagattggtcaatctttttgcgtcaggccttgaatttcttagtttgttttaaaggaggtagctttaaatattttgttgtaaattgttgatggtagaaagagtaattaattactttctcttttgtcttcaacag

SEQ ID NO: 9849 - DNA, 7736 bp, Eucalyptus grandis
  Intron number 2 from transcript Egrandis_v1_0.025963m (loc us Egrandis_v1_0.025963m.g) derived from phytozome v7.0 (c hr-ID scaffold_6; pos 39461231 to 39468966)
agcagaggacgcctctacgagtactccaacaacaggtaagtttgtaacttttctttttattttttcggtgttatatacttcaagcgttcatctggcatatacttatatacgcgtgtctatatgtgtgtgtgtgtgtgtgtgtgtattcttcgagttgtgtcttcttgctggttcgtgaggggaaaaaagaagatgcataaatttgcataaaattttgtgttacgtgttgtgtatgtcaagataatatagtcactaaaatatctaatctgattcattttcatatttcacaaattgtacttatgtatatatttagttttggagtaaaaaaaagaaaaagaaaaagaaataatatgtcagtcaaattaatcgagttggctgttgaagtgaattaatatttatgttgagaataattttgttccatgagtaacaaagagcaactcttttctaaaagctacgacgtatggaaaaggttctgattgtgaaccattgggaagatgcaacacttcaagttaaattttaagagttgcaactctaaaaaaattaacatattaattttgtgggtctttacgatggattaaagggctgttaaaacaacgacaaatccatacacgcgacttttttttttcccttcaccataccgtatctcttttgaactcgtggatttgagtttatgtttgaagagcccttgaagttcatcgtatgttcttttgataggcattatataatagagttggtactatgtatgttttggaatttgtagccctttttatttttcacaacatcacatggttgactcccttctttagctttcttgaattttgaccctagtttcaaacttgttgtccttcgaccgttgactgtttctatttccggcaagggtggggtgaacatggagcgcaagtgctttctcacatcgctcagcattatttcgttatcataacttaatctcattaattgattctgaggtcataaggacatgacacgatgggaaagaaaaggaagagaataatgatcttttgtacttgtctgccataaacctatcaccccatctttctcaacatcctaaaatctcttgatttgtaatatgtacgtaaagcgggtcgacattttatttttgcactaaaatagttttaggtcattacttttcatgtataattaatgtctatatatttgctaacatccgttgattttacagtcgcatgtaatttagttttctgcttaaagacgaaatatttaatgatatattaatagaagaataccattaaaggggctgtattttcttcatcaaacaactcaaactatatagtgtcctccagcacttaatcagccataatggatctgcaagctccattttcactttcaacgcactacgtttgctcatatatatcccatgacttctatcatttcgctctaaagataggcaattgaagttttctattcagtctaatgtttcctacgaaccacgatctctcctatgttcatatacttacccattaatacatgttataggactcacgtcctcaagatatggacgtctactgtttctctcctctctttttttttttttttttcctgggattgtaaatgaactgttgtcttcttaaaaaaaaatgatttgttggatcgaaggtgatagtccactcactaccgctaattttgtctttctgagcattttagaaaggtcaggttactgcagtgtagtccattccctaacgtcaagtccatatatgagtgactaatgatgttttggttgcccgttatgtgctgcccgattatatggggcttaacgattccttcactttcaaagtaccgtttgtttccacaacttcttaaggttataatcaacggaacaattgaaagtattataaaataaattgccaagatgatcacttcatgatgttgatcatagaaggaacaattttggtctaaattatagttttaggtgtagtattttgctaggattgagttataagtagtgagactcatatgatcataatgtctatatgatcatgtattgacttatactggttgagttgatgcaagatctttcaaaagaacggtacgagaatttggcttttttgttttgttttgttttctacgttttcggccaaaactgaagcattttatgtagtgtttttgtttcttattttatattgaaatcccctagacagaccccttttatcatgggacttgatgcctcagccagtccatccatcgaactccaatcggggtggaatgatggccggtccatgtacgaacgggaaaaggtgattgcatggagtgggggttctgatccttttgcctcctccaaattccaatgcacgcaaaaagatggaaagcaaaaggggaaaagaaatctagtcttttagcggtcgtgccatttccattctcatctttcagaacaacacttccatatgctcaatgttcactcaccggaagattttgcccctccatttttcagctctcgccacattagttctgtcagtgagctcattggcattgtacatgcctgagtagggctgggcaccgggtaatcaattaaactgatttgttttttaaagtgttagcaaatagtgaaaaaaaattggttgggcagaattaatgtagaagactcaatcaattaaaaccaaacgatatacaagtacacccataaatgaatgagaaacacatattcaattacgccaaaagagaacctctaattagacgtctttggcaccgtgtccctcactatgattcaaatcatgcagtgttatcattgtcttcttgttcttgtagggaatgtttctccagagtcaatttttgcaaaaagcaacatatgccttacaataggcattcatgaaattttttctttaggagttgaacccgttgtcgtccaatatctattagttagtattgaacatggactccattggtgcagttagcaagtcacgcaccatggtagaaagaaccgagaaatggatggcttgtctcttagaatgtcgatattgtttttgccaactctatcaatgaatttggagtagtatgttcctgagtatgtctccaactcactggtaggtgaagatgaaggcctagtggaaggtcgtaggatgttcttcttcttacgaagtagagaacatacatgtgtctgggcataaattggtgacggcatcatcttcgttagtggaatggaactcatagtatccaattgcgccaatatctatttcacttggaccttaacacccactcccaagttttcttagtacggaacaataagaatttcgagccccttcaactcgaatcttggatccaagacagtggatgtcataaaaacaaacgaaatgtcattttaatgtttgaggaatgttcgctttcatggccactgctactttgttcaagaaggtatcatcctccttgttcaccaattgaacatgcatcatttatagaagcagaatggccgggctacttgattataattgctggcagtaaaagtatctatctcatcgctgaaaacctgcaagaagtccccatatacttcagaaaccctaaaattttgttatgtcaaaggcaggagactgacactttcgctatgaggggtagagtagagcgtcagcatacccatctccttgcatgtcttcctcaaagtctactacgttaagttccatctcattcttatgtctagaatgagcttttagcatgtcttccctgcgtcaaatattggacctccaactcttgatgcctcaatgaggtggatttaatgtattgaactcacccattgtatgttggtcacattatcacgaaacagtcggaggctgccttgcatgcacaagttaatgcagtggcacacgcactgcacatggaagaaaattccattgcaaatggtatttagctgtcagattagagggcagatgggggaggtattcaccctaacattaactagatattatcggtgatgccaaactcatcgatagcaatcattatttcggctgacacatttcaagaatcttgccaaagtatcaacttcttaacaagagatctataacataattcccatttctcattgacctattggccagtgaccatatggtatgtgtttcgtaggactagtgcataaaccaaagtcaaagagactgaaaagttacccatcaatagcaaatgattgctcagtggcaaggctataatatgcaagctcccgctgacttgtcttaagcaagcttttgatatttggcatttttcttggagagctctccccggcctgggacatatcttcctctttttgacgttgtgcctcctcgagtggccttatcccacttgacaattcgctagccaattctttgccacatatagtgcaaatggccttcttgagactgttggcatcgatttcaagtaagaatatccaccagacacttgacgttcttcttcatgaagctggcgtcggagctgcttggggctcttcgagcgtatcggtatcttctggagaagcgtcttgatgaggactagcttccagcatttgccctgacagttcctcttaatcatagggttatcgtgtcttattgtcattgaattcgaatagttgtgagagcagagccaacacgtaaacattattattgtggtttccattaaaagattcttgcgacaactgcaagatgaagtttggatcgaagttggattgaacagacacgatagttattgttgttttccattgtgatatttagggcctgattaattcattctaaaaagaaagaaaatatatgagctgggcctaggttggccattagggcccatgggccttacttgacccatgcccaagatagggcacgacctatttcccagccctttgcttgagtgtcaaggaaaattgacatttatatgattattgtttgaagaaatgatatttttacttgattcataacttattgcccttttgttggtgaaaaagattgtattgaatgagtttggttcctcgcatcatcaagcgcagacagtggtagccacttgtatttccagctcttgtatcttatttggttcatgagattagtaattttagttttggatttagggtttttgaggggtgagggttacaagagccgtggaggtgttttgggaagaaaaaaaataatggtatgtaaaaatctagcatataaacagatgttaggtgttcttatgaatctactaagctaatggagtagagtggtgatttgggaaagtagaggatgcaaaacagtattaggacatatatgagggcttatttgaatttccccttaaagaaatgatgttacttctttactactatgtatcggtgttgtggtttgggtatggtaagcataaagcaatctcgattcctttcacctgcttgtgattgttttctatgtgtactaatgtgtctcatctatctgaacatcctccttatttcttgttaatccaaccgatgaaacctcgattgagctatccctaaagttatgtgaaaggtgacttatccaaagattaagcttccttcaaattctatgcaagctggttggtaggcgcctggtacttgatttttttatttttattttttgaattctttgtgtggatcattggattgtacaatatgaatatcagtataagagatgaactcctgtaaatgagaggcttaaggatagtacaaattcattaattcagcataagttctaaataaaaacatagcagggatttggaatgcttaaataaagtgaaaagcagaaacttcaccatggtttgggcatctacctctattctgaccatttgcctcttccatcttttgacgcatcttatgaatatttgtgcatatttccatactttaaccgagacaaactgagggtaataaatgaagcagaaaatcagtgaacatcgtttcatgacaagagatactgttttatctgagtgggttttgcatctagaaaagattcactaacatcatgtgtagttacagtttagcaaaaaatacatatatgtctaacagttgaagtgatatacatggggaacttctccatgagaatatgaaaaaatctaggctttcatgagtaatgttttcttaagtttctcttattgcatattcttttttcacatattgttgcccaaaattatttcaagatagaactgtgtgctgcatctgatatacatgtggcttatgtccataaggaaagaagagtaaaaagtgcccataaagcaatgaggcaaataatatatttggaatgcaacccaatatccttgtctacgaaaccctagaaaaccacataaaatacacctagtggccaactatcaaagtgcgcatggattcatgttaggtctagggacgaacttgtcaaatggtcaccatcatggattcaagtcatgtcacgtacacattaagatatttattcggaaagtgtattggataagattcattctatatatgatttgattttttttatgtgaactaatcacgatataaaattactttttgaaaaaattgcttattgtgatattgtgtgtggggacaatttctttcttctagggagactagaatcttgcccccaaaaaaaaaaaaatcttacaagggacttttgaatggacagtacaactgtgaataagatattatggttgctttgttcattttccgaatagaagtttcacatcagttcaaagatattttactagaagaattttactattcgcactttgcaattttctttcttacatcaaacctgtttgaaaaaaaaagttcataagattaattcagcatgaatatgctcttcagtgcctcctgttctggctaagtccaccgtgcttcctcgttcccgctagcatatgctggccttcccatggatgtcgcatcgtcacaaaaaccaccaccttcacttgtatcgtgctttccagcttccatagctttggtttcctcctaggatgttcttcccgcttcctccggaatgtgtaagaattgtttcagacaatagcacaccatattttcaatgtctcttcctagcaatatcacaaggtcacatcccagacaagctaaggctggctgtcattgtcgcttcatcacactatgtcgcgttctaggggtataattgagctgagcggagccaatacattaaagggaatcgttctttcttcaaacgctcttattcagttttgagaaggaatccaaattcctttagcaatcgagaaaaaggatgacaacaatccaatttagtggtttgaattttatacagtaactaccacaagtaaatgttttgagtgcttagtttgagtagccacatttgtgcatttattttaagtcacccctaggagcacctaactgcgtgtctttggtgattactcggtgtgtgaaatggggatagagtaccttgtgaggattaatcggatgcttaaagagtcccggacactttcattattaataaacaaggagtaaatattttatgtttcatcttttcattgatgtagttgcgttctttccatttatttcaataaagcagcacatgtaattttaccagttacattatatgaatgttgctaagatgcaaattgtaacatgcatggtcctctaacaaatgaaacttttcctcattgaattttgtgcattaaactctattagatgcagctgcagataccttcaaactggagctgacaattcctttaagtttatgaacattcatgctaaactagtagtagcgcttttgtggtgaaaatatcgaatactgacatactttttgcttatatgtttagcataaggtcaactatagagaggtacaaaaaggcta

SEQ ID NO: 9850 - DNA, 8348 bp, Eucalyptus grandis
  Intron number 1 from transcript Egrandis_v1_0.010084m (loc us Egrandis_v1_0.010084m.g) derived from phytozome v7.0 (c hr-ID scaffold_7; pos 22569680 to 22578027 reverse strand)
agcagaactcgaagaagtggagcgcagcagcggaggcagccgtggcggagggtggctcctcagaccggaacatccaggccttcgtggacgaggtgaagaggaggagcctggaggtgctggctgcgagtggcaagtcaacggccaacggaggggcggacttggccaacaaagtggcggccaatggggttgcggagctgggcgagccaaaggtcaacggggagttaaaggtggtgtcgtgaggtggagatgagaaattcaggtgtgtctcgttttggggtgtagattgaaggaaccatgccttctctctctccgaaagcggaaaggtgctagctgtatgatcaattgtaccaatctgtgagatgcatggattggttgtgagagtccagaccctattgaaagtgcttgatatacatatcatatgcttgattgatgccaaatgatccattgctctctctctctctctctctctctctctgatgtccgtcataataataatttgacaaaactaagacattgtttattttcggaaaaatgaatgatttggaaaatattttcctaaaaacaatcatttatgtaacttgtaaaaatgaatgaacgaaaaatatttgcatcatctacaaaaacggttaaatataaattgctatcaacaatgaacatttttcgtttattgtttatttgaagtaatataagggattatttttaggaaatatttttatataataaattatttttaggaagatgattccattttctccaaaacaaatgaattctaagaaaataggccttttgtatatactaggttcacaaattatacacgtttcatgaacaaatattttccattacgttttcacttttatgataattattttatgtagataaagatgagataatatccggtcgtccgatttggacaaattgggtatggttggaaacgtcttcatgagaatgaccttagtgtgccctttgatcaaactcttaaccatgtaatatttttggtcgataagtcatgccttagatgatatatatcttaagttaatttggattgcactcggagttcaatcgatttcttattcaaacctttggacctaggagaatatttgaggcatcaactaaacggttcactcttttagtggaacatcaagtgtagctgcatcatatactctctctctctctctatgctatggtattgttgttgactatagctgtgagaattcgtaaaattattgctaactgttctaaaagcttaaactcttaaaaaaatgcatggtttaatatttaattattctatcactccttctcacgcttagtttgatttttttttcctagtattaagtatggacatatttaattagggaggtaaataagatctaaaaaaaattcaaactcaggagttctagctctaataacataaaagaattttttagactaccgctaactgttctaaaaacttaaacttttagatgaatgcacggtttaatatttaattatttcatcagtagcaaatagccattaaattcatcaaaggcgggacgcgaggtcaaggggagcgagagagacacggagagagatgctgctgggtatgtgtaatctttcatagatggtaaggatactaagttaggatcaaagttttttggcaaggcgattcaattagggtttcttatatcactactaatgtctcaataccttataaataactaaacttagtacgtaaatttaacgtttatgatggaggaccacagcccaaaaaaggctacaagccgtatgagagtcagcaaccgatgccagacagatgttccaaaccgaaacatccacctatggaaaatcagttcgttgaaaggcggttgcctcccattccacatcgcctctcgttttgataatccgctcctcatctcgcagtcgatcaggcataaagaagagtcaaactttaaaagctgttgactgcgcagtatgaatgtcgtgcttggtcaaatcatcggaaaattagctggtgccgaggacgggatcatcatgccttgtcgctctccaaaacatgttcccttgagaatctaaagttccaactcggttagatgcacacaattaaaatacattacatgttggttagactctgatgccctttgtcatcgatgtatctctttggaaatatagtttcccatagctgtctcctaaaattagatggaatttatttgcgttttttttattgggggtgccatcacgtcattgatgaaaatgatggactgttacgtaatggcattgtaatttgacacaccaatcacaaaaacgtaggagaatatcctttttccacatgcaatcttagggaaaaatatacctcaattatcatgactttttcgcagcgctcacttggatgttgtgattttttaataaatcctttaattatcattaatttgggaaaaaaaaacttgtggtgctataatttttctataggtcaagtgctcaatttttaaaatacgttcaaccaaaagtgacatagattttatcgtcacattgaatgtttcggaacttaggtaaactatcgaaaaataatggtaccaaataagtaccattaaaaaatcatgatgaccatactgtccattttgggagcgataccgtaattttagaggagttattttaccggatcgaaaacggtaatgccaaagcatttaagaaattcgtgcggtcctcgatggcattgagtgatgggaaagtttaaccaaaaacaattaaaataaaatgaaaaaagagatcgacagaaagatgggttttgcggtgcacgggatcctatatttcttttttccatttttgtatatgtatggatggcatattccacgctttaaagttttgtcactttcgtcttaaataatgcgaagacccaccaaacggtaagcgactcatctgcccgcatccgtctgtcagagctttgatgtctcggtcttctagatggatgatgcagcaatccaatcttccttttttacttctcttgttctggagtctaccgtttgtatcattcttataaagaaatcgtattacgccttgtttatttggaaaatccaaattgggattaaaaattgtgcatctaaaatgacttgtatattaaagctacgctaaaccataaagaaaactattaaccctctagtatcaacatatagttgattgggatatcgataaatgttttagttcgggaattgaataccgtctttctaaattctatcaattatatataagctattttgaatcatagccggctgtagaagttaaaacccccagcttaacctgtttgtacgcttataagctttttttctattataaatatacagataatcggatctctatgtgcatgctttgactataaaatgctaataaaactattaaattaaaagtcaccatttaagtgcacgaatagttctttttggttcttgtaaaaaaataaaaggttagaaattattattaatttttttaaaatttatttcaaagaatagaggtcttctaaattaagaagtgattgcagcatgtatagttgtcatgagaaaacaagttatacttaatgtgccatgatgtcactcatgactaaaggtaaaaataagtcaggctactcatgagtagcttaggcttgattgatgattacttgagaatggctcgttaatgttttagaccatgcagatgttagaacatgtagatgatattatcaaagtcagaagacggccagaagacttaacgtaacatatgtccaaagtatattctgaagatttccagacttctgtgtcaaagtctgaagactgccgtgtcaaagtctgaagactgccagactttagtatcaaagtctgttttacatcagaagtctgctcactctgacaaattccagactgaacgtgaatgatgaaccagaagacagactctatgctgaaactgaaccagaagatagactctatgctgaagctgaactgggtacagaccttaaagctaaatctgttcagaagcagatatgtttagacccaaattgtaaagtctacagactcagattgtaaagtctatggctatcagactttacatccagattcgacagaacgtaattcaagcccaatcatataatggctagtgatatggtttggattccacatcaagattgatttgattgattcaatctatttgattgatgattggatcttgaagacaagaactttctatacgaagaagctttacttatggaaaccaagattccgtttgtatgggcgatcggaatcaatttgggattatacctttgtcactcaacggctaccaaatcttctagatacagagctgtccaatgggtatattggaagacgattctccgggatgctgtctaacggctagtttggaagtggatgagtatttaaggagatgaaggaccggtgagcaagtaagagacggagcgtagaatttataattccaaagtctgagcgactttcgatcatatacttgtctcttgagagcttaaatgtttgtaatcatgagagaaataccaaaagagtgacttagtgagatagtgtgatctactaagtgtttgcactcaaagttgtaatctcttgttgattgcatagtggaatccagccaagaaggctgttagcgtgggagagtgaacgtaggcttggattaagccgaaccactataatttatgtgttcttattctcttccctaactcctttattttgttcatactagcactcacaaaaataagtcaggctagtcatgagtagcttagccttgattgatgattacttgagaatggctcgttaatttatgctccagctagagcttctcgagtatcttgtcgagtcaagctcaagttcaagcttgaaaattcagctggataaggttcgcgaatctaatcgaacctctactattcttttcaaaaaatatttgtcaattaacataaacatatatgttctcaaaattacacaatacactcactttgtctaagcatttttaagatcgcgcctgtataaattgataaagtcgaatcgagcttgaatatttcgctagcagcattagcagttgcggcggtacgagccacaatggcgacaccgtgggcggcgggggcagggatcactcgtcaatggcggtggcgcagaggctgattcacgttgtgcggtggaaggaatcgtcgtgacttgtttgcggggtggataagctcagaacacagaactgaagaaggagaaaaatagaaaaaaagaggaaagaattggaaaataaaaataaatttgggcggtctgaattcccttcatggttaggtgtcagctttaaattgcatggtgcaacattaaatagcatttataacattccgtagggtctatcatatggttttgatttcgaaaggaaagaagatatctttatgacaacaattgttatggaatctcaaaatcataaaaattatttcaattacaaagatatgaacaaatttataaaaagggtgtaacctggttagactagcttgcaaagagggagtaggctattttgcgtaggcagtgccaagagatgatcggaaccaattgaaaacaacattgtctagattacattttggtgaaaattgtcattttacacgtcaatcaatcatgaaaactttgtatattagttcctctattagtgtatacaagaaagatatgggaaaatatagacctggctattaaacaagtattgactatcgatgagctaaatatactatttgacaagataattttgcataattcataggattatacgagatattatgtaaattatgaaagttagtaaattataaaacaatttatccaattgaaggaattcagctaataaaattgaaacatgcacgcaaattgtcaccgctttggttttctgcttctggtggaagacgaaaaatctcaaggtcgtttagcgatatatttttgtgcacggacaattttgccgcctctttttagccgttcgatccaagtgttttaatgccggccgtctgaagacacgtgttgtggacccatccgtggaagcctcggattgactctgggctcgggtcgaccaggatgtggagcaatggcggctgcttttggcttaaagagagacgatagacagtaaagggagggcaaagcagaaatacagaaatataagtgagggaaaatggaagaaaataaattcatttatacctaaattatattttgaaaaaaaatgctgaaacgaaaatgtgaggtcaaagttacttttggagatatttaggataattttgatgattttctcaacattatgcgaaatatttttatttgattgtacatatcttgattgatttattatcttatttagttatttcataaagtctataaataggctaatgaaatcattgttataatacatcaaaatatacacaattgctcacttttgcatttatttcttatttctcaactcgatatcaaagttagtcgcacttttacatacccaactgtacctccaaagtgcaccattgaacttgtgacaacgtttagatttaggtaattattcagaaaacgaaagcgaccacaggtttatgaattgtcacgcatgacgtcattaattaagcgacaagacgtgcgccaaggccatgcattcctctgcggctatccttcttcctggcaacagttcaattcctcagacggtctggtcaaacccgaagctcgactaggcctttctcaaccaaaccctccaagaaagcctaaggacagcatgccctcgcgcggatcaacacgaccgacgagcatcgaacttgcgtaacttaccccaccaaacggtccccttcgaggtcaaaccccacgcgaacgaccgatgaatcgaacatctaatctcgcctctcctctcctccactgctatatatttcagctactctaacacactctcatcaccaccaacttcaaactctctctctccctccctccctccctctctcgctcacacatacacacataaacctatactacatcgtttcacttctctcttcccgagctcagaaacgatatggggtcggaggcgctcgtccacgtcctcttggtctcgttccccggccagggccacgtcaacccgctcctgaggcttggcaagcgcctcgcctccaagggcctgcttgtcaccttcacaaccccagagagcatcgggaaggcgatgcgcaaggcaagcaacatcggtgaggagctctccccggtcggtgatggcttcatccggtttgagttcttcgaggacgggtgggacgaggacgagatacgccgccaggacctcgaccagtacctcccccagctcgagaaggtcgggaaggtcctcatccctgagatgatccggcgcaacgctgagcaaggccgccctatctcttgcctcatcaacaatcctttcatcccctgggtctccgatgtcgccgatagcctcggcctcccctcagcgatgctctgggtgcaatcctgtgcatgcttcacttcgtactactactactaccatggcctggtccccttcccgtctgagacagcgatggagatcgatgtgcaactcccttgcatgccgctcctaaagcacgacgaggtcccgagcttcttgtacccaacgaccccgtaccctttcctccggcgggcgatcatggggcagtacaagaacttggacaagccattctgcatcctgatggacacgttccaggagctcgagcatgagatcattgagtacatgtccaagatcagccccatcaagacagtcgggccgctcttcaagaaccctaaggccccgaacgccactgtcaagggcgatttcatgaaggctgacgactgcgtcggctggctcgactcaaagcctgcttcctcgatcgtttacgtgtcgtttgggagcgtcgtgtacttgaagcaagaccagtgggatgagattgcttatgggctgttgaactccggggtcaacttcttgtgggtcatgaagcctccacacaaggactctggctatgaggttctcaaaatgcctgaagggttcttggagaaggctggtgataggggcaaggtggtgcagtggagcccgcaagagcaagtcctggctcacccctcggtggcctgcttcgtcacgcactgcggttggaactcgaccatggaggccttgacctctggcatgcctgtggtggcgttcccgcagtggggtgaccaggtcaccgacgccaagtacctagtcgacgtgttcaaggtcggggtgaggatgtgccggggcgaggcagagaacaagctgatcacgcgggacgtggtcgagcagtgcctccgcgaggcaacctcggggcccaaggccgaggagatgaagcagaacgcgatgaagtggagcgcggcagcggaggcagccgtggcggagggcggctcctctgaccggaa

SEQ ID NO: 9851 - DNA, 1901 bp, Eucalyptus grandis
  Intron number 1 from transcript Egrandis_v1_0.012446m (loc us Egrandis_v1_0.012446m.g) derived from phytozome v7.0 (c hr-ID scaffold_6; pos 52303710 to 52305610)
atatagagaaaaggcttaggcaggtgatgaaggtgaaaccattggtcacttgccaattgtcctgactgcttagcaagattcaacatgtatgtggaattggatgttccaaacacatggatcagtcctcaaggttaaatcttttgtctgagcaagctatatcacacagcaaggagaatagataaaaacaaggaatgaagttgaacatgaccataccttgctaagaggtgctgcattgcgaaacagtaatgtttctattgaaaattccagaatcgaatctactcaagcatacaagctatgtcaccagtcacccctcatttgaccagtgttctctctctgttcaggtaacatggattttttcttccttatgactcctcattagtcattacgatgagcaatgccagtctatagcctatattgctagcgtaaattgcttggaagcatattttgctattgcaaagttctttctgtagttttcttgtatgcctagatattttgatccatgctttcactggcttgccctctgcacgagacaggaagatctggtatgtttctcctgtcaaggaattccacatcttcaatcatctttccttcagagactaaaaataaactatatgagatgaatgatttcctctgaatattttctgcatctaacccatatactgtgaattttttaagctcccgaaactgatcgagaggggggggggggggggggggggattggagtgtttgtcgcaatcccgtaatttattgtgaaatgagtgatctaatgtggatgctttatggtcttttaacttagttgaggtgtcagaactggtttattaaaatacagaactgcggtctgtttctgtaaggcgaatgaaaacgcttttgtcagttacctttgcattcaccttcttgatttagcagacacagtcgagttcttcgacaagtcaaaggttctaccttaagctcgttcatgccactgtggagttttgattgaagccagaatggtggttggctcctctctagttagatgcaagcctaaggtcgtcagcatatctaaattgtttgattgatttcgtgtactttggcatgaattggtaatagttcttaaagtagtggaattggaattggttcttcatttcctttcataaagatgcttggttacatgcaatgacaggaatagaaactagtcaccattcacatgcagtaaaactgtctccatgatcctgcttttgttgctgggcagacatgtattgataaaaatcagaattccagcactgagcaaacaaaagcaatcattgtattgtcattcaaggatcttcatcgcatcatatgtttcccctcttcctcttatttcttcgatgaagttttatgggaatgacatcttataattgcgctttcattaatatatctgtgagttacgtggatagcattgtttccaactaggaaaaaagaagataaacttggcaggtgctcaaagtgtctccactttgaatagttgatgtatattcatcaatcttcaagtgttttcatattatgatgttgaagcatttagctaccactagtttgtttttttggtccatgtatattcatcaatcttcaagtgttttcatattatgatggtgaagcaaatagctactactagtgtgtttttttggtccatgtatattcatcaatcttcaagtgttttcatattatgatgttgaagcaaatagctactactagtgtgcttttttggtccaaaagtagctactcacttagtggcaaatcatacaaagattctggtccatgtccatgtctgtattaaatttagtaacggcatgatatttgtgattctgattccttttactttgctcattccatctacctcattcatatgagtagtggggttttctgatttgcttttcaggttctgggga

SEQ ID NO: 9852 - DNA, 853 bp, Eucalyptus grandis
  Intron number 2 from transcript Egrandis_v1_0.040768m (loc us Egrandis_v1_0.040768m.g) derived from phytozome v7.0 (c hr-ID scaffold_5; pos 52152230 to 52153082)
ccaaggtgagcttagaacgcccgcttttactttgtatcttaaccttattgtttatccaaagccgggtaggacgatatgcaagctcgaaatctacgaaaagcctacgggtacagttggaataattaaattgttcagatcagataatggatgctcacaaattggtgacataggataatccaagagagaatttgaccgccgaatattccgtcatatatcttgaaaccgcctcttctttttgcttctttccttaacccatatatcattcaatatcaatcagatatcaatgagtgcaaacaaccgaacatcaaatgccatgggaagtgtgtgaatcgaccagggacacaccactgtgtactccataagaccatcgccatgataggtatgtcactgcctgtcctctctcttcatgctcgcggaacgcgactgtctgtatatacaccaacttcttctgcatgagacggggaaatatatcaccatctctcctcaatttaactgtactttcataatgtactttcaataattcttttaactcaattatattttccaattctatgaatttaataatttgattgaaatcttcgtttctcacccatacatgatgcatcgtactcgaggatctttcgaattatattgttaagtgaatcctcctttctgttttcgctcttcaaagcgagaaggcacttgttcaaattggtggaagcaaattcgttgacgatgaagatgaaattggttatgtaaatcctagggccaagagaatctctcagaatgtcatctattaggttcctaaagtaactgcagttgacttcttttttacacaggtgtgggcaccagtgtcgcagccgtaggattatct

SEQ ID NO: 9853 - DNA, 3022 bp, Eucalyptus grandis
  Intron number 1 from transcript Egrandis_v1_0.020683m (loc us Egrandis_v1_0.020683m.g) derived from phytozome v7.0 (c hr-ID scaffold_2; pos 56609407 to 56612428)
cgagacccaagtgggtgttctggctgctaaacaaggtaatgtcctcgctgtttgcgtgttcttgtcgccgtttttgtggacacttaaggatttggttttatctacttcgtgcggaatttgtgcaatttgaagttgtcggtgtctgtagttgtttttttttttcctctggatttgtctctggatatttcttgttttggtaggtaagcctggcctaaaaaagttccatttttgtgtctatcctttttgctggggtctttgttttggttgttttaggtctatcactgagagtcggattgactttggcttggatgattctgttcctagaggaacatattcccataggcattaatggaagaacgtgtacaagaaatgaaattagctgtgttcttgggttgtttttgtgtttgatatcctgcttaggtaggttttaagcgaatgatggctcggcattttttgtccatccgaatcatatattgggtgttacattccatcaagttggaagaaagcagaaaacaaggttagtgtgtgattgaatggtgtggattgatcgggtgctgcaatctgggagtctatagagtttccattgataagaatatcgacgatatatgtcaaatatagggcaacaaaaaaagctgatttgaaagccttaagttgaggtatactggtcttgacaaagaccatgtgaattcctaggactgttgctataatctcttggccaccaagcagcccgaagatgtgagttcattgcttgttgtaagtaaatcagaaagtctcctttctagatatttctcacgtaacactaggaacatttcaggctcacatttttataatagcaactaattctttccctagtgccgtgttgatttgcctgtggagtcagctccagcttagactcatttaggatgaactgaagaaccaagagtccagataggacaatgtaacacgttggaactgagagtaaaaaatgggggtggagctctgagacgtgctggacaagatttttgtatgagagggtataggcaatcactggaatttctgatctacaaattcattttagttgagtattatttggctcaaagtacgacatggttctaaccttggaatccagacattttaggtgtggctcctccggagattaatataccgctggtcttactcagggaattattattcttgaagtgaaaactatttgaagcaaacgtggcctactcctaaattaaaaaatgcttaatcaggatggttattttcgaagactgatgagcagatacctgttattattttcagtacagcgagctggagtttagctagatagggcccgctaaaatttggtggtgtgacatcgaaattgtttgaagtagcgatctcagaaaggacttcaaatctagtttcctagaatacctcttggacattcctggttatcaaatgctgtggaaggaaagataattttagtagttacattggttcactttcttgtgatgctgtcaaactgttggagtgataaaagtgcattttcagctatacaatgaattttatttctgcagaagcttacggtaaaatggaaaattaccttctagttcatgcctccgctttggttccagtcaaatattgagttatctatcccctttaaaagaatgcaattcaccattgacgtagtaacagttgaatagtcttttttctgacatgcttaaagagtgtcgaaggacagttctttgggcttagagagagagagagagagagagagactaagcacacttggctgtaccaaccttcggtttccactgatttagcagtttgcctatgccatctatatacttatccttttgagaaagattaaaaacaaatgattgcatcctgggatgtaaatgtgcttgtagttcaaaaagcacaattattatttcgacaaggaaggttaggctcatgaaggaccctgctcacctgatggacctggtatgatttaaactgaagtccaggttattggctcaaaatgtaacagtttacacttcggatggtatgggtaagttgcgcctaatccaacccatggggtctggcgcaagatcaagtttgtcttgcaatgtctgtgacttgtagcttgaaaccgctattggagactatggaaggctcttagaatgcataaaaattatggaaagcgattcatgaaacttccaaggaaggatattagaggaagtccaagagattatagttgaacagcaagaaagatcgtcctgatggtaatttgatgcttctcatttcataaaaagtgttgttttctagctttcaattgcgaatagcagttatcaatgtgtattagacaagatttccagcagattgtacatttaaggacaatagagagagaatagtaaccgagtgcaattggggtttgaaagagccaatgaggtggtgcttattcgaatcgggagtctgtagtgggaatggtctcttgctgtgtttctgtatctgtgaaaattcctaacttatcgggccaaaatcaaggatgagaacagatattctgcagaagatgttgctactaaagtaactatggaacttcaatactgaatcttttaggtaatactagtcaccccagtgcgcacagtaatccattggatttggatattgtgaagcttctcaccctgggaaatgcgtgtatattttctgcctcttctgctgatagctcggttcattttgcatacttcatgtcatataatgtcctctggaggggcttctatgtttgacttttgtcttgttgtaaattttgtggactcatgtttgttgtttatttgatcttttgacatatatgatcacatggattcttgaatccttcaaaacgtgaagtcaaaagtagctcctagatgctgacaaacagaacctgtacaactagacaaaaatttttttctttattttgcccttgctatgaaactaacgtatgtcgagggcaaaaaatataaagaacaagaataatggagaatcaattactggctaagctcatcatctgtatcttctatgtcaggatcaagcggctacagcg

SEQ ID NO: 9854 - DNA, 7417 bp, Eucalyptus grandis
  Intron number 9 from transcript Egrandis_v1_0.005005m (loc us Egrandis_v1_0.004118m.g) derived from phytozome v7.0 (c hr-ID scaffold_7; pos 18392098 to 18399514 reverse strand)
gtattgtattggttggattgatacaatatactaaggttttagagtgatacaatatagtcacagaggagaaagcaatgagcacagggaggagactgaaccagccagagagatatcaatttcagctactccatcggctggatcaacaagcaaccacgcaaagattagtgccaatacttcaaccttcaaaattaccaaaagattcatgccttggtgatacaagcctctcgattaatttgtgtatatagtgaaggcttttattggtattgggcttaaggcccgtccgcccaagttgggcccagaaagctcggcccacggaaatgcggcccgtggaaagaagggggtataaaagggaggagagagagagaaaaacaaccgttggtaaaattgtacgtacggtgttttttctctcaacgctctctccctctctcccgttttctccaaaagtgaaacagtgaagcaattgaaggagtttgcctcctcggatcgaacaaggctcgatttctcttcctctgacggcgtcggtgtctaatctgtggctaacaaggtacgctcaactcagtggtgtgctttacgatcggtgatacgtgtttttcctgggcttcgtcttccgcattgatttaggggttcgattcggtgtcgaatccggtttttcggggatcagtaattcccaacattggtatcagagccctgtttcacgtctttcccgatcaattctgatgtttttgattgatttttcgcgaaatcccttcggccgtacggaaccgggcgaaaatcccgacacccgagcgcttttcgcccttttttctgagttttcgtaagtcgaaatcaaattatgaaggcactgggagaaaggcgacgtcgagacgagtccgaagagtggtcgcacgccgccgtacgacgccgcacgcgcccacacgcgcggccagaagccgctgcgcgtgggcgcgacgcgcctggaagcgctggcttcgccagcgcgtgcgccacacgcgccggtggcgaaccggcacgtgcgcgccggcggccggcgaaccgccacgcgccggtccgcggaccgacgcgtgctgacgtcacgagatgacgtcatcgtgacgtcatccaacggtcggtaaccgttcggatgacgtcacctatgacgtcatcgccgacgacgtttcgccggaggtcaccggccggcgacccgactcgaccggtgacccgacctgactcacggacgaggcacgcgcccggcacgtgccggatgacgtctgcgtgacgtcatcgcctgcacgcgcgaggcacgtgcggtcggtccgtgcgagcggtccgaccggcccgtccggtccgaccggttcgaccgtcgcgaccggtccgacccgcgcgcccgttgacccgacccgttgacccattgaccgttgaccgaccgttgaccgttgacttgtccgttgaccgttgactggcagttgactttgaccattgacccggaaaaaaaaaaaaaaaaaaggaatttgttttgtttttcaatcatgcctatatgtggattataagtaatccatttttttaattctgcatttgttgcatgaattatggaaatttatgtattttccattttatttattgtggattataagtgatccattttagttctgcatttgttgcagaaactatgatgcgtaatgcacggatacctgcaatcccgagaacggacgaaggaagagctagactgaaaaggctgatgaaagagttagctgattttcggtggcttgatggtgatttagtattacatatggtcaaggtcaatcagatgatacaggaaatcatcaataatggttatcttatgccggattttgagaaggtgccggctttgttgaacactcttccacctgaatggcaagcagtattagatcggctatgggaggtcaacgtggtcccgggttataggaggctggtggaaacttttgtaagagagtactataggattgagttggccaaaatttcaacccttagattgtgctctacgtggcgcagagtgaatgcgccttggtggcgacatgaacactctccaaaagtttttccatggttggcaaatgtaccttcagttttctcagatgttttgactgatagattagaagggacattccctaattatttcttagattaattatgagacgttttatggatgtaaatatctctttccaagttgatattttttctttgtatatattgctcagtgtaatgtatagttgtattatgtgaaagcactattattatattgaatgttagattatatttgctttctgttactgctgattgctgtgggtagttagctgtgggtagttatagaagtttttgtaacttcatagaattgattttgcatatgacaatcatattaatgatagttttaagttaggatttttggaggatgattggaaacgtagtgaccttttgattctgaagccttacttaaaattattcattaatatgatgggtctatgtaaatagggatgcataaatgataggcattaattatccgtgcatgtatgtctgatgtgttcagaacgatagttcagcaactaagaatataattgctgatatgaacggctacaattgtgaaatattgaatatgaagattcaatatgtgctggaaaagcaaaaagcactagaagctctcgaccatgttatggaagatcttgagaatgctgtgcgccaccttgagctggtagatgaccgcttaatggcatgtgagctgagaatagatatttgcaatgctggttctagctcataaagggttttgagctctaagcgcaagcgtattgattcgttcaatatgtgggaatgcaaaggatcaagtccttgttgcaagaaatcgagagttaaccaacacaagagaggaaaacatcctcaagtaaagaaaatgtcaagggaagggtgttacaattgtgacaagagaggtcactatgctcgcgactgtcgtgagctaaagaatgtaaacacctcttgtacatctgagaattttgcttatgtgtcaagttctgctttattggctgaatccaatcctttgtggactgtagattcaggagcgacagactatgcagcgaaggatataaaatccttcgtggaattttgacgagtaccaactggaattaagtgtatctatgtaggaaataactccagagatgaagttaaaggaattggcaccggccaattgaacatgcgtggtagacgcaccttattcctacacgatgttctatatgcttcggagattcgtcgaaatttaaatgtctgttttgatgttggttaagcttggttttagaatgaacttccataataaatgtgtagatttgtgtttagatacaaactgctatggttgtggtcactttctagatggttttattgtactaaatgttgactgtgttgatgtcaatatgttatccccttgtttcacgtcttctatcttatatgataatgatgcgaatatgatggcatgctagacttggtcatatgggccaacaacatatgaaaagactagccaaaaagggcttgttgggcaatattgaaaaagttgatttgtccatatgtgagcattgcctagtagggaaaatgacaaggagaccatttggaaaaggtaaaagagctgaatttcctcggcatttaatccattatgacgtttgtggttcaatgaatgtgagaggaaggcatgggactgtttacttcatcacttttaatagatgattatactcgattcggatgtgtctatttgatttctcataaatctgaagcataagttgtttcaaaaggtttatgaacttggttaaaaaaaatcaattagacaagaaaataaaagtattgagatccgatcgaggtcaagaatatttatctgatgagttcagaaaattatgtgatgaaaaaggaatagaaagacagttgtctattccatatactcctcaacaaaatggtgttgcaaagagaagaaacagaaccctactagaaatggttaggtccatgatggcgtatgctaacttacatatcacttttatggagtgatgcgttgttaactgctgcctaaatacttaaccgggtgccttccaaatcagttagttccactccatatgagttatggataggtagaaaaccggacttaagtttatttaagccatggggttatgctgcctatactcatatgtcctctcacaagtttgggaaattgagtcccagataaaagtagagtattttaatgagatactccgaacactcgaaagtgtatgtgttcatagatgagcaggaaagtgggagaataactgaatttgaatcacgggatgtcacattcttagtggatgaattttcctaagaagggcgaaataggagaagatcactccctatttgaaaccttggatctagataatgatattggttgagttcatccaagtgggagtaatatgagaagtgatgaattgaattcaactcattctcaattacaaccacctgatgtgacgacatcatcattacctaatccaagtgggagcataatggggaatgatgtgctaagtgtacaatctcccatacggtgaacaagtcgccaaagtattccccgtcgacgttttgacattgaaggggaaacttttatgattgctccgcaagatgaggatgagccaagaaatattaatgaggctctaaattgccctagtaaggagaaatggatttatgcaatgaaagaggaaaatggagtcaatgaaatcaaaccaagtctgtgaactggttgatcttccaaaaggacgcaaagccattgggaacaagtgagttctcaaagaaaagcgaaaggctgatgactcgattgaaaggcataaggctcgccggcgaaggggtataatcaataggaaggaattgattatgaagatattttttctcctatagtaagatttgccttgattcgcatagttttggcaatagtgtttagtatggatcttgagttacatcaaatggatgtaaagactgctttcctcaatggagaattagaggatgaaatatatatggaacaacctgttggtttcatagtgaaaggccaagaagaaaaggtatgtcgactttgggggtcgatatatggccttaagcagtcgtcaagacaaggatatatacgttttcataatgccataatggcatatgactttacaatgatagatgaggatcattgtgtatatatcaaaaagatccaaggatcaatttgtgatcatatcattatatgttgatgatatactaattgccggaagcaatatggagctagtcaatactgtcaaaagttggttgtcttccaaattttgaattgaatgatatgggattgtaaacccattgacgctcctattgcaaaaggtgaaggattgagccatagactgtgtccaaggactccacaagagaaggaacaaatgaaacatgttccttatgctagtgctgttagaagcttgttgtacgctatgatgtgtacaagacctgacatatgttttgcagttggaatggtgagtagatactaatccaatccaggtcaagcacgttggaaagccgttaagtgaatactgaggtatctaaagtggactgctgattatatgttgagttattatagaaaggatctgcgactctaaggctattctgatattgattggggaggagatttaaatgaaaggaaatctacctctaggtttgttctcttaccgaataatggcaccatgtgttggagcagtaagaaacaaaagtatatagctttgtccacgatggaattgagttcgtggtattatcagcagcagtataagaagatgtttggcttaagagattattggatcatttaggtgttattggaagtgctgcagatttgttattagttaactatgataatcaagcagcaaaagtgtacactaaagatccaaatatcatggcaagaccaaacatatagataccaagtataattttgtcatggatatgattgcacgaaaagatgtgaacttagagtacatactacgcatggaatggtagcagatcctatgacaaagtcaatacctagagatgtgttttgtggccatatgaaatctctaggattgcgtagagactgatgtactgaatattataatttttccctaagtgttcacatatgatgaatttatgtttttatcattaatgcctatgaatctttgtttgatctttatgcatcttaatgctcagtgcattactttaagttagaagaagtatgtcggacagatgagattagcccactcacacgggtaatcgcctctatttactgtgtgataaatagagatgagactgtttttaagcttattatctaggtgataattgagagctcaagcttaaaacacgtatgtcgccttaactaggtgttaagatgaggacataatacttactatgtctgaaagtaaaataccccacatattttactttatctgtctatgatgccagatgtgagttctgatgaatttagtgaatgagtagatacgtgaactcaagttagacattgggtatgtctgaactatcatctgtacggtattgaaaggtgtagacatacgctccatgggaaaggagttaataccgtaatacgtatttcatactacgtatgcatgagacgaccaataagagtggcaaaagtttgatctcaacttttatgtcgtatgagactcttgaggaaaagagttcctcaatttcttagtcccctcaggactcttacttattctcaagatttctatttagtgtttgctatcttagggtgttgccaatggtcaggagatgattcgatctaatggggcattcctagaaaagcaagctggactgaaattgagagttttgaaggaaagaggaagatcgattttggagaatcacattgtggttttgtattcactggtcgaccaattatgactgtctttgtgataattataattgtgaatacaatatatatatatcattgtttaaaaagagatcaaaagagagatataaatgtgattgatcgatctagggtactgcatactaaatctactcggagtgtgacgcccattatgagctgctatatattcctaacagatgtatagcaacgagctctcaaagtatgctggtcgcacggattattcaccggtatgaatgttgaagagaggtaaagagaatcctgttcggcccaccttgtgcgagtgggagatgaaggcttttattggtattgggcttaaggcccgttcgcccaagttgggcccagaaagcccggcccacggaaatgcggcccgtggaaagaagggggtataaaagggaggagagagagagaaaaacaaccgttggtaaaattgtacgtacggtgttttttctctcaacgctctctccctctctcccgttttatccaaaagtgaaacagtgaagcaattaaggttttagagtgatacaatatagtcacagaggagaa

SEQ ID NO: 9855 - DNA, 1798 bp, Eucalyptus grandis
  Intron number 7 from transcript Egrandis_v1_0.002056m (loc us Egrandis_v1_0.002056m.g) derived from phytozome v7.0 (c hr-ID scaffold_4; pos 27464219 to 27466016)
gctctttggggattatcagtttcagaagccaataggtagtctcatatttctaaattggatatataactgtgcacatttgtgtgaaatgcactgttaagttcctgtgcatgccttcatgcatctttaggaattcaataacatatggttcgatgcgttctggaattgctttcaatatggattttggtgggccttgtcttgtatctagcaagaaattgacatgcccatacttttcatgcaagcatgatttagtgaaatgtatctattaagtggggatgataatgggtcaatttgttggattctattaattgatcaaaccaactaggaacttcgattgtcaagttccaggtacaagtgacaatatcgcagagaccctatggagtttggacggttttagccttaaggaccttttaaatattcaaacctgtctcaataattgttacactagcaaagtggcattatttcaaaattaattcaataattctctgggattttgagcaattcaaataagttagcatctctttgagttaaggaaatgccaaaattttggatttagggtgggggagatggtcagaaccccgttttctctctagagttgagttttgatgccaagagtagctaccttaataaggttgctctgtttgggatgagaaaatgctattgaattctagtttgggaccagtccccattggcaactcaccttgctgccattcccactactaagaaatgattgatacttttaagtgaaagtaattgctatttgttagaatcagtaattaaagggaaatgtgaacttgaatgtgttttaggcaacaagggaaattgacttgtaagagatcagtcaagacatatttgatgaggttgagttggtggcatctatcttatggtatttcttgttgggttagcattcatgtcgctcatgtgctggcatcttggtaggacaagaaaaaagatcctctctcagcttttcgaaatagtcgcgaagcaaagtgtcattataagggctaagactagggcttaatacaatttgtccaacattgaatggaagcttgaaatctcaaaataagacatggatgtttctgtgcctgaagaaaatagaaataatggatatatatgtgtgcgcgcgcgtgcatgtagataatattgccagtgagattaagcatggataagttttatggcttgtgaagagccaatttgtggttgaatacttctcaagactcgtatgcattaattttgtcacaaagctgatcagagaatctgcagtaaatagctaagagaaaagaaggaagagagaagaaatagagaggagaggaagagaggaagaaacagattgtaaaagccaaaaaggggctctctgtttctgtgttatcaaagccctacacctatcgcagtatatttatatccaatataaattgtacatgaccataatgcccttatatatgtaaaagaaataaaatccagaaaataaaatggaggccactcaagtgacttaacaaatttgatactcacatacaggatttctgttattctgtgaattagctagtgtcaataatattggatgcataggaaaatatggttttgcttgagctagatattgttaatgctataagttatgtatagcatgatgaaaattatttattctctcttttgcatgatgtgtcttcccttagtagagtgtgtccagattgttcctcagcatctttgttttctactcaatatacttgctgttcttttctatgatgctaacccacagatttttttggtagtgttgctattggtcgagaaggtggtgttgctcctt

SEQ ID NO: 9856 - DNA, 774 bp, Eucalyptus grandis
  Intron number 1 from transcript Egrandis_v1_0.047477m (loc us Egrandis_v1_0.047477m.g) derived from phytozome v7.0 (c hr-ID scaffold_3392; pos 2680 to 3453)
ccacaccgtcgagaaaggcgctggccacaagcaaggttcgctctctccctctcgagaatcttcttcgattcgtgtttttttttttttttttttttttttttgcgtgcggttctggttcccgggattatctagtttccgatggagatccgtgatctgattgtcccgcgcaggttctattcgttggctcggtttggttagatctgagcgattcgtgctcgtaggtggaatggttagatccgtttcggcggtgcttagttcctgcgtggtttgtgcctattgacgtccggggtgaaatggatggggaacgacgggaaatggaattcgccgattggtttttctgggattggattctgcgcttttgtgtccttttctgcccgtggtttggtttttggtttaggttaagctgcggacgattttcgaaccggtgcttttttgtggcggcgaatctgtgtagtaaagaatttcgtgttgttctgggacgaccgaaagcttttttgattgggtttctgtacttttcgatgtgctgtatctcgggatctagtattgtagaggacgcacatcttatcgactgattgtcaggacataagtctttgaggttaggttgtcaccacgcgtggagatttggggtctctgttgttttttgtttcgttttcatatgcagcttcgttttctgcccgtcttgatttatgtcattccgaagctttttgtcttttggattttctttattatcgtttgtgatgtgctcatactctggattttcagggcccaacctaa

SEQ ID NO: 9857 - DNA, 2555 bp, Eucalyptus grandis
  Intron number 2 from transcript Egrandis_v1_0.007724m (loc us Egrandis_v1_0.003317m.g) derived from phytozome v7.0 (c hr-ID scaffold_2; pos 43211807 to 43214361)
cacacaggtaatttgcggatgcaatacatctccatttacagtttactaatgatattttctaatgaaaattgaccaatataataagttctgtctccaagtgataataaaagtgacatctggataaacaggaatgttcatcacatgtataaagatagacattgaaacaaataagacttttggcccatagaataaggtactggtgtattctggatgtcgatttgcttctttgttcattaatatgatacttttgtctactctggcgtcgtctgtctagttgcttggggggctgggaagctgggcatctttccctttgccagtgcatgaacgcttaatgtttgagggtgtggttaatattccacgttagttctttaattcctatattctgcttcatgtagtatgatcatttcttaaacgacatttttgacgtcttatgcaattaggattgaattgtcaaagacttcgttaagaattaaaagaatctttcttgaatggattaattttgtgttcagatatagcctttaaaaattttgggatcatggattatgatggaagttgtcatagttccgcttcttgaggtttcagatgagatggagcagctttggaacatatatcatgcttgtattggggacacagtgtgtggtcttaaaaaagagtaatacgtttctttataattctagaaatctgcatgtcgctcatttgagataattaagtcagtacaaatgtggatacaacttaccttggcgtgttaaaattgatcaaataggtgctggaataggctacaaagtacttagttagccatatggtgtgtttagatgtctactgctaccacttcctttcaatttaagaggcttgtatgatgattgataaaatttgaactcctaatttggccctgacctgaagaaaaaatgttgatgattgcacatgccatagttatggttcttttgtgagaattttagatgttgctattgctgcgagttcgagttggaggaaagcatggagttgaatgcacaattgctgttatagtgtcagtattttgcttgagaaagtttttagtggagaactagataatggtatacaaggtttctgcatctagttcaggttggctggttgagttggttgggtcacgtaccaggtgttagactggtctggttagagtagtggtcctagtggagtatggcggcagctttgcggaagaacgggactgaactggtttgacctctagttcaactgctgaagtagactttatagagtctactggttagacctgcatcaacctggtgtggttggactaattggtgaaagttgtgtgttaagctgccatatggtattgaacctgtggacaaggcttcttgtttgagctgctaaagagaccaggtcattaggaagcagcttgaaattaaagcaagtgagctggtggcatagacattttgtaaacatgggcaaataatgtgggggtgatgcttctcattcagaaagggtggcgacacttatatcaatgtgtttgccgagattatgtatcatggtaacaaatgttttataaaatcaccagttgacctggtggtccaatctgccctatcgttggtgattccattggccacctgacagggtcattcccccatcttcttttaaggacactggcaatatgtggagcagtagtttggtagcttagattttcaggcactttggaagtgctgtatacctttagaattgtttagatcattacaaggactgctgtatctttctatatttgccacatttgtgtattgtactatcatttttccccctatctagtctacttaagtaaatcaaatggagagtttcccgaagatatggcttttaaaatctgtccatgtgagccgtttcggtggcaaacaacacttggtttgctggtttctgaggccaccttcttcttattcttctcctccatttgctcttcttcttaaataggagacataggtctgtctgtacatggcagtggcaatggccatattcaagcttcgttttccttttccttgtgctgggcctttcctttctctatcgttgcttcgagatagctcttttctcccctcttatgtactactggctcgaagttgctgactgaaactctcccttttgatgtccaattttagcacactctatttgttttgtttaaggtccttgcagcttcatgtcaaataaattgactgttgctattgctgttttcttctaattctggttgcggttgttgcattgaggtgttgtagttagcttgaacagtattgtcagctgtgataatggataaaagaaattgctatatgctttggttttctaattttgatcaactgaggagcagcactgtcaaactttttaagcttattgtttaggtagttatgctaaacattcaaatttgcactcttacctttttgaattggtcaagctcccatttgaatccctgaaaatagtaacttgcttcgaagtgcttcatggttcttgaggttgactggtatcttgaaatgaaatagttgaattatcttgctataggtatttcctgcccctgctgacagagaaagagtgaa

SEQ ID NO: 9858 - DNA, 956 bp, Eucalyptus grandis
  Intron number 2 from transcript Egrandis_v1_0.009746m (loc us Egrandis_v1_0.009746m.g) derived from phytozome v7.0 (c hr-ID scaffold_2; pos 19331233 to 19332188)
aaatctcttcccagaacatcattataatcattttggtgagtttgctcctctcttccacgtttaacatgaccacacttagagacattaggtcgaattcggttgattaagtggcgcgacaaacttaagtgacctttatgtcttcgtagattaacaactagggtcacatcacgcattacggagaagttttagtagcttacttaataaatcaatcatggtgctgtctaagcactgatttttcttttcattaaaataaactaaaatcaatcttatgtcttcgtcaagcaatttaactagttattataaaattaccaggttagtcaagtcaatgtcaatcaagtcgagaaaaattttgacattggcttacaaaatttggctgaaatcaaattgattgcaaggataaaaaccagtgcaaataattattgcaatcaaactcttaggcaggaataattttcaaagccgttgacggacaattgcagtaaagcaattattgtagctgagactataagaagcgcacatcttaatggaacgcgcagacataagaagaacaagctttacttatgttaatccattttgctctcttgcaaatctttttcagttatttcccagcaacctatttcttgccattccagttgtttatttccttttgtcaatcaagcacttgccccatctctttcataaatacttctgttgtcactggtggattcatttcgtcaacttcaagttcttgttcctttctttgtgtgccaatcatctgccaattcgaagaataggaactgctgtgtttgatcaggattgttgatcaggtgaagcatgataatttttactattgagctgacgattcgagggtgaccttttccagccaaagagaatctcttaattataggacgaaactcggacacttgtggtatccaagacctaatctttgtactacatgggtctacttgatggtgcaggaa

SEQ ID NO: 9859 - DNA, 3500 bp, Eucalyptus grandis
  Intron number 3 from transcript Egrandis_v1_0.014738m (loc us Egrandis_v1_0.014738m.g) derived from phytozome v7.0 (c hr-ID scaffold_8; pos 36834968 to 36838467 reverse strand)
caaaaagtttgattggctcagttgttcctgtgaaggtaggattgctgatcataatggtttgcctttagactcttaaccatatttctcatggcttgctgcatagttctagaatagtgtcaagatagagtgcattcttgatcaattctagaattaatgatttttgtgctgattgctgaatctgattggtcacatgctgcttgtacttgcttgtgttggacatttcattgttacaacaatcatttaaagagtcatcagtggaaagagttttctcaagcactgggcaatgaagtctaacaccaggatggccaaaagagatctaacataaatctattcctgtggctcttagccttacttttcattttatagtttgtggaagttaaactatcagtcaaaagaaatttgatgcatattaagcaaattgcaagtgtaggaaagagtccaattctctagactttaacacatcaaccaaaacattatatgtcattttctcttgacttgaaattagttttcatgtgtgggcataggaagtatttagcaagtgatagaaacctatgttctaccttatggacagtctaggaccatgctcaacaaagctctgagtttttccttctctcagaatatagagcctctgcctctggacatcttcactttctgtagtttgtttcaaagccatacaggatagtttctcattctatgtggccttgtccttgagattggcttcctcagcctgccccagattgattattgttatctggaccaactccctgaagagtattagcataatcagcgttgcagttatacttgtctcccgggaataaattacttttcttgtttcaatattttgtgccatcctccaaaaggagcaattttcattgttacatggtggtttataaaagttcacctatctaggctttgattttggcactagtctatgagcaccaaatttaaatcatgatgcataacctaattagatactccacttactaaatcagtagtagcttctttagtttgggattgttgagagcagcagacatattcacattaacactgtctcaggaatatacatcatagcatttgctaaaattttgcctctagtgggaagtacctcctagatgcaacacctgagataactgccttacaatactctcaaccaaattagatgagtgattaactttatcctgttaattcctccaccttgaatcggttaaaaaaaccatggtcaaccacatttatgtcatcttagggaaacttctattccatgaaactcaacagaaaggaaaatgaacttcattttatctaatcttgtaaagtacagtgtatattaagaccattgaagcagaatataacaagcatggtacacttctttttcacattaattaagcatggacatagcatagttaccaagagtaatgtcctttgaactttctgtatcaatgagatttacatgtcatggatggtctaagaatgcttcaccagaacacaaatgctttatatttgagagagatactatagaattaataaacattcatctgttgccataggcatagcaaatttgtccttgtgagataatctatccactaagggtgtgcatggcaacgtttcttttcttttgttttttctgttgttttgctccccggaatctattaaaaaaaaaaacataaatttgtttaataacgttaattaatttttttattcctcggaatataaaagtggccgaggaatagatttggaacagaaacaagaagtaggaaaaaatagctttgtattcttgagaataatttctagaaataagtcattttttcttttcttttcttcttcttctttggcgcttgccacttgttgcttgcccccgtcgcccgccggcgggcaatagacggcggaggacaaggaagaagaagaagaaaagaaacaaagaacaaaaatcttaaaaaattaaagtaaattctatgttacaagaaaatttgtggatcatttcttcttttattctgagaatagaaatttttatagttagaaattgttattttactcagaaattgttctaaggaatagaaatggaaaatgactatttctaaaaagaaattattccctggaacagaaatgttactaaacacatcctaagcgatagtggggggataattttgaagaaacatagtatcgtagatggtgatataaaaataaagcggagaccttgtttatcccaactctcaataaattgtcaaaacaagaaaagcactcgctcctttctttccccaagtaaaattgttttctggaaaatgatctatgaacaggatcgacactgaaaagattaaatgatttgaagccttaaaaatatgtattggaagatttacaatcattatcacttggtagataagcaaggttcatctgtcttttgcaagagggcaatcatttatagccgtgttattcaaaatttgggggtggtccacttgttgggtactttgatttgggaaagcttgtagacctgactctgaaacaattcattgatgttaatccaaatatggccctattaggtttggctggtaaatctgctgcatgggtgatggtcacaaaaactgatgcgtttgtcatttaagtgaaatagctctagagatgaggtcctaacaggatacaagttcttgtggtcagactatgatctaaaatgtagagaatatttgttccataatcagttaactctcaaatgtgttagcattgtcagaaagtccaacaaaaaggctaaggttattagttggagggaaattacgtgaataaaaagctaattgaaattccattaggcaagcagtgcgggacttagtgccccctcacttgaaaaccaggctgagctgcacgtgaacttgacgaatgggcagccacacatgcagaacaaactttgtgcagcagctagctctgatactgttaaaaaaagccaatccaaaagcttaagttattagatggagggagaacatataaagcccattgaaactccataaacaagctatgagggacacttctgcatttttcttttccaccccaagcatccagaaaaggaggcattagaatatacttaatgcaaaccgcaaagaagtcctattacttcaattcatcaacttgctgtcctgttcttccaattctctcacttttcttcccttaaagattgcacaaactggaagaaaaaagaatatcataaggtaattgttttgggtcaaggagaaactctagactgcttcgaagtttgtaaatctggatttgttgtgaagtcaatgcttgtgtagattgctgcatttaatgtcatagttttgttcaactttgtgatatgtgtcaattggtcagaatgttcagtttattcattttcttacctttgcgaccttctcccttccctgtccttgctgcaacactgtttgatagtccagtgaactctttcggcagtgcccttatatccttctacaatcttctcaacagaaagaggttaggtttaatttgtttcaattcctaggtaatccaagcag

SEQ ID NO: 9860 - DNA, 1504 bp, Eucalyptus grandis
  Intron number 1 from transcript Egrandis_v1_0.007234m (loc us Egrandis_v1_0.006734m.g) derived from phytozome v7.0 (c hr-ID scaffold_11; pos 16183087 to 16184590)
ctggtgggtactgagtgccgtgtttccttctcctggtaaatttttacgagctccggttcgagcgtttccgtctttactttgctgggttggttagaatttactctttttctggcatctgagttattcgcccgcggtacggagccggtcgtgcccttttggctgttgggttctggtagatttttggtgtggatgaggggcgagaagagaattctgcggttcttgattcggcccgggggatgttcagaggacttgtcttgcttgattgtttgattgatgatttctattagtgtgggagaatcatgggttcacttcagcaagtgggggcaagtcgctagtttgaatttctatgttaagcgtccggtgaatgcatacgagggaaatgatggcgaatggatcggtatcttgttattctgcaatttgaattatgtgcgtgctgcatggctcttcagtgtctgaatcctaactgcaaggttgctgttaagcattacttttggttagagggaacgagtgatctaatttgtgtagcaataaagggtcgtataagaaaggctatgagtaacgcagcccttccacaagatagaggcataaagggaaccggtttggtttggctttttcctttaaaaaaactttataaaccttcaggggtgtggatctacctgtatgtgcaaaagagaccttgcctaagtcttttttgcaaggttaactggagtgtggatctatcagtatgtggaaactgactttgactaagatgtgtagctataggggaaaggttctctacatgaggtagttgaagatatgacgacctggtctctattttcatttcggatgatatccatactaaagtacacgatccatggctaaaagaccagattacatgcttagctgtggtgttggaacactgagatatctcagtgttctaggttagtggtttttcgtgacatgggatgagcaggtcaaatggcagatctctcgggaaatgttttatcatggtatcttggaaaacctgaatgcaaagcatattcatctttactatatgatgggttttgcaattccaccttgaatgccttcaagctggaggcctcttgcagcggttatcatcatcatgtgtaatgttcttgtcttgctgatgtatttataagatcaaaggttgacctgtcaattctgcaaatgactttataatttttcctgtgaatttgcgacttccaaccgtagtggtgcttctctccttgagactcagcatcctaatgcttgtggcccaatcctatattggctctacactgcttgaatcgatctgaatgcgctattacaaatttcttgaatgtataacttgtatcttgtgggtatctccatacatcttctcccatcactgccttgaaattttaactaaagctgtgaggacatcatgaatacatctgttgcatgaccattatgtggtccttgattctgatttcttttcgttcatatcatagtttcagtcttttgcttttctttaggtcctcctgca

SEQ ID NO: 9861 - DNA, 1732 bp, Eucalyptus grandis
  Intron number 1 from transcript Egrandis_v1_0.000375m (loc us Egrandis_v1_0.000375m.g) derived from phytozome v7.0 (c hr-ID scaffold_8; pos 39570139 to 39571870 reverse strand)
tgacaaagctcgccacagtgcagagcatacaaaaagtatcatcttaaagcatgcgttcctgagtcatttatgcactattggttcttaatttgtataattgtgggtgatacagttaaacagttgtctgaaagcatgtgtttttgactgtttccccttttctctgttcttgcatccacctaacttttgagtttagtataccgtgcacataagtacgttagatcttgctctagggcagtgtgatagagacaagcaagcataattggccttgccacgagaataagatgccttattaatttcacatggagcaatatgcaaattgatttttttattatctttgatcttgtataagtcacaaggctatgtaactggatggaagttacaaccatttaaaatcgaggagataagtagcatgtaaaattgaaatagtgggttgcttgacttacttttagttactgactttttattttatgtggggtatttgaagaactttacattccaagttttcacctgcaaaattgaaataaaggttgcttgaagtgcttttggtggaatcaaattttagttatatcttacttgcttcatctgatagctgatgatatgtgtaattgatttagtttatttgtgtaagctttgccttaactggaatggcatccattaatctcatctcttagtatataaatttggtaaacataatgcacccgttactctcatctattaaggcaaaacaatatcttaatatggtaagaaagcacatgccaaattatcaaatccgggggatccctcctatttttatttttctatcattgaattcctctcatttattcattgtttgtagttgttacatttgcatgctgtgtttttgtgatatgtaataggcaggtctgaggatatgcctgatataaaatataggtgagttctgctgattgcttaagcttttgggatgaacaatcacttaacatcgtttcacaaatttgacagaattgtttaatgttagatatatggacagtctggatttgaagtacttgtttgactaaatgagtggttcagataaaatttagactattggagactttctgtaatgactaaattgtttctaaaagtaaataatgtggaaaatcatgacatcccttcatgtgtgtaagaacttcatttagggaaaatgtttaccattgatgccggtagtgtgatcaatacggattaaatatttgagttagagtatctgcatgattatggaaaaaagttggatagacaacgtgcatgagttgactggaagctattttgaaattagaatgaagttattaggactgaatttatagatgtttatcttgtacatatatctggatgtaattttattcatctttacatctttaattgggctaccttgccctggaagctttgaatatcatgggctatctaccatatatcaaggcactgacttttcaattttggattgaggtatgttcatgtacatttgaccccctgagtttctcaagagcaacagactgaatgatctttctgaaatgtgctcgattgaaaatctaccctggtggcctgtatgctgctgcggcttgtttattgttcacctctattctccatatttttttctgagatgtcacacacttgtgcagttgctgattctgaggtgcgttctcatagacgaatcttgtgacatcatctacttatttatcaattgataggtgtcactgttgaagacattgccagagaaattggt

SEQ ID NO: 9862 - DNA, 781 bp, Eucalyptus grandis
  Intron number 5 from transcript Egrandis_v1_0.048904m (loc us Egrandis_v1_0.048904m.g) derived from phytozome v7.0 (c hr-ID scaffold_10; pos 5398927 to 5399707 reverse strand)
actgctattgtctctgcttctggatcatcatacaggtaactatgttgtattgcattctattttagtgtctgttagagtgtctttttgcttcttcttttttccctttaaggcgattggtcgcataatttgacttttcttcaataggaaagaccttaaatctaaaagaacattttttatttttatattttttggtttaaacacacaaaaccttgaatagaagaggttaaggtctacatgtgttggcaattcttccttttggtagttaagagatcacatttgtgtaatttagcaagtttttgatttttaaattgtttgattctatgaattactatctgtcgagcctaaagaaatttactcttcatgagttgctggtcattgtaatcgtgctctgaaactaatctacatctacactagttgttctacatcacctatcgttggacccatagccggtgtagtgtccgttacatgcatcagttgcttatgctttgtaattattcagaggcaaggcaaatacctatgtatcctatatttttggtcaaaataggacttttatattactgttacttttttaatacgttgacatgcatctattcgcacaatccactgaagtaacatcagaacatttcttaatggtttctgaaaagctgtttcatggattctcataattcgactcacgcattcaaggatcactgagtcatcttaagttctgctttaaggtacttaatttgctttggcctcatgctctcactctgtttttaggaatttgtctacctcagccatt

SEQ ID NO: 9863 - DNA, 4171 bp, Eucalyptus grandis
  Intron number 2 from transcript Egrandis_v1_0.029844m (loc us Egrandis_v1_0.021558m.g) derived from phytozome v7.0 (c hr-ID scaffold_1; pos 24662957 to 24667127)
agatactggaactggcttcccactgaagaatccaggttggtgaatatctccaattctacttgcacagctgataatggttttaattgctaactatgtcactaaattagcatctgggcaaaatgtatactgcgggaatgatgtggccatgacgtgtttatattagtgcgccaacttatgaggcttataaagtggatagatttttttttctttgaagaatcgatcaaattgtagaatgaactcctttctgcatcataaaacttggaaatttcgagaagtgcttagatatgggtgcatctggatttgcgcaaaaggaattgacatctggtgaattatccctgtttagggtaagatataattacgaaatcacactaaagctgaaagactcaaatagaatctgattatacgcataactttcccttttaaggttgttaatttccgttggtggagatttattctaaatataagattcatagaagggtggattgaagaatgataaagcagggagtaatctgctatgacatcaaatgttattggtagtgaaattggtgaatacaaccaagcaaggccatggtactcgccccccagcccaccaaacaccaccactgatgccgccacgaaaaattggcatggcttctgcttgattttcgttctgaagaacatctcaacaatgcgagacaagtatagcataatcgcaataatgaaggtgtgaaaggaacataaactggaaagtttatgagtcatattttaacataaatgaagttatctttaatacactatagttttatagttctatgatttaaagctcttgtgtattggttatgacttcgcacatacatcgtttcctgcccccttgagctttaaggcctgcatccagctctgctggtttgctgagtacatttaagatccttctcactgatttccttcaaactttgaagatgatacttttctgaaagtctggttctcaggttttcagaggatgcctttcctccgttgatacttagtaatgtgctcctggcgagataataggcatttctactgccttattgttctgtctattggaaggtttctgtgctcttttcctggggggcgaaagttgtgcttatgtttgaagagcaataaaactctgtaaagcttgtagtcttgtgaacaagggcgaacctgggagatttgatctgatgggacaatagtaaatgatgaaagatactttaacgtggtaattatggaaaaagtgtcggcagaactgccaaattctcgagatacatctaaattttaattgaatcacttgatatttatctcacaggaggaatatgttacagtgattagtgacctctattacttgtatatgtttggtcagtgaaatttcatggcatgcaattaatgtcattattaagaacatctttatcactataagttgtcaaaaagtaatgatccatgaggatgggattctgtattgttaaaagaattcaataatatatgaaccaaagagttccaagcatgtatatgggaggatatagatctttccttatttatcactgactgttttggactatgtacccagtgaagccttgatagaatagtgaaaaaaaagaaaaaaagaagaagaatataattgaagaatcattattatgggcccttgctggatatctaaaggaagaatagtgctagagcaattaataatttactaatatgtgcaaattaatgtaacaaagattaaattgtttatttgaattagttaatgatgtggtcaggcctgatgcatagctagatgaaattagtactgtagcaatcaagaatatcaacaaaaattcattcactgattattgtcgaaaatatacataggaatgattaaatgcttagcccgatcattcacaatgcctgtatttatataatttttttactattttacttttctaattattcctgcccccccccccccccccccccaaaaaaataaaataaaataaaataaagatatcacacaggctcctaaactcatgaaaattgaatagtctgaaagatgcaatgggttgagctactccttaaatggatttgataatcatttaaaacttttgcatggaagagttgcatataaaattttatctaatgaaccttttttaattgggcttttagcttttagctcaaattttgtgctagtgctttttctccttcagtctcgtaaagataaattaatttgactcaactctttgagtgaaacccaccggtgatttgttctcaattatacttacatgtaatagtattgacaaaaattaccagccatacaagagtttttggtaatcctctagtactgctagcacaaaaattgagccagttgagattgttgtgatttatattctgtgatagcacctttcttgctcgtatttgtcttccgattttgttgagaagttgcttagaagattttatcctttttggcttgagctgccaaaaggatcggattgcattgtttctgctttacaaagcatatagtggcatgatgatgtctcaaaaagtttatgcccatagctggagaaagaacaaggaagtctttggatggaatttgaacaatagccattcacacatctgccatcttaatgcacttaaataaagggagttgtggactgcatgaagcaggaaaaatttatataggatcattcttatcactgcttcttgcttgaagtacaataaatgcagtcatagactgcatgaaggagagaaattcatatagtcatgcttgctatggctctaagaaatggttgctttcagatgaattttgtcacttcttgaatggttttgtgaatttttctgaaacttttgtaagtgtcatgctttcacattaagccaagacaacatatttgttgttaattctccaagtttaaaagcttttgccccttttctttagatgattccctctgagatgctgaaattctgaaattggatcttttcgtaatagaaattcatcagtcattcttctatgttggtgaggagcagcttctatctccaataggagctgattagttttgatctctggcctcttcctttgctgaattaacaattagaactatgatttgcaacatttgggtgattacttattggatattgtctctatagtccttccccatccaattgacggcccactacagagcttccagagaatttattttatccagaagctattctttgaatgataaaagggagtcatgtatatggttgagagaaaacttgcgcttcatttaggaagaaaggaggtaaggaaaatgagaggtgggagaggagaatggtaaaaatgtgaacattctgttagggagtaagtaatttaaatttttaatataattttctctatgctctgtaattttccctcgcctcacctcttcccaaacaaaacctttgaattgtttgaaaaccatatgattcaaacttcgaattaatcacctctctctgtggaaaatcaagtgtcactgaattttgcctaatcagcctaattcaggctttagagctttaggcatcaagaatttggatgaagtactgtactattgatggaattttggcatctatggacatggacgagttgatttaatcattagttcatttcgaatctttccaactcagagctagctttttaagattgttgctttggcacttgtttccaatctgataaacttctaatggagagagactgggactcaagttaattccactttacattttatgggaaagaaactactaagctgaagcaaatttcattgtctgagtcaagcccattatctgatgttgaggttgtctgcatggtactttttacagtttcagccgtctgtacttttctcctagaagtaacagtgtgtaggatcttgtcaatgtccctacattgaaggccttcctttctgagtgaatttccttatgctctttctttatcaaattactttagttcatagagagttcgttttttttggttaacaaactcaatttgccaccaatatttcatcattcagctgttttatgtgtgcttcgtcttacagagttgtggaaggaacttgtttgcattgacatgtaggtgatgaagatattaaatatgatagcaacagtagcaaaaatttccatctgtgggttcctttactgaaagttgtgtttactgcatgttgaaacctagttcggttaatttgttttccagggatttggc

SEQ ID NO: 9864 - DNA, 1206 bp, Eucalyptus grandis
  Intron number 7 from transcript Egrandis_v1_0.021489m (loc us Egrandis_v1_0.021489m.g) derived from phytozome v7.0 (c hr-ID scaffold_7; pos 50668018 to 50669223)
acttttgctaatcagtcagattacgtttccttcaggtttgttctgtgttacccgctggatattttctgtttacatggttaatatgtcttgggataattttaatcgtgtctctgccatcccctcttcttctttttttttttaaaaatgattcttcaaaggcatttctgatataatggttctgaatggagcatccttctcatctacaccctaatgcaggcttaagtctgtgtcaatgtgctagaaaatggatgattgcagatatatactgattattatcttcctgtcttttgataaggactaggtttctgcatctgcagtcttccagagaatgtctttgtcttgcagctaaaaattgttagaattgatatttctcaacttgtcatcatctggaaataagtgatacaacgtagacctacatcctctagtatgattccatgagaaatgatggacctgatatttaaccatattaataatcttattggtgccataatgcatatgtgcaatgcttttcccgtgtacattctttcctcctatcatcttaaggagaatgagtgtgctgtagggcatccatttaatcttaattccatgttaagaaaatctttgtttcttctttgtatttttactgccagcaaaatcgagggttatgagtttttacccagaggagtttagtcaagatactaccaaatgatttgtccttgctattaatctcttggagacctcaaaaacaaagtgaattaagagaagtactattcaggaaactccatgactttaccataattagctattgactatttttaacctacgagacctaaagcaaatgtcatcgctggactgcgagattcattgatgttaaagatgcttgaatgatataaagaagttagaagcgtacttctgcaatcataaaaacccaaaaaaacataaagggccagaaatttcaaatgttggaactcctcccaccattgaatagatttgcagaattcaaagtcatttcatggttcttatgtattgtggttcatcagtcagaagcaacttctttttagagagaccctggtcatctaggctccagtttttccttcaccatcctttaacatgtgatagcattttctgattggtctatttattaatgtcatatgactcatacttcatggtgccatagcattttcttttctaaattttgcccatttcattcgtgcaggcatcatcttt

SEQ ID NO: 9865 - DNA, 4694 bp, Eucalyptus grandis
  Intron number 7 from transcript Egrandis_v1_0.019923m (loc us Egrandis_v1_0.019923m.g) derived from phytozome v7.0 (c hr-ID scaffold_4; pos 39409595 to 39414288 reverse strand)
agacatttgctgagtcgcaggacacttcatctgaggtacttttatgttttatgcacgcattaagaattgtgaagaagttaaactttttgttttgtcatttggtaattgcattgcatataagctgtgatgctttacagtcaaatcagaaactgcaaccttgagttggcaaccctttactattagggattgcctaactgtcctcattgataaccaaactcaaaaagtgaaaaaggatttcagatttgatgaatgaaaaagaccataatgattcttctttggttcttattccaccggcttactcctatgtcagacattatccatcatttagcttaagattccatagaaggtaatctgatgttttccttttcatgattcttattcatggtttttctttttcatttgaatgagggggatattgaagaactaatttagaggagtttttgtatggaaacaaaaatgttactctggttgtgatggagagagtttatgtctttatgggcatataatatgtgtggatgtggacaaagttgtggtccattaaaaaagtaatttctggggtcatgatgaaataattatgcagatatgacttggtgtagcaatcttgaattatggctttttcaaggtttgaacactcataagtagattgtggatatttaggagcacatccttcttatttttccaaaagggcaatgagttaatgtgaaggttgaggtatgtagaagtttccttcatcaatgcagtatcatcgagaaaaagtaatatgcattttgcattttgcaatgtcaagaaaggggagagatttgttgtagtggatggaatggagtaataacagggattccatgataaagaactattttaaagcatttcttattatcaaacatggtggaaaggttatgtgattgtgggtggattatacattatggttaactaatacgtgagtatgtggaaatgctggacaatactaatatgacttgtcttctgtggaagcaaattaaaaaattgtggagttaagagtcatgaataaaggaaataacttgacatcagatgtgttctttcacaggagtgtgctgtggatgcaacttaagttgaggctagtgtagtcaaatgcaaaaggtgctgagactctaaaacgcctgatcgcaaaagcacaacaattgcttgcctgagtgaagtatggcgtcgacttttttagcatcaataatcaaacaagaatagactttaaaattgtatcaaatcaaagtatatagatacatgatgggcaagaaaaacatgcactttaacattaggatagaatgaagaatagcccaatcctaatgccatataacttgagaagaatatagaatttgcaatgaagtgaaatatcatgctaagtaaaacaagctaaaagacagaagataacttctcagcggtttcatctcatgatccatcaatcttatcagcccccaaatctgcatctctttcttcccctccactcatgtagtcttctgcattttcctcatttatttcctcactattaacttcttcatcaaaatgtgattgtgaagatgaggcctctgtttttgtcttgacttagattgatatcagatcttttgtttttgatgagttctccaacttgcaacttcaccttgactcttcgtcgctaaatgctatcgcaaaagaataaattccattttccaatgatcacccattgcctccgttgatttgtccaaataaactggatcaatcacatcacattgatcatttcattccttaagagatagatctgaaatcgtttggacatctttctaccagtcttacactccttatgtgaatctgcaaatgtcgactgagataatgaagtatggaattagatttacagaataatacttattggcaatgtttttatctaattatctttagcaactatcttaagaatgctttgggttctttctcatcttaatgaattggttgtcaaacttaaaatcttgatagtgaacctttgtacatttggagctggtattgcataaattttccatcttttagttatgtaatttatttaaagagagctactaataacgatttgggaaaaaaatggaggaaacactgaccaaatgtaagttctatagcctagtgcgctattacctggttattcttttacagcaacatccaagccaaataggccactgactctcttatacaatgacaactcatccatgatctaatcttgcacggctgatcttgttgtattgttatattacttcagattgtcgtggacgtattgattattcaacaagtgaccagctgcgtataatgggtggtgtagctgacaattcccatctttcatcagtcatttcaaatatctccacatacttatcttcattcacagtgaatactttccattgagcttttttgtctctatttatatcccatagcctgtttttctcactatccgcaagccacaagatacgttgcaaagttgtgttcttcaaatatctccagatacttatcttcattcacagtgaatgcattccattgagcttccttgtctctatatgtatcccatagcctgtttttctcactatccgcaagccacaagatatgttccaaaggattcacatcttttatatgtcccaaaggattcagatcttttaatatgtgttctcatgttatttcaaaaagtaacgttgatttcttcttctaaattccattggttcttctttaaaatgctatttctgtggatgatgttctttaggctattgaaagtctttatcagcatcacttttcatgattgattctcacctgcaatgtacttactagtatattaggcacatgctttacattaattttgccaatctagtagggcactcctgtatatattagagtcttttgaacttgcttatataaatttgtaacctcttctttgtttttccttaattcattcatcctagtagttggtgaagtatggatgctttctatttatagtaagtactcagtcgactttcaacctgaggttctcttggatcgtcgcaagctataagtaaactctgtctgaaagtctaggctatttgataaatatcttaccaagcaaattccccagtacatcacaaatgtgcagaagctagaagaagagaaaagaaaaagtataatatactaaattatgccgaaggcaacatttggctactattacctagtgcttattggtctttgctctgtcggtcatagcagatagcatatttgtagtatggattaagaggcttgctttaggctgttgaacttggtgaggtgaaaagctgcacctgagcgaggaaataataggacatagatggactacatctggccttgttggttgtacatggcttcactggtgatagcaacttgcaggattctggaatgttccttgaattttattatgactggatttgttcttggggatcttgtgattacaagtaggagtttattgcatattttagattagacatgtcgtatttatattacttcgaagactacttctttggcctgccactggcaaagtctcaccttattcaatttctcttacatcgctagcagtagttgctatctagggttcaagaccatttcaattgccttaggcaccatatcaacctcatagttctgcagaaatcagcctttcatttaaattctgagattttgctgcaacaggatcatctaccgcgtatttaacacttagccatttgaaaagcatgcttctgatgtatgtgcatctaatgagactgacgacaaaactttgatatgcctatttatgtataggatacaactgaaaagaaacactcatgtattgatatatcttcctaataaatttttactagatgtacaaagaacttattttaaaactcgcatgctaagtgatctggcaggttcacgtttgagatataaaaggtgggacccaggcgccaattgatttcttccaatctaatctggttgaattacttagaaaacaagtttttgtagagtgtcttcagcatttctctatttgccatgttcttttggtgcaagtttcctcctcttcactttctctaaattgagctttgcaccatccatgtagattgttgtcggagacttccacttcattagatgaaggttctagttgacaaaaaatttgatagatttaatttatattggctggtttattttgaggtcattatatctacaaattaactaggatgtggggagtttgacacgggtttcactttgcttgataatatgtaaattaatttgttttcaacccttaaaaggagaaggaagatatggatcttaaattgtatcacagtgtaaggaaagcagatgttctatatattgtgctgggattgtcttggagcagaggactcttgaatattgctgtggtcttgtattgagcctcctctgacaacctttttcttgttacagcaaatgacttagacaatctactttattgctggattaatagatccttaaaaattctaattttgtttcatttgatggccgttagtgtgaatatgtatcctttctcttgtgatgccagtctcaatttgattataaagcctttgtgttttgctgaccaagaaatcaaagcctgtaactttgataccttgttatttaattaaggaattacaatttatatgagttgcctattctcttagtttgacatatatcctctggttccaggcaaaggctcatattttgaaattaaacgaggagaa

SEQ ID NO: 9866 - DNA, 2828 bp, Eucalyptus grandis
  Intron number 4 from transcript Egrandis_v1_0.020443m (loc us Egrandis_v1_0.020443m.g) derived from phytozome v7.0 (c hr-ID scaffold_4; pos 19643768 to 19646595)
ttcatcttgcttctgctgcagaagctggagctctggttagtatggtgaagcttcaattactatctttcaccgctgctttgaatctaaacaatctcttgttgcccataaaatgaaccagtttgctgtattgaccttgtgtgaatagcttattctttctatgtggatatttagtaacctttcttttatttcattaaagtttgtgcttttaattttaaggttcatgtttctgagcaatgtacctttaactgaaccaacaacatgatatagccacacactaactgttaacttcatggagaagagctcatatatttgcaggcaattttcaaagaggacagagtttaacttatatcaaaagaaaagcttttaaagattgattctcttttgtttccactgctagagagatgataaactgaactatatgatgggaaattgaaacttgataaagaacattcaccttgtaaatctcattttggtgactgatctattccatagtgttgtgacaattactaaagaaatcaactgaaagaatcttaaaaaattgtaagaactttatgtgcagacagtctgataatccaacaactaatttgaggcccactggagagccaaataggagatttgatagggagagggtttactttgaaaaaattcactgtaacttgtcaatgcctgaactatgtgatttattattccaaagagaagcaaaattcaagcaaggagaatcagcttccagcttaaaatttatgctaattggattcctatgggtattaccgtattggaaacataagagattaaagattacagcattgtgatatagaagacgttaaacagagaacggaagcagaattcaagatgtggattgctgcactaaaacaacatgccataatcctaattctccaaccatcagccaccttgaacttgatccttcgaatggataccatccctttcttatgaatttccagatgccaactccatatgaggtcacttgttagcaattaaaatagagttcgaggatttgcctttgcaagtcaaaagaacttttagaagctgagattgattttgaaattgcagattggagctggttagtgagtacttttgcaccgagtttctgccgtccaatgtccaaagtctctaatattatcaatgctgccctttctgcaaatgacgagacaaaaaaaggcgtcgagactttttgaaaaaaaaaaatgttcccaactcactaacttcattgaaaacagacatgacacaattattagttatgctgcagctaagattgaaagaaagctaatgaccatcaggccaggggctttatcaccatgatgtttcttactgccaccttcgtttagagcttatatttccacacgaacaattttcttaaaatgagagtttacagtataaatataaataaccaagaaaaaccttgctatataaaaagctcaaaaaattggccttcagccaccttataagtctcaaaatttggaggatggcttgctaccagggtcagcatggatgtggtcagattaattcaaagtactcagctttgaacttttgtttggttccatttgagtccgtcattgattctttgttaaatcaagaaaacattgtatcttattaacttctgtcatacttttgtattggcttgtgatttcctttttctatttcagttgtgctatctgttcattaattcaaattatatttgtggatttatggtactcaaagttttggtcatatttgaacccccctttgaatgtgaagtcttttaataaagaacatgaggatgttttttctttttacgtactctgttggttatctactaatatctctaggataagcttttcaactggaatacatgttcttcatttggattgaattgttatgttttacctgtgcatagacggactaatgttttagcaatcatattaatcaattataagatcattcttcggaaaagcaaaacatgtttttatacacagagaaattggcgacctttttttttttcttttgcaatttgctggactttatcatgttgagttatattacactttggtcccttagcatattggggattcactttggtctattgtgatttatgccaattggcaaggcactttactgcatgttttacatcatctggtactaccgtcagtagtcattgtccggcagaggtcaacttgcttgtagactaggcatagcagattattctagtgcttgcaatagaaagattgggtgttgtaactgaaacaactagaaattcagtgagcatggtgctggtaaatgataaaagtagagtgtagacaagtaatcagatcttcacatagattgttgatatctgaagatgatatgactttttttttttttttttggtaaagatgatatggcgtttttgtctgcaaatattccataaaaacatcatgccttaagccgtgttgtatgattctgcaacaactgagtaaaagttctttgttgcttttagctgtgtaaagggcagtgatttaatcaatcgagagagagagagagggagggagggagggaggatactacttcgaatgaagtttcatgtatgccaatctttgggatgatggatggttctctacttcttaatgcatttgggaagtgacaatagtattccacttcaaggggtctgtattttttttttctatattagtgtggctaaaagtagtattcttggaaataatctccctattgttttgaattttttgaattgattatatggtatcgcgcattttggagatagatacatataataagataaagttcttgttttcctttgtacaggtttctctgtgcacaaatcctgtttggctcataaa

SEQ ID NO: 9867 - DNA, 1298 bp, Eucalyptus grandis
  Intron number 1 from transcript Egrandis_v1_0.015338m (loc us Egrandis_v1_0.015338m.g) derived from phytozome v7.0 (c hr-ID scaffold_2; pos 62133698 to 62134995 reverse strand)
tcttggaaggacttcgcctacacttcggggaacaggtcggtctctctcggttctttttgagcatttggcaaattgaggcgcttgagggcgtgtcgatgccattgcttgtaccatgaaccatgaactatgcaattttttatctttgacgagaaagagagggaaagagggatcaaagttcaaatttttttcctttccagtgaagcgtctacttcacacagagctaaactatgaaggttaagtttatccttcgaagatgatacatggacttggagggatactgtcttagtcctcgtgtttactatatgcataatgctttcagatcagacaatcattgaaaaagttataaaagctacagacgccaagagcttgaggagctaaaagtaaaaaccaaaaggctatggccgcccaaagcgggctcaaccattatctatggcagttgttgttctatagaagttaggggtcgtgactatgttctgcccccatttcaccatttgtcattgaacatagtttgggtcatctgactccatatctacttttacttgaacaagttggttacttgtgcacttagtcataagtatggttactcgaaattattcctagcaagcggacgagtgtgacatgtataaaaactgtggattgagcgatgatgatgtcacccaaggaacattccatgtggtatgactgcaatattctgtaggatgcaatttctcgccatgatcatatgttgaagccagaatgattgaactcattagtttgaactgaatctggatgaacatatcaacatgcttattgcgcacaatattctgatcacttcacaagtaattggcaatcgtcagtcccttggtctctgaagccattgcttgatagttcctatatttactaaggaatgccgagtcctgtatttgtgaatatgaatctgaaccagactgttgttatttgtctatttgatagctgctggcacatatcagaatgtctaatgaagtttcatgagctactcattctagttgaaaccattttagttttaacgtgtcgacatgattttgatctttcttcgagatgctaccttttggaattaagtattagtaggtcatgatcagtcagaaatgttccgggtttagtttaggctcatgcctgaagcacttgactactggcataaattgggcacagttgtttgactaaatacactacattcatgtattgtggttatcatagacctgtctacggatacattctatcttctaacaaatctgcctttattttcaggtcaggcctgtgtgatccaaagccatctcctctga

SEQ ID NO: 9868 - DNA, 808 bp, Eucalyptus grandis
  Intron number 1 from transcript Egrandis_v1_0.049064m (loc us Egrandis_v1_0.049064m.g) derived from phytozome v7.0 (c hr-ID scaffold_10; pos 26299813 to 26300620 reverse strand )
agcgctctcgtcactggtggaactaatggaatcgaatctctctctcactcaaacacctcattcttttgcaatgttgatttcgataatcgattgactattttggtttaggttggaggaacaaacatgatgaataggcatctgaaaactgtcaattatggcatcttatttcttcataataatgtgtgtgacagtagaattgtgtacggattaggcaatccgaacgtcgaggtacctttttggtcctatgagaacaaatatggcctagaatttcttggccgggtgatcagtcctttatatactagcccggctaaataactctggccaagtctaatccgggctattatggcttaggcccgaaattttgcgtacataacttctgacaatgtgcaggctgtatcatatacatcaaaaagcttatgcaaagctcaccaccatggagccacaggttaaaaggcgtttgatgctattttcggccattgcatccctcatataatgtttaactagtaatagcacaaatgggtttagtagcccggctcaagcctgtctaggcttgataaaatcgttttcagctaggcttgccccaagagatagtaggttcttctaaattcagtaatgttggattctataaataataagctagaaaatctatataatcgccatctaaaacttgatcgatgaaaatgacgagggacataaaagagaggtcaattacttcgaggattgcgttgctaaaatggcctgttcataacaatcctaggtatgacatgtactaaggcttaatagtcatattgttgtaccatgattaggc

SEQ ID NO: 9869 - DNA, 902 bp, Eucalyptus grandis
  Intron number 3 from transcript Egrandis_v1_0.047648m (loc us Egrandis_v1_0.047648m.g) derived from phytozome v7.0 (c hr-ID scaffold_5; pos 65148938 to 65149839)
tccacaggtgagaaattgaaatctatcggaaattagtaggaaaagaaagctatagttatcgctgcaaactcagcttctatgcttatatatggttagaacaaaatcgaaaaataacgattaagttcattggcatgatggattctttagctttgaatgttgacagaggaaatttctacaagggtccaagatcctagaaaattgtttacaccattatttttatttcagtcccttacgaagaggccaactttagcaactcattttcctggtctggctctgttttctcagtatttctgttagtagcttaggttgctttcgttcagtgagtgcagtctctagtgaaacttatatcatagagaatctgaagagacttagcttatatagccttcacaatggcaaaagccaaatatgcaggaaaattactgaggcaatctattaagctgaaaagttctaattagcctctttattattgtaggatgcacttcacaattggcaatctacttaagctgaaaagttctaattagcctattgatacttcaggatgttatccatatattaagatatttattcaacttatgaggaaaacaggggataaatggaagaaagggatgattggcctagtcattggcgtcctgggactcctattaactgttcttgctggatcttgcgccctctacttcaaccggagaaaagcaaaacaagcatatatgagaaaatggatgttttaattcatatttttttgagagctaatccagactcaggtaccttcagacctggaaagaagcctgcgtgctttgcttaatgatttaacaaatccagtcggagtggaaattactgaagaaggcaacctggttagctctgaagaacttcctttcatggatctagtcacataaaggccgctacag

SEQ ID NO: 9870 - DNA, 385 bp, Eucalyptus grandis
  Intron number 1 from transcript Egrandis_v1_0.010281m (loc us Egrandis_v1_0.010281m.g) derived from phytozome v7.0 (c hr-ID scaffold_6; pos 35956318 to 35956702)
gtcgggcgggcgggatcacgtcttcgttctcaccggtattggttcgatctccgatcgtttgttgttttacgatccgtgttgaactgaatttgatgctaggttttggcgattcttggcaatttatgctgaatgatgtgacccttggttagatttgtagctagaattctgcttttctgagtatccccatggatgcgtgcagaactctgctgaagataatcaatgtagtaatttactaattcgacaaagtttacattttgcatagcggtcgtgcagatagagcaatgctagtccgaaggggtaatgcgtgtctttaggaacttatcctggatctctgattgtcaggttatgttaaacgttgaggcattgtttcgcagacccggtcgca

SEQ ID NO: 9871 - DNA, 5517 bp, Eucalyptus grandis
  Intron number 1 from transcript Egrandis_v1_0.025268m (loc us Egrandis_v1_0.025268m.g) derived from phytozome v7.0 (c hr-ID scaffold_6; pos 18377211 to 18382727)
tccctcgtcgaagccactcgctccggcttcctccagtatgatttcctgcatctttattatcagtctcttaatttcattgccactccgatatccagtccatgtcgtgatcgagtcgtgatctcgtgtcgagaattgcaatccttgccttgctagcttgtaccgtacggatgttaagattctagaacacattccttactcctttaaaattgaattccttctatttagcttgggccaaaatcaatggcgacggtgtgcgagaggagtgccctcaagagtgatacccagaacggcaatactgatttaccaaattatgatctgtgcagtgccttgataaactacaactataccataacacccgactatagtatgctacattgcttttgtatctctagtagtattcatgccataatacggctgttggcctaacttaagttaaagggtctgcagaattctgcataattcatcgttattgttggattaacttttgaacggattaacgtatgtatgggttgtagcccctgtgaccaccattttcaggtttttcgatttccatttaattggaattggtttctacaaattaggttagacttatgcgcgagagagctttgttgtgtaaaacatctatttctataacggtttgaggtacttatattatacagagtatcacattcacatgtaattcaatagtgtcatggggtatcgaaacttttggatgactgaagaaaagaattctcatgtttgtcgatcatcttttcctccttcaatccatcttggtgatcaaagtttcatatacgataggattggattatttagtctttcacatgaaactccttagtgaaacatatagctgtctaaaaatcctgcctaattgatttttcaggctatttgactacatacaaggtaagaacagctacgagaaacagatagagatgacggcaccggtgatcactgaggtctctccaagtgatggtccgttctgcacatcctcatttgtcgtgagcttctatgtgccgaaagagaaccaagcaaacccacccccagcagaaggcctccatgctcagaggtggaatcccatatacgtcgccgctagacagtttggaggattcgtcgccgactctgatgttgcagtagaggcagctgccttggaagccagccttagtggcactacttgggctaatgccatccagaagagccatgagaaagagaggagcactagcgcttcggtttacacggtcgcgcagtataattctccattcgagttcgataacagagtgaatgagatatggatgctgtttgacatggaagatgcttcctctatatgaatgagagagtaaagcatagagaagtctctctagctcttacatgtagtttgagtttagtggagaacttgctccttccttgcacgtaccttaaccaataaatgaaaggcaaagtagctgccatgtgatatactactttgacagtttgtatcaagcatcatatccttttggagctccggatatttttatcttttctccagtggaggtcagtgattattgaaatacaaaatgcaagcattcatcgtagttccacatgtcaagctgccatatgagtaagtgttttcgatccatcaaagtgaggacaggtacaaaagacaggattctttccggtagatctctggaagagtcgcccagtgttaaaacatagtagacaaaaatcattgttaatttttcttacgtaaattagttgaaatttatcagcatggaaagaaaattctgcttgcatataatttgggctaactattgagtataagtacttagaatggaaagataaagaaagggcatgtacagcatttttgggtaaaatgatattgtaaatctcaaccgttatatccgaaatatagtcttgaacaggagaacggatacacgatgtctgagcgaaaatctgtatgcataagtgaaaactaggattcagcccacggccatagctggtgcagctcatccggaggaggcatctccttcatccatctgttgaacgattcgtccctgcacaaggacgcatttgcttgctgaaccggctcaattcggctcctttccggcgtggctctttgtctgcatccttcgaaagagttgtggaagaggttgtctgccgactttggggaaagggcaactgtggaatccttgcccgtcagcttctggacgacggatttgaagctggccgcatcggttttgacgtattctgtgtttatgatcaccaccttaacaggttttgcattctctcctctgcccgacatgagtggaaaagaaatttctcgggacagtgtaatataatcacgagaagatgaaggtcgagaacaagagatctctgcttctgctataaatgtggtttcggacgcttccttttggcttgtgttctgaggtaaagacgagcgcgttacctcttatatataagcggacgactcgaccgcggggaaaaacagccaatggaagctagttccacggaggagttgtacgagagtttgaaaagggtggcgtccacgtaaaggcaaggacggaagttgaccagtgccgtcattttagttgattctaataagcagtctagaaagaccggagatgaaggagagagattgagtcaaaatttacgttaaagaaagacgaagaaattcaacgaccaggcatgcacgtgagtgttgatatcattaatcaccaagagaagacaaatccaagagtatgtggagggctaaaagaggaaatgaaaaaggggagagagagagagatgagaggaacgcaagggcggacctgaactggcgaagaagaagagaagacaggtcaaacccgacgacaggtcaaaggcaagaccagtcagccaaaaaagcttgagtgtttcacgctctattcgcgcttgggattaaagtaactcgtgcttttagccgccagggaatgtcaattgccactttgccagtccaaaggaaaaaggctggggattcgaggcgagcaatttacagctacagaaattccatgcgatggatcatactcgcttaagactatctttaaaatctatgtaactaggtccatttaaaatgtgaattctccttttacacaaactttgctaatctcacgacatatgcaaaataaattagttttgataatttaatatatcttctatgcaatcgggtcaatgataagctagttaaaaaaaaaaggccatctattggagattgacctcataataatacgtattgtcgataagtacataataattctcgatattcaaatgctttcatttctaaaatatgaccaaagatgtgccatttccaaaatcttgggtagattttgagaaacgctatttcattaacttactaaagtattttgagaaacactatttcattgaggtaattattatgacgaaatgctttcccatggttttcatcaccaaaattgatgcctggcgagtttgggtgaagttattgaacgtatttgatggaaagaaagtggttggtgtgattgcagaaaataaaaactttcgtaaccaattaattggatacagaaccaaagaactttaaagtttttttttttttttttggtaagaaccaaagaactttaaagtttgtcatcgataagttgataaagaaagaatactcataatagaaattcacatatactatcaactcaaaagtttgcatgcttataactgaaaatgcacctcctctttataaagggccgagataatacactaggaatcattaaagtaggaaatgttaaattagaaaatactaaattaggaaatcaactcgaattacaaacctactcaaatttgaaaaacaatcctctagcctttgacttcttcttcttcttcttcttcttcttcttcttcttcttcttcttcttcttcttcttcttcttcttcgagttcgttaggagccgaatgtggccaacaaggcccgccatgaccgaaagttaccccctttcctaattcccccacctacccactcccaagagagaacggtggccacgagggtctcaccctagtcgaatgagttgatcatgttgtggccgaaatcttctttacatgcgtgaacatcaaatggttttcggtggaatttgatgttcccgtgtaagaaggtagatctacccttttcaacccatattggtgctctgagtgtgctcttaaacatccttcccatatagagattaactaatagataaacttacacaacaattaacacatttagcccacaattggtatgaaatcttggatggaaattggaatacaccatcctttccttctatgcggttgtgcataacctcagattttcattttgttgggtatttatatgagcatgtggatgtcaagatctccacttgagccgacccttctctaactcttccatcctctcggaccgaccgccatggccgcgacgaacatgttgctgaagctttcgatgttcttcaatatcttgtcccgcccgcacttgggactttggtcaaatcagaaggacgtgaaggtgttcccgccgacatgtgaccgcatcgagtgcccgagcttcgatgtcgtacacgtgggcgacggatatgagatccggcggtacaattccacggtgtggatagccactgctcctattcccggcatctcgcttgtcgaagccacacgctccggcttcatccagtatgattctaactctctccgtttcattgccactcttatgtccaggtcagtcatgatcgaatcatgatcaagtcgtgtccgtgtgtcgacaattgcaatccttgctttgctagcttgtaccgcagaaatcttaagattccagagtacattccccgctcctttaaattttaaattcctcctatttagcttagccaaaatcgcttcgatggcgtgcgcggagagttctcacaagatttatgcccagaatggttatactgatttaccaaattatgatttgttaagccataacacccgataatagtatgctactttgcttttgtgatcggatccctagcattattcgtgccgtaatacggctgttcacctagattgatttaaagggatcctagatccttcatcggtgtagctggatcaggacaaatttaattaacttaacagattgcagcccttgtaaccatcatttctgtgcttttcgacttcaatttaattggaattagttccccgaatcagcttaggttcatgcacaagagagctctgatggtaaatttgaaagtcacgtggcatctttttatataatggttatatgtattgacaaagtattgcgttcacatatgactcaattgtattgtggggattgaaacttttgggatggccaaaaaagagattttacatatttgttgatcatcttttcgtcattcaatccatcttcgagatcaaagtttcgcatgcaacaggactgaattgattcaatcatttttcataaaactccatcaggaaacttatagcctagaactagatcttcatttttgttgaaaaagctcgcctaattgactctcaggctatttgactacatacaaggtaagaacagctacc

SEQ ID NO: 9872 - DNA, 893 bp, Eucalyptus grandis
  Intron number 4 from transcript Egrandis_v1_0.054325m (loc us Egrandis_v1_0.054325m.g) derived from phytozome v7.0 (c hr-ID scaffold_2; pos 1187289 to 1188181 reverse strand)
atccctcttgccttctttgctgcaaccgggtactctctctctctgtctctctctgtctgtctgtctctctctctctctctctctctctctctctctctctctctgagactttaactatcgatatccagacttagactgatagaaatgttttgtcagcttcaaaatattctggaaagatttctccaacaactataagtagctgactgaaggggagtgtcctctgcttgtgtgttcagcatttatatgaaaccggttcatcaacagcacttggttatatatgataaagacgagattgttttagtatgaatttctaatgatttcatacatgttgagtctaaccattgtgatataaatcaatgctgtaaaacccaatgattaatgccacattgaaccttttttggagcaattcaagcaaagtccctagtagaagtccaaactgttaaaatcaaagtaaagaaaatccaagcgcaaagtgtatctgtaccgtatggattttgctttatatctttgctagtcctgcgtgcgagtcccaacagttgaatcatgaccacagaataacttctgatataacgtcgaaagctgaggaacaggatgatgatttaacggagataactgatagaaagctaaacttcatgttagtttctaaatcagaatttaaatgtattttcttctcttccaaagcttggacccttgtgaatggtttaaataaagtcaaacaagcgtcagttcttaaacagatttatttcttgaattagttctgtactcgatctgcaaaaaaactctcagttggccgtttacagaatataagcttccaaaatcgagaaatctgtttatttttcattcattcagtctttaatatctagttcacttaaatttcagggtgagggtggcaa

SEQ ID NO: 9873 - DNA, 4017 bp, Eucalyptus grandis
  Intron number 2 from transcript Egrandis_v1_0.023872m (loc us Egrandis_v1_0.023872m.g) derived from phytozome v7.0 (c hr-ID scaffold_11; pos 15149892 to 15153908)
ctaacaacaggttttgttgccattcacgaataaactctcttcaaaagcgatcttcttatggtgttttcagtgctcttcttctcatttggattttcaccttttaggctgagatttatgaatacacaatcacgaagttgtcaaggcttctgttttcagacgaaactaacgattaggaacttataatttcatgagcataaccgatctttcgtctgattctctcaaatgactgtcctcccatgagctgcaaagcgtctattgtttctcttcctagcaatgtctgtcacaagatcgaggtgtacgcctttgaagagatctactcaaagagagagctctctctctctctctcaaaaaaaaaaaaaagctgcgacactttcaaaggccatttcacattttctagacgtttcctaggatgaaatgtcatttccaaaagaaaaaatctcgggacaagtgccttaaacccatcaaaatagggttcaaaatatcccatatggcacacatctgaagagttacttcaagatcttcacttcaatcggcctgttaaaaagctgaaagggttcggctaagcgggtgtcgctgattttgtcccctcatagtcttgctgatcgtctctctctctctctcctctctctccctagttaaaatcgaagtggagagaaaggaaagttttgagattagttagggttttgcatattgtttctgcgcgagtgagctgtgtgtatcatgtctaattagtaacaacagcacgtacgaatctttggtcacgtcggacatgatttttcagttgctcactagggacaaggtgagagagtgtatgtgtgtgtgtcgtgattccattgcttggtttctctgcttcttttcttctttttttaagttctcgttctctctctctctctctctctctctctctctctctctctcgtctatttctgtatctaagggcaagaaataattggtccgtataaattttctttcttctactttgggatctgttcagcgcttttcttttggatttgaccgatttaacgggaaagagacccttagttttggcgatttagtaaacaaggaaaacaagaacaattttaggaaaaaaaaaacccacctcagatttctccacaaattgcaagaaacccagagagctttcatctttaaggaaatcccgaaagcaaaagcaaccctgtttagatcttcagaatcttatgcacatacttgagagagagagagagagagagaaagcatctcagaagaaagttttctgggtgtaacctgaaaaaggaataaagaaaacaagaaaagaataattttttctgggatttaatctgtggtttcatcttcatgtgcatccagtcacttaaagtttaaacattgagagcagttcatgcatttctgtttagcacataaccaattgctcaaagcagacctaagattaatgtcaagttagagagagagagagagagagagagagagagagagaatgagagagagagagagagagagagagagagtgggataaagttgaaattgacagggtgatagcagagaagagaaaagcgaggggttctgtacgaaccaaagagagactctgcaacttcttttagtgcttctcaccgcattgcaaattggttttttttttctttttcctcacactgacttggctagcatgtagacagacaactgaaaataatttttcttatccctttctctttataaccctcattcatagtatggtcacaaaaaggacgggcctttgaaaaaggatgcttcgtcttgggattcttccctgccggaaggaagagtgtcttcctagggttattaacctttggataatcctggattgcttacacgtggcatttgagtggtttcaacttaaaaaagaatgttggaccaatcatatgatggtatcttctgccagcttggcagggggatacccaatcattcggtggttcgacgaagttaaggaggcaaaattctgtgtagtttgattagcactcgccgtactgcggaaacagacaaaaaagtaactttgccgtcaggttcgtcttagtgttatcatcatatgcttacggtgattggctcaaaaggtttctcttataaaatcttactaaatgagataactaagttaaatgattactgctgttttccaatttaattggtgtatgatagataaacaaaattttaggagtctttgatgttgtaaatattccgtcaatgttattgaaaattcatgtattaggggaaaaccgatgtcgcattaggaatcatatagtgcttgacatttgttttttacaagataaataataaaaaaatgttgtttacttaggtccaattactttttcaaaacttttcaacatcacaagagtaaagcgtctgtcatatacatgatttttgaactatttttaatttgattggattctttgtaaattcccttatactaattaaagatgtacataccaaccattcatctatcaagttctcatgacttcattataatgtagaagctgaggtgacatttcgaattagtacatgcatatttctttgcacaaaatgtttatagggttgaattagaaataggttaaaagaaagaaagaaagaaagaaaaaagtgtcttcgtacctagtacatttaatgtgcattttgagactcatagtgactcaatgatttcaaggaaatgatctaaatggctttggcgttccaatgtatgatcctttttctcaaaatgttaatcattcacaaatttaagctgttcaaatagtatgttcaaaggtatcaaataaatattttcatccatgtagtttggttcttcgcaactctttgtcatgataaatctaactaaggctggctagatttcataagcatgcattggttctttagaatgaaactatgaaaaggtaaagtacaaagttctcgatatcctacgtagtcttttagattgagattatctacaatgagacacattatttgctctaatagctcatcaacgaattgattgatgtaattaccaaatatatatgtcattcatgtaaagttaaaagacgtcgtagttagagtgagatctatgaataaaaaggaggaacctcaagaacaaaaatcattcacaaattgacgtgccaaagaaaagcttactagactatagagcagtgagtattttatatttgcagatacaaacttgctcaaggctaaataaacttgtgctttctactgtttatacatattatcgaactactaaccgcttaactagatcgctagaactactcatttttttgctaaatcagaatggagttgtagaaggaatcatatttctacgacactagattccgtgatatctcgttctatcatttggtaactatacacgaaagtggtagtggtggtaattgatagttagcaagaggtaatggagttggtggtggcggtggtggctatggtggcgatggtcatgcatgatgatcgatccagttggtgcagttaatggtgagctagaggtctctaacatgtggatcaatgcatgatttcagaggaattcatctatagttaggagttatgattttaggtatcgtaatcctgaactaatcgaacttcaagatgatccgaaatgtatcgctatagtttcttatagcaagatagtccttttacgagtaggaagcttcaactgaccattccacatcttcaatggactctcatgtatggtagcaatccgaaaggagaaagaatttatgctcttgatgaaattcaagactttataaagactccttgatggcatttatgcccttttatttcgatactggtaattgtatatctcttgataagggttgtgtctttcttgatccactagtataatattataaatcccaggagataagttaattgaccctttgatcattctgaaaatttctagcttaattcttaggccagctgattctcaattaatgtaacaactacagttccttttctttcgctttttaattcttattttctgtaatttttgcagtgtcagaggaacaattgagaggtacaagaaagcaa

SEQ ID NO: 9874 - DNA, 1673 bp, Eucalyptus grandis
  Intron number 2 from transcript Egrandis_v1_0.004995m (loc us Egrandis_v1_0.004995m.g) derived from phytozome v7.0 (c hr-ID scaffold_10; pos 9147015 to 9148687)
ggtatgttgcaacttttaatgcctttcggtgttgtctgttcatcacatgtagggttacatattgcatttatgagcatattcctgaatgtgttgatgttgaacaaaacccaaggctgattggttcatgaattccattgaaaacaaaaaggtcaagatatattagaatttacatatttgtgaatttttatctcattgctggtgatgagaatttgacttcctatttcatgcgtagtctatcactgtcccacttggggctggtgtttttgttttttggcccactagctggtgcttggatttggaattctgtgcatgtatatgttgagactgatcttgggaccatgctaacccataaaagggtacatcagcccctgtctaagacactcaccaaacacatgctcacattccaattatcatcaatgaattcatagtaaaaagacttacacttggggagatgagcttccaaaagctagaaaagtgaaatgtgttatggttatttgtcacattagttaaatttcttccatattcgttgccttttctgttgtttggcacatcgtggaaaacctaacattgtataaacctgctgccaattcttctctgttgtattgcccatgggagctacactgagtaaatgttactgacttacaacaatgacccagatcatagttcacaataataataacaattagttatgatagcaggaatttcaattaaccttatagtgtgaaaaaagttgccatgagtattctggaataattggtttgcgcattggaattgcacatggacacttaactggcctgtgagatgctacacaatggtgattggaaaacctttttgtagttccaattcacagccgtcaggctgcgaggaagcacattttggtcttaaagacatcttcttccttttagctcgagactgtctctcaagataggacacattcccaaggcaaagaaatcagtcgaatctactttggtttgtgtaaaatgaaacaaatatttaattcctgtatttgattattcttcagtgagagactttttaaatataacctacacacattcagattccctctccttcaaagtggttccacataaagctacttttgttaataatttctggattccctactattatttttttctaatctggcttgcaactccatggtgctcttttttgaagcatttatttatttatcaagggacaagtcttgatttactgatgttcttttctttccaattcttgtgctgctggcatttgatgacagctaggagttatataacatgctgagctaacatgtcctttgatattggtttatattacaaagacttcctttgatctcctgggaattcagacaaaattagctgtagtaatagattgtttcctgttattctcttgttaccatcatattacaaagatgtaatgaaaacttcataatttgagtacttgaatctcatggacattgttcagacatggtaatggcatatgaaatctgagtagctcagacatggtttgtcaaacttagtctgctgtgatgatgttaaatttgcatttttacaaagattttctgctttattcttacataatgacaagtttgcaggcttacagacactaatttatgttctttttgccttttcttttctgcatgggtggtgcaaaaaccagcaattcctgttctttcc

SEQ ID NO: 9875 - DNA, 1051 bp, Eucalyptus grandis
  Intron number 1 from transcript Egrandis_v1_0.042976m (loc us Egrandis_v1_0.042976m.g) derived from phytozome v7.0 (c hr-ID scaffold_11; pos 24702658 to 24703708 reverse strand )
acatttcaggtatatttaatccatatatatatgtgtcatttggtatttttgatgttttcctttggagattgtgttttgttttctgctaaatgattgctggggttctctatttgcttttgattccgactttctgatgctgatataacaaattgttagtgttgatagatttctctgtcttgtactatcaactggctgatctctttgactcgtcaatgcctgagttggtcgtgagtcattttatgagtactcaaattccttctattattattattctttaaaacagggatctttcatcagatgagttcttgctaattgtcctttgtgtttttaacatacttacaccgtgtcctataccatcttatggatactctaaattataaattgaggtaatgatggtggggtgacctgacaatgctaagattgtctgtaagaacaatgatgtctttgttatgacctggcttatggcatattattctttcagtcaccttggtacttcaatgaatgcctttgtaagaacaactttttttttcaagggtaaggaactaggccttaggttggtaaagcttggattcgtgaagtgccccggtaacctcgtggaccagttaagatgcaagccaaggcccatggggctggtcccaatgtggaatggtttatacttggtggcgtgtttaatcaaattcgtgttgtgtgccttattcacactctaaagttagtcccttagttactaaaccaacctatgagttgtaagaataaaaccttcctttagtagactccactttatcgggctttaaatttggagaattattgggattttcaaaatggttcctgatggatctctcacctacaagtcttgtattacttggattgaatattattcatagtgatggttcttgaggaattgcttctgtcggtgcatacatctatgggcaaaaaatcctttttgtgatacagctctagttttgtcatctgtgcttggtaggcatcagatgcttaatatctttcgtacttatctgacttcttttggatccttaatacgaaacgcatacagaaa

SEQ ID NO: 9876 - DNA, 7539 bp, Eucalyptus grandis
  Intron number 1 from transcript Egrandis_v1_0.015630m (loc us Egrandis_v1_0.015630m.g) derived from phytozome v7.0 (c hr-ID scaffold_3; pos 67609714 to 67617252 reverse strand)
accgaaggcaccctcatctctgacacggccgctgggtacgtcctttcgtcctgagatcaagctgtcttcttatatcacgcagaaaggaattgaaattgtctacataccgatgtacacctgagcaccgcaagctatttataccctattcattgcttgacagcaagtaatatgaacttcgctttggatcataggaggatctttaagtttgagaaataaaatgttgttaaaccaggtttccaggtactcctgggatttacactgaagagcaagtcgaagcatggaagaaggtggtggatgctgttcattccaagggcggcatcatcttctgtcaactttggcacgttggtcgtgcctccaaccatggtactaaattcattttctcaaaccgacgccacacaatatctctgtagctcccccatatatcacataatcacgacctgcactatttgaatttgacaatctgtttttgctgttatacttttttcctactttggcaatgttaacttattaaattcaccttatatacttgtttctaacaacaattggtattatataatggtgatcgtattagtttatcaacctgatggtggcgctccgatttcgtcgacaaatcaatccatctctgataaatggaaaatcatcatgcccgacgggactctcgatgttcctcacaaaccaagagctctccaaacacatgaagtatggcaggttatcgagcaatatcgccgagcagctgcaaatgccattcgagcaggttagtccatgaactataatcatgtcatgatagatgctaaaattacttgtatttacttcatttgttgcacataagtattaataatcaaatcaatttctgctttaggttttgatggtgttgaggtgcatggagcacatggctatctcattgatcaattcttaaaggactcaatcaatgatagagtagacgaatttggaggatcaattgagaatagatgcagattcttgatggagatcatcaaagtagtggcagaagaagttggcactgatcgaacgggagttagaatctcaccagcaattgaccacaatgatgccacagaccccgatccacttagtctaggcctagcagtcattgagcgattgaacaagttccaaaatgagataggttccaaactcgtgtatctccatgtgactcaacctcgattcacagccaatggcacgaaaaattatggtgaacaagaggaggatgaagaagctcgattgataagaacttggaggagagcttatcaaggtactttcatgttaagcggcggtttcacccgagagctcgggatgaaggttttggctggaggagatgcggacttgatatcgtatggtcggctcttcatctctaaccctgatttggtctaccgattcaaggtggatgcaccattgaatggttacaacagagagacattttatactcaagatcccgtcgttggttacatagattacccatttcttgaccaggaaaatggggaagtgacacactagtgaatgagaatgctattggtgtgtttgtactcatgggaactttgagttacattgtacaagttaaagcactaaggaggatcgaagaaataagataactagttcatgggatataccttttgttcgtgataataaggaacatggtttgtatattatagagtcaattacgtagagtctgacgaataattatatctccttgttcaacaaactataattctctcttgtattgcacttgttcgtatattttgattattaataaaagtacgtagaataatataaccaattacggtggaaactgatgttcatgtgctttttttttcgctaattagaggtgacacccacatgggttgttggagagtttgtagcgggaacgtggaaaaaagagtctgagggaaaaatggaagggaactatttatttgaaatataagagcgccatgtaagtgttgaaaaatgagcaatgcgatgaacccagaaaggctattttccatacatcttgacaatagcagctttcaaactggaggagcctattagagaataagatatgatttgattctaattattttaatcacgggttaattgacctggtcaatccgttaaattatatatttgaaatatagaatatgaaacgttattgcatatattctttctcattgtacaaccttcttgtattataaataggcttgtaatacttgtgggaaagttaagaaatacatagtacaattttctccgatattcttcatattctattcgaaaacatggtatcagagcacttggatgatcggagcctttgctttcagagatcatgagttatttatttagttaataaaggaccggtggtaaaccaatcctcccggcttctcaggctttgagtctatgatcctcctatcagcgtcctgctctccagatacctcttaaaagctatggcattagatgacttggaagagtccctacggaagtggaataagccgataaaaggaacctctgagcttggactccaagaagagttctaggaggtgcatagcgctttgaacattagtctttatcgatgcttttcatacgacccatggagtggtaactaggaaagtcaaaatgaaagtcctacgactgggtatcagagcacgatgatcattgagcctatctcttgccttcggtcatccgatgttggtcagcgaccactagccgtctatttgcttcttttttggaccctttattaatttgctttgattgacttttctgcgcaccatcttttgtttttggattggttatcatgtccaaactaagctcccgggccgaggaagcctccagccacacaccggatcatgaacggaacgattgttcgtacttcctccatgcctcggatagccttggttcgaatttagttagcatggttttgacgggtgataattataatagctggtcacgagccatgaccattgttttgtacgcaaaaaacaaaatgagtttcatcacgggagatattccgaaaccagaatcaaatcatatctcctttagagccttatgcgcaaatctcacctgcaacgctacagcacaaagcatccattacccaagaaacaaaaaaacaacggccaagaagaccatccacagacagccaatgcaattcttcatttagcagaaataacaaatattaaataaataaataataaaataaaaaacccaagaggcagtaggcagcatgaaccaaccttccttggggcggcagctttatcgctaacgggtttcgaatccatcagattcggctgctaatcgttcaatttagagtttgagtgaagaatttgctgaaagattcaattgcccgatatattagaaaagttcctgaaattagttatcagcccagtgatgaaagggaactcatcgcgccaatcaaaggagggcttctcaaatttgtattttcttctctggtttctgcgcgagatggtaatggcggttggggttcccaccggctgcaatggggaagacgacgcgatcgcagaggacgaagctgggcttttctacgttgggcttgggccttggagacctgcatattgggccttctgcatgctgtcagtttgaagaagtaagcccgctacatcaggcagggacagtgaattttttaatttttggcaagtatattactttcacaaccattttgatatttccatttaagactactctgtataaaaaaaatcgttcatactaagtttaattcataatataagaaggtatatgacgcaacgggaatggaaataatgagaatccccggttgcaaatacgagagacatgctcgcaacatgaacgaaagtgcatgtgcacgaagcacggcactttgcatgaagcacggcaattcaagagataagcaataagaaagaaaaattcacttaaatattttttcctgagatcatagagatggaatttgaataatgtcacattgtcgattattcagttcattccagaatttatataaatactctttattccctccaatgaatgtattattattacctctacattcactacatgctcaaattagaaattctttgatacatatatacagagtaaccacttattttagtgttcctatcttaaaaagattcttagtgcaattattaatcgtacctaatgaaaaaagattttcattttttcaatatgttgattgtacatagaacaataaaaaatgatatttttgtgcgatgctcctccttgaaaatttgttacacgagatgtctatgggatagtccaaatcgaaatcaaagttgcgtccatacctcttgttctcacacatcatcaagcgatcatctcgcagatgaattataattgtgcacggtagaagtcaattagagttttctcaatcgagaagcaaagagaaaaatttcattttaattatcattattataaagtaagcgaaccatatgattatttttttttctcagcaggtgatgaaatgtcgaatggtaaatgtaagaaccacaccggggaagagaccttggcatgaatatcgccgattttccatccccgtacaccgtcggtacgacattcttaaacacgattttttcttgaagagaaagaaggtcaaagaaggccaaattgcgattcgactctcccagcccctggcatgcacgtaatgtattacgtcgattctactgcaagggttcgcatggcaacagcaactgatgtttatttatttcttattggccgctagagaagctggcacgtgagcggtgttgttcgagagtttgtaatgtgagtgtggaaataaaaaagagtcccacgtaggaaaaaaagaaggaaactattttgtttgaatatgagagcaaccatgtttttgttttttaaaggcatgggcactcaagcggacattttccattgaatacgcctgattatatttaatcttaattggacttgaaaagttatggttaagcaattttgaattttattttaattaatattaacatttccgaccaaaatgtatgtcggaagtcaaacaatgtcaatcgagtgattgtgcctgtacacaagacatattggttcgttattcttgtacaagcatactccttttcttagtaaagttattctatttttcttgtgtttatgttcagagagtttcagaggttaaattgtatcttgagagcattatagctttaaaagagtgatttcataggttccttagcagaacctttttgttttctatgtcttttttttttttcgggctttctctcttcaatctccaatgttatagtccagcttcttttttatatggttaatggtaggtgaggaatctaaaataagaaccaatgagaatattaaaagtcaaatcacaatgatgaatgaaaagagccttatgttataaaagttatcaatctcttagttttagtatatctagaaatttgtttgtaattttgatcgatatttctagaatttctctccctttgtgcgacattaattgtgcttttacggagatttcctctcccccttgcccgttcggcttggccctttgcttcaagctcaaatagattctgtgaaaaaatctcaatctagtcgttacttgaattaagtatgttagattacatatagatggcgcgtaagaaaaatactaaatggcaatgacatcttggtttttttcaaaaggaattatgccagatgtgaccttctcttttaccaacttcgcctgccatcttcagttctcgatgttatactttatcatcttcttggtttgttcactcttagttggatataagctatgctcaatggctttgaatctcatcattccatgtcaacaggcaagttcaatctctctcagtagtaccatcagtggctttctctctctccctattcaattgtccatcaataatatattttcatatgtttgcaatccccaacaagacacgactcaaaatattaaagtgcactatatgagcatacaatgttgacatgcttatgactaatcggtccaaacaaaaagctattgaataagagttacagtaatctacgacttcttcggtcttgactaatgaaaccatgtttgtttcagcatcgctatcaagcatttatatctttgtgggaaaaagaaaaaaagaaaagaacattgaactcatttgtgttagtgtccttccttatgggtgaagtgaagtgctcaaacctaaatattatttaagtttgagtgctccatcatctcgatggagcacaacacaatatgttgaaagggtgtgagaattgggcatggaccgggggcaagcccctaacatcatgcactatccttgccacattatccataaaataaggttgtaatagatgaaggcacgggtttattccgattctctacggacctctccttgctacttttgtggttctcatgactcctggagacccgactcaagcgaagataaagttgcatgtcgagactattcttattctcccccttgagatttcctacatgagatgtgaatggcgtggtcgaattgaaatctaaatgccgccaacattttttgttcttctcgtgcatagtcaaaaaagcacatggcacggaaattctaatcacacgaagtcgaagtcaaagagtcctggtcaatcaagaaagccaagagaaaaatgtcattatcattgttataaatgatataacgtaacatattgttatttattaatactagattctccggacagggaacatagactgattgctctatgtgaacaggaacgaaccgcccaccgacttcgtagcagcgcagcaggcgatgaaatgttgaacggtcaacgtaagaaccccgttgggcaataaagaaaataaagaaacgttagaaccacatgttctatacgtcaacgtctttaaaacaattttgcaaggagaaaagtgaggttaaagaagcaaattgcaattcgactttcccaacatgcgacgacttagtcatgtcaaaatcaaacctcgccatgttcaaactgaattacggtgaatcttcccggttcttgctgctatgttcaaatggcaacaccaaactataaaaaccgatgagcaatatcgatcaacctcacatcgcaccgtcttcaaatcttcaccatcatattcttagtatcaatccttgttgttcgttcttgacagaatacaagctacgcacgaaatggccgcgaacctcttcactccatgccagatgggcaagttcgatctctctcacagggtagtgctagcgcctatgacgagatgcagagcgatcaatgggattccattgccggtgcatgcagagtactatgcgcaaagaacgaccaagggtggttttctcatcaccgaaggcaccctcatctctgacacggccgctgggtacgtcctattgtcctgagatcaagctgtcttgtatatatcacgcagaaaggaactgaaattttctacataccgatgtacacccgagcaccgcaagctatttataccctattcattgcttgacagcaagtaatatgaacttcgctctggatcataggaggatctttaagtttgagaaataaaatgttgttaaaccaggtttccgggtactccagggatttacactgaagagc

SEQ ID NO: 9877 - DNA, 6200 bp, Eucalyptus grandis
  Intron number 4 from transcript Egrandis_v1_0.026918m (loc us Egrandis_v1_0.026918m.g) derived from phytozome v7.0 (c hr-ID scaffold_8; pos 66307913 to 66314112)
tagattctgcactgagacaaactagatctagaaaggtgccattctatctatccttttgtttatagtgaacgataacatggtgcaaaattttagtgcaattgagtaaagaaattgactcaacataaattaaatgggaatgctcagtgacaaccctgggactggtcttcgtcgatgaagatgagctatatcttgaattcattactaatgagtagtggaaatggttgtgaaatgacaaaaaaactaacagatcacgcacaatctaacacgaaaagaagaaatcattagaaaaatcaaataggagggatacgagaaatttatgtgattcaattctagtatcgatagccaccgtaccagaagagctattcacaaagaaatctactataaattcaaagaattacggtgtttcaatcacttaaacgtttctcaatcttagattacatctaaaagcaaactataagtgttatcttactatctcttaagagaacttacttagaaaactcacaaaaagaaactcaacactcctattgtttgctcgtgtgtaacaattgagtaaaaatttatgtgacatgtcgactcaatctagaaaatgtactcaaattagaaatccaaatccaatatataaagtatttcaataatctttcacttgtttggacatcaaaccacaagtctctttatttgtattgggtttctttcacgagcttagattcaagacttatctaacaattttccgtcttagctcttgtagtcaagttataatgtttatcatctatattggtttttgtaaagcttggacgggtactcgaccttcatagatgtcaatcaagcccaagctatcctcgaacttgtctagaggaagaacttggtctaaatgtttgcaagattcttcatcgtaggaagcttctttacaatcacatactctcctaatatgctatatctaaaatagaaattttggtcatcaatgtacttgtttctctaatgatgtctctgatttccactagacaccacatcaactcgacgtcctaaggtagcatcaccaatcaagtcattagagcacactgcctctttagctcctttcattgtcatcatgcctcaccatgacgtctcctaagtcaaagcgcatctaagagaaacgaaggaatagctgtcatccttcatgctccatacgtgacctaagtccataaactagatatcaccacactacctaaattgcatccttcgtaacatattgccacatctgtcgttcacaagaatgaggatccgcttcactacatcctcatgcacacttggattagccaacatattctcctacgtttaacagattaagcctagtactattcacggcataacttggacaactagcatgtgaagcatgagacaagcattccacctccatcaaagtacatagtgacaagcctaaacaatttacgataggctaaaggcggggtacttattactcctagtaactcacaacattacggtagttttcactttgtgtctccaaacctaaagctgtctctacaacacccaaattattaattttgttatcttcatatgaccatcgctttatctcagccatctctgctaaccacctagaaagttcatcaactctttggaacaaccgtcaattgctatggaatcaagcgactttatagaaattgtcatatctaccgcaccttgaacatctcttggctctctccaaagcttcacttgtttttgaacacctcaaacttttctctataccaacccttcactcttattaaagaaagcaaatttgttaaaagtaacttctctgttgaacgtaaaactaggtgatatcatccttagtccactacaaatcccatgtacatagtttaggaacaagtacctccatgcccttaaccccattgtgccattatacccatgagcataggtagggcaacaccgaacgctcttagcctagtgtaattagtaagcttactcaatcatgtttccttgggaattttccaatcaaattgctagtgatggtgatttgttcactaactaataagctgaattcactacttcagcccatctttacctggtggtgcattgaatagtaagagcaagctctcactgatatataatattgtttatcagttctatgactccattaaattgtagtgtgttgatgtcgagtatttcactatacctttctttatgcaaaaccgaataagctcttgagaatagaatttcaattttgtcagttaagggcacaatctttcttgctatgtaaatttcaatcgtcttttatgatataaattccaagcacctcactctcgtgttagactaatccaactttcttgaaatgccattgacaaagaacaacacatacctagcaccatccttagacaaaactcgagagagtccttataagtttcagcatacgcagcctacaatctccaaagttcgatgaaatcccatgcaaaacttcatcctccgctaagtattgatgttgaagtgtacgcggaagttaaacttctcttttcagtgacttcctaggaacaccctctaactcaaaacaatcatttctctttcactcatttgttcaagtctcatgtcatccctatcatcatggtaagcacaccttgaagaagcttcaaatatctacttttagcgaagatttgtatccgaactcatcaaaagcactgagtgaaataggtttttttctctgctaggccactccattgtgcattttaataagaattatttcaatccttactattttacaagcaatttgtttcccaaaaaagccttaccacatatatgttgggtggtcttgagcctctctcagtccaaaagttagcttaaagtatgaaactttcctttatacttataaatcgaacaactaatacgggataacctctataatcttcccttcacacatcgagcttagatcggaaccgcaacaattcataactctccgtgtgattattgggtccaaacttcttggcaatctaagctttgagactagtaactctcctatgtaattgttgggtctaaacttattggtaatttgaactctaatactagtgttgggtaggcctctctcaccctcatatatcaagcctagattagagccacaacaatttgtaactctcctatgtgactgttgggtccaaacttattgacaactctcttatgtgactattggatccaaacttaatggcaatccaaactctaatatcagtattagatggtcttggacctcctcacactccctcatgcgaaaagctatttcctcctcacacatagagcctgggtcaaagacataacaacccgtaactctctagttggactgttgcttccaaacttgttggcaatcatagctccgatactaatagtggatggtcttgggcgtttctcatcccaaaagctaactcaaagggtaaagttttcccttacacttttaaactaattacttgccccttccacaatccatgtgggataaccctaacaatctccctttaacatattgggcttaagtcagagccgcaacaaccctctttgagtaaccgttgagtcatatttgttggtaacctaggctttgatataagcgttgggtgatcttagacctttcatcccaaaagttggctcaaaaggtgaagcttttcttcatacttattaatcaatcatcagtgtcttccctaaccaatgtgagacaacctcaataattcatgcggtgagaagtagaaaattgatgtctataggaagccacatgatgagaactttcaaaatcaatcatcgaatcatcctcttatgaactcgtggtgattgctaatgcatcattagcatcattaaacctattatacatcaaataacaatatttacctcgccacaaatttcacctcaactattttgcccttatacatcaaataatttctcctatagtgccccacctcatggtagtagtaacatcgtgtcgtctctactttcgaaaataaactttgtgtcaaatattacccaaccatatcttctcataacttcttttgccacctctaagaaaacaaagtggactttacatcttccaagataatgtagtgtggccccatgataatgaattggtgaagtgctcaaaagaatctaggagacactaacaatattataccttgtttctcatcaggcaaggcctcattgcaattctgcatgtccattatgagtttgttgaactcacctaaatgggttttgatatttgtttgttcaaccacctagaattaaaacatcatttaaagcatgtacaagcaattattcaaacccttgataaagtggctaaagtttacccacaatcatagcatcatatctcattggccacttcaattaacaactcatctgatagattcaacaagattgtactcttcaccttttccatcaaatctaccatattggcctctttcatcatttctagcacttttccttgcaatcgaagcctttgccaaacctttggttatgagcatcacatggatcttaatggtccacaattataattgtccctcctattctcaattcttgcttcatacgtaattgtaaacccaatatttttaaataataatcaaatgagcccaagctccaaatcaaccctagaaacactaagcattcttcttataccaattgttttgaagtaacgtggaacttaataaattatgtaattcaaatctaacgtgggaagaagaaattatcaaagaaatcgatgagaaatgataaagataatagggatttatgtgatttggtccaaatgttggtacctactccacgagagagccaagccatccacaaagaatttcactacgaatctagagaattacagaatcactatcctccctcaagtgtttcttcactttagattacatgaaaaacaaatcagtaattgttatctcacaatttctcatagataactcactcacaaaactcacaaagagaaaatctttaacacttctattatttggtctgtgtaataagtgaatttctatttttacatgttcaaacgtgacttaccaactcaaattaggaaacttactcaaactaagaatccaaattcaatgtgaaatttcaatttgcttgttcggatgtcaaatcacaagtccaattcagatttataattctgtttggatcagatttatttcagggactaaagttgagacatacagaattggcaatttatccagacagaagaatcctttttttaatgtcatttttgtctcctcttgccttctccgcgatcattggatttgaccaattatagatgatgattaagtgatctctacatgtggcctttacgaaagggagttcaattttcctgtatttcactggcttttttttccctagctgtcgtttgcagagagacctcagatcctgcatctgaaaattttctcagagaattgtctgctaatagccagtgctgattgcctcaactttaagattaaatgaaaccaaagccaaagaagatgagtacacatgatcaaagctttgagatcaatatgctgtaccattttatgttggatgctgatcagtggattgcatggactaggattgtttgtccctgctaattttttatgttactagtcatatgccttgcagtagttctcactctcatattactgattttgtcttctttttttgaatcactcaaagattaaagaaggcattgttgtggccgaggcccacatttgatgggtttccacaagtgaggtggcatataactctggctcttttccttttgccgtgttggctgctctgcatccaagttcatttgtgtccctcatctcctgtgagctcaggctgacggtctttcttatcaaaaaggggaaaaacaaattaaaattttagttactcttttacaattctgaaccttgttgagtgacttcacaatagcagtcgcatgcttctagaaaaaagtatcatgtgtaggtacgaaaagctgatttcagatgcacttctgtaatctgatgaacagattcatgttctagaaaaatactgatgtttcctagttgagataaaagttactagccatccattctactgattatctctgtgtctgcataaacttcaattcctggcgaagtcttaaatgacttcgtccatatataatccatcccatctgcaaagtaaagttttttatttcatgcaatctcctgctgaaatctttatgcacatttcaaactgattattacttcctgcagacaaaacta

SEQ ID NO: 9878 - DNA, 1234 bp, Eucalyptus grandis
  Intron number 1 from transcript Egrandis_v1_0.012263m (loc us Egrandis_v1_0.012263m.g) derived from phytozome v7.0 (c hr-ID scaffold_3; pos 54592536 to 54593769 reverse strand)
acgtcgctcgcgctcctgaagatcctattctcggcgtaactctctctctctctctccgaatttttctttcgtttctttgtcggctgtttccggtagcgtcgctgtggtgatctctgccgtgcgcagagcctagggaggatgttcgttaggccgtgtaagtttagcggcgttttaggttttgctcggtggaaaagcgacgaagaagatggggacggaggatcgatcgcgatccgttttgatttctcgctcttcttcttcttcttcggagacgatgatgtatcctggctagctgaagtggctcggatctgtacgtgttgtccagtcgtcgtatgcgatttcaggaacttgtcgtggaactcttgttcgtcgttatctaagtttaggaataatattggcctaggatgtttctgtgtgaatgtctctcaatcgcgctcgcaatgaggatggcctttgtctccttcgctccgttgctcggagaaaaaggaaatggccatcgaatttttgttgctgagctggggaaaaaaggtgaaggtggcgttgaaattggacagttaaccaacagtcttttcgattttgctatctgatgaagagagcgcgttactcgttgaaggggctatggttgttgcgtattggctagatcatccttaaagctccttgtcttctggttccaactgttgatcctatcgtcatagttggagtgcatcattatctatctctatgtatctcaagtagtcatgctgtatggtgtctgcacgtgtttgtgtgaaggtacgctgcctcgatgtgcttgtgataccataagatcagagggagatgaatttgtagtgatgcaattttgctgctgctcttggagttggatccttttgctttctaaatggccatcgcttactgtgatcgtcattctgtggagttcaacagcggctctgtttggtagttgagtttttgggaaggagacaaataggattttacttcctatatttggctgaaggctgttctgttgtgaagatgaaattctctatttggtggtagctgaaagagcttcatatgtgatttatggagtgttccacttaatttcttctgaattatgactaatgtaaaacttgttcactcagctaacgtgtgtcagtgcaaatgctgtttaaaggctgtaatttgtgttctccatctctgatgatttcattctaatgtataatgaataggtgactgttgcattcaacaaagatccaagtcctgt

SEQ ID NO: 9879 - DNA, 2260 bp, Eucalyptus grandis
  Intron number 1 from transcript Egrandis_v1_0.038454m (loc us Egrandis_v1_0.038454m.g) derived from phytozome v7.0 (c hr-ID scaffold_4; pos 31683788 to 31686047 reverse strand)
tccgaggacgagaggctcgcgttgacccagaagtacgaagaggtgatgcgtttcttgagcttcgtgatgttttggacttttagttcgttctgtttcttttgatcaggaagtataggaagaagagaacgaaacgattttggtggagtatggcatgttctattgctggtatactgtataggtttgattagacattagctgggggaagttgatgatgcaagtttgaagctttgttggagattgtacactggattctgctgaaagaattgagaagacacacctcaggattatatgactttgtatttgctaatgtctgtcttgagctgttgctagtaatctttcattctactgaaagttgtcctgcaagaatctagcactcatatgtagatgcaagaaatgcctctacaagtgaatgtgcaatgtaatccggagagatatgagaccgatagtgatgaaacattaaccaaagaggtgcgaattatgtgcattcagagaaagggaactttttcacttggaggttgattgcttttgccaactccccttggctttttagattggtaggaggcaaattgtcatcgtttatttggaaggaacatagctgacctggaatttttgtttatggatctcgcggctggttgtgattcgagtgcataatagcggcttagctttgtatgacgagtttagtcttcagtgatttcagtttcccattggggacaatgaccgagtctttccttattattatccgaggtaattgcatgttctgcatgttcatgacgacggtggtcttgcacttggttgtgattggagttcataatgggggcctaagcagatcctttgttggtataagaatgttggtaggaactgatgtcataatacatgatacattacccgcttcacaaatctaggttaggttttgtcttattcctcaactgaggccgacagttttcttgctttcccattggttttttttttcccaagagtaagtaattttttctaactggatcatatattcggctgaactctcaccatgcttatcacagagcatgaaattgaaggacatctaccctttataactgtctgtcagatccttaaaatgaaaacgaggagacgaaaatgcccttacttgcttcttgtagtttttaaaaatttttgcattgggtaatatatgataaacggaggctatactattttcttatacaatatcttaatgccatgaacttctggataaagaaatgagctggttgtgttcgtggcggctttagtgactagaaggggttcttcaaggttgataatcgtctcatttcatataatcatctcttattataggctatagtcataacccatctctctctcagtgggaaatctcctcaggttccctttctgcttctgatgcaaatttgatgcatcttttgttgttttcttatccttagattttggaggtatggtataaaggtaatgggggcttaaaacattgaactgtcatgattctttgattttgttgttctttcccttgtttttatgtgcttataatttgagtgtcaaagtctgtttaaggccttcattaagcatatactgtagtgattcgatgtaatatctggacatttcagacaatattacctgctttctggtgtatttgtactaatcatccatttgcatctgtataagccttgcatttctttttagttctgtgactgtacataacacccttcagcggatttgccctaagaactttcttccatttataatgcttgtgacgtgattgatatcgattggactattctacttatcggttttgatatggtctaattcagtgcaaagtttagcttaactcttaatgtgctgaatttctatctgtcagtgttgtcttatctgctaattgaggtcaataagtccaaagcttctccattaacattctgtttacaagatttcatgttttctctccttggctatgtcgctcctgttttgtgttcatgtttttccatttctagcagagtttgttgcatttctgtcagggaaggatgtttaggtccgagcatggtcaaactgtgtatattatcttatcaccaatgtcactggatacatgttgaaaggactaatgagccctagttgcagaagtgttttttaaccttctttttttttgggagaagcttctcaagtgatggttcaagctgcatgcatatcacttgatacttgctattgtcacgaacttgagtcatcttgctaacggtgtacattgttgcagctgcttgttgctggaggcgga

SEQ ID NO: 9880 - DNA, 4760 bp, Eucalyptus grandis
  Intron number 2 from transcript Egrandis_v1_0.012742m (loc us Egrandis_v1_0.012742m.g) derived from phytozome v7.0 (c hr-ID scaffold_2; pos 47934129 to 47938888 reverse strand)
aggtagaaagtgaagagcctcagtacgagcagaaggtaaatgcatacttgctgttaaaatcaagatatgttatgtgttcagcaggaggtaaaacaaaatggtgcatatttgcatatagttttgcttctactggactttgccttatgcgatgattggcgtattacttgttatctgatatatacactgcggctgtgatgttctccgatgttttgaagattgctaaaccctgaggctcctcattgtattctttttgcgttctgtttactttactgtgattttctctgtatgagatgcatgatgcattatctgtaatctggtttgtgcatctcttctacatactatggctgtgatgttgttaagcatccttattctgtttcataggtgtgtggattgttccttgcgtagttcttggcgtgttatatattttactttgggaggaggtttggtctctttaattcttgttttggatttattattttttctctacttgatagttctgagaagttcagatttttcttgtatgcattttgcaacttgtcgatatgatcagttactgcaatgctttgtctgagagtctgttatccatcctttagaagacttctgaatctattccttccttttccattgtcacctgtccttttattttagtgtggcatgtgagtctctgcaattgaatctttatcctgtagttccggtgtcctgtcatcatttaataaatcctggtgctagttccagtaaataatggttttggagaatactcaagcttttgctgcaactacaatagaagacacctatctctgttggttggtaggcaaaatggtgtaaattgaccattttttaaaaaaaaaaaatctttctaaagatagggaactaacctacagagattgatgtctattgcatcaattacgggctaccaacgcatcaattgcatgtaactacccattacaacctaatttacaggctaatgacatttatagattgcagtgggcagttaaatgcatcatcttaaggtaatgaaacagggggaaatggacttggatagatcctgaaaagagtggattctgttgtaatgagtttggcatgtgtatcaggacacctcattctctacctccccctcctcaccatcatcatctgttcttaattttccttcttcatttgactgtttttgcctattagtgggtcagtactcggtattcatcccgctacaactagtcagttgcgcttcccatgtgtatcaggacacctcattctctacctccccctcctcaccatcatcatctgttcttaattttccttcttcatttgactgtttttgcctattagtgggtcagtactcggtattcatcccgctacaacaccatcctaagtccctttccctccctggtaatatagttgacatatctgctgttcatgcttcattgatggtctgcatgattatgtgggtttgcttttattttgtttttaaatggtatgaattttgaagtttcagttagagttgagtttttattcaattccagtttcttgaaagttgttttctttgtgatatctttaaattctttaatcttgcttattatggcaatttcttttgacaattactcgatgtatttgctcttggatgcctcttatgatctagattttattgtagcaatcttccatcccaatttttcaatactaatgcattaccctcatgcttgatctctgctaaaaaactaaagggacattttaacaagagtgctttagctattctaccctaccactaatgtagttgaatctggtggttgcaatggcccttgcatgttgacagtcaattgattcacatgtaatcaagttattatcctgagagacttttgataaaaatttaagtacatgttgaaaaatttagaggctattgaacttttcaatttaaagttttgataggggctgcagtctgttagctaaaagatttgaaggaagaagagtgttttacatgtcaatgttatcaacaaaagtgtagtccgagagagagagaaaggttaatagtcactttgctggaggaaattgcacatggtagactatattcaatttcttggtatttttaggacaaaacaacatctagtattcacaaagtaggtgttgtgtagagaccctccagcctaaccctaaacacccttgagttttcttcttgaattgcacatggtagactgtatttaatttcttggtatttttaggacaaaacgacacctagtattcacaaagtagatgttgtgtaccctccgacgtaaccctaaatgccttttgagttttcttcttgaatcttctgctggattgtcaagagaagataaaaagaacaactaattttgagtttgacaggttaggttgtcagtgtaagtgttgcgtatgaagttgtcaatttctttagtaatattcatctatccaagtctatgcatatcaaggattgctccttttccaacaaatttacatgtgaggtccctcttgtttctttcccccttagtggatgggcgttataaagagggtttttgacattctatgttgggtgaaagtaatttggagatagatagatgatggatctgatattggaccctggtcgttcacataatggcatgctgattgacatgtgtaagttagtttaaaatagcgagcatttcaatttgaagacttactcactctttctaccttctaccttatgatgatttctcctactcctattttccagtaaaatgattttggtaaagtaaatagcagaattgtgtataggaaactatataagcaactgcctaattttattgtagaaggaccatgcaaacgtaatacaccttctattggataaagaaagatcactttatatgtacgtgtgcgtgtgtgtattaacacgaacatgcatttaaatggatgtcctatttttgcacggtagggttatggaaattcatgagacaatgactgggcatattatatgtgccatttgccattttgctgagaaaataagcccgtggatatggaggttccacaagtagtgctacgggcttttgagagtaattagaagtgttgggaagatatgatctccttttggaataggggtaattagggcttataattcaacttttaagctggcactaacattagacagggcttcttttgtgtgacagggcattgtatatgtgaatgtgtgcgcatgcacttgccacagtgcatgcagtgtaaagtctgatgcccaatgttattggttttatcttgtttgaaaaatagatgaaattggctaattttacttctttagctgattaattgcatcaatcacaaatttccattacatcttttatcactgtggataaggttacaaaccatttcttgaagttcattccgttgaatttgcttccattttgttaatgtttctggaattctatgtcaacacgttacttactacttttaagtcataggtgaggttaccctgttatgtgctgcaagtaatatctcataagatctatgaacttactccctcatgtacaagctgtctgtatatgatttaaatgcctttcctggttgctccaaattggatatgaaatctcctccatatgattagttctcttaggaaaagttttgctgtcttccttttcattagatagcttctgttttgaacttttattgtgtgcagattctctttgttttcatgatacattgatatttcttggagaaaaaggaattatgtttatctaattttatgtgttcttcctgcttcggtccagcatatctgtccatgtttttggttgtttcccttaatctttatactcaaaataatagtaacagttgatataaaaggagaatggaaaagataaataataatcattagaagaagaaagagattcctttttttttttgggtttaaaatttgatactttatttctgatgtttaagcaatctaattatatggtagtgattttatgttctttgagaattaacaatatgatcttgcagtgcagttgcactgtttatgtgattactttaatcacatttgatgatttgggtaggcgtgggtaactgttttctgttcttctaggcattagaactcatacttttagttaaccttttatgaaaaggaataacaaaacagaatagtgaatcaacattgttgcactatatatgtagttaggcattgcactggcatcttcttaaggagaaaaggaggaggttgcttgagattatgtgatgtagtcttattcttaactaggatttagtagactttggaactgtggtatggtaattagcaaaaggttctcttttatgaaaaaacctgttttattttgtcaatccttttaacagccgaattcttgtcttatcaattagtcatcgatatgcattcatcaatctttttaatgatcatagttgcactgtacagcctggagagacaataaacttgtttgttgacaaaatgtttggatacaaattcgattttctatcctgagtctccatttatcaaatatcataacctagcaaatgcgtctctcgtattttctcttacaatggctcccttctctcatcaaggacatcctaattttcaaaaaacatatgcttgccttttattgcagttcttgtctgatattttgcatgtcaaacaaacaagtagaattgagtgtgctcctatgtagcataacaagaaaataatactgaatatcttgcatgagaagccatgcttatttgttgttgattattttctgcttgacactgttcccttcttctataggaggaagcagggactgacttccaaggac

SEQ ID NO: 9881 - DNA, 3239 bp, Eucalyptus grandis
  Intron number 1 from transcript Egrandis_v1_0.029033m (loc us Egrandis_v1_0.029033m.g) derived from phytozome v7.0 (c hr-ID scaffold_5; pos 28719266 to 28722504 reverse strand)
ttacaggttagcccccccttcctctttttgaagcaaatttttttccccactcctctcaaactctcttaactttgtcgagtttataaaatgcgataggtaatgcacctcatctcttcttctgtacaagatcatgttttatttgttccataccatcgttgaggtgtcttggatttatttaagcagatggttagcgtgaagcgttgagctattagtatagtttcttgcttcttgcttcttgcttcttgcttcttgcattgctttttataaggattagttacatacataaagtatattcaataacttttttctccttttctccttatggtccacttttctcctaatattttatggcggtgctacgtggttaatgaagagacaaccaatgatctcaaaccaattttttttttcttatacataattcttacaaggtttagtaatgtcttcctcgtgttaaaagattaagacatgaaagggattgatttgcatcttataacttgagagattaaatctatacctattaataataaaaaaataaaaataaataaaaagaagaagaagaagaagaagaagaagtagccagaagggacatatagtaggctcactaaagtcctcaagctaggcggataggataacaagtttccacaaacacagcaggagagagagggagagggagagcgggagagagacagagagagatccatcttagagcagagtcgccttgaacttaattctaaggtcagttactgagaaaaaggaccacaattaagtgcttgaatttcatgttgtattagaatgcccaaactgaaagtttgccactcaattaaataaaactatacataaggtaaaatatgaacttcttagacaaacgattgcccctcgcacttgcaaaatggactgagaacaatatgtgtaattgatgaaagtggagtctcccacacaaaaatcaaagttgtgataccatctgaatgtcttatctgaaaatttaagccatgaaagaaaactacgtacatataatgcactatataaacctcacgggcaagcattaagaagcactttaatatataccatcttgtttacagatggaacttattgaaaatatctatcaaaagaaatatcgtaacgcttaacaagtaacagaagttgtgtttcttgcccaaccagtaaaaccgaacattatatttaatagctagcttccgtaccaaagtccacataagcacatttgatgccactcgcatcaagcttttttcaacaaatctttagatataatcatctcgctcgcgtcattttaataaaagggttcaaagtcctctctctctctctctctctctctctacaactttaatctcatttcttttcccactgttccgttttcttttttggaaaacatgatttcacccactttatagtcaaatatagctcaacaatgttagaatatttacgtatcatgtcacattttcatctaacaacttcaagtttttagaataattagaaatagtcctacaaaactttacactatattagaggataaattctaaattcaaatctttttagattccttatttgtctacagtattatatatttttatacttggtgtaagatcaaaattgagtttatgagtaaaaaaaaaagtattagattatatagtaatttaaatcacaagttcatctaacaatccaagtgcttttcaagagttgatagcagtgttaaaaaagttgactggcaacaattctttttttcagtctattcttatctaccaaaaatgcgagaaaataccagcgtaccaacaaaagaaaaaggggaaagaaaacccatttctatcctgttggagataagcttttttgaaaatgcctaaagctgtacacactcatgacaaagcaggtacattaaaagaagtttcaggactgactatgtgtcttcatctttgatgtccatttcattgttaaccctaacctttttgacagtttgttgcgaggtcaccctttctttgagaaaaagagcacaaagaggacatagaaaaagagtcggtccatctatactagtaaaatattcagatttggtttctctagattgtacccttttcctacgtccaatttcacaatttttatgggatcacgtgaagttgtttatcaccaaaaactatagtattttctcaagaaaatcagacattccacttctagaattttctcttgggtcccattttatcaatatataaaaatcagagagagcaacttttgagtagacacttacacgtggtgtgggcctgagcgaaattaatttagtctctcttgtgtagaataatgtacaaacaattgaccattgaataggcggggtcacgagttcaattttagtacagttactttcgtaaattaggaaaatagtgtaaaataagttatttgtgaacagatacttccattactcactcgggaatttcccgacataaagtctgtgccccactctctgcaaaatggaagctcccgcagtttaaaaaaatcctcgattttctcgacaagaaacagagcaaagaaggtaaaactaaagaaaatgagccttcggatggctacgggtctgtttaagatatttttttatttatttatatgacttcaattagtgctcaaattgtttaaaggaataacatctttcaagcgtcgtgagatttttaattaatttttttgcgtaaagtttaaagtgattttgtcgttcgaaggtgaaagtcattagtagacaacagatctgtctaaggatgagtacatcaagtggattctattcaacctcaatttccatctaagtgtactctttagatttactctgctgctacccatggaatcgatgcaagtgctgtttttctgtaatttttatgaagtttagattaatttttcaaaagaaaactttaaaattaaaacaacttctataaggtacttctataagatacacaacaaccatcttctttggatttaaaagttgaacattgtcttaagagaatcaggagatgaaaaataatataactagtaaatatattccaagtcatgcaattctttggttgtcttgatgtacgtgtgagacatgctagttctctaaataattctaaaagaacataaaattacattgtcacaaacttgactcaaattaatcaagctctctaaagcatcctagcgcgtcaccaagcacatatgatcattgacccatttgtgtgagaaactttccaggacctaccagtgcaccagcgtggggacgccgtgag

SEQ ID NO: 9882 - DNA, 2156 bp, Eucalyptus grandis
  Intron number 2 from transcript Egrandis_v1_0.043892m (loc us Egrandis_v1_0.043892m.g) derived from phytozome v7.0 (c hr-ID scaffold_4; pos 17411710 to 17413865)
tgcacttggctctgcgaaagaagcattatcgcactgtgagggcactgatgacccttgaccccgagttgatccgagttcatggacgaggcggaattacacctctacattttgtagctggggaaataggaggcgatgatctagagagagtggagctcttggaactcctagcagaattcctatatgcttgcaaatcatctatcgaagacttgacaaatcaattcgagactgcggttcacattgctatcaagagaggcaacgccgaagcattcagggttttgtttggatggcttaagtgagtttatctagtagaaatcttaaattggaaagaccaagagggtgacactgccttacatattgctgtatccacagggcagcaacctgaggtatagttcatgctagtacacttcatcaattccatggttggtcaagcttttattattcgatccttaaattcaacataatctaatccaagaacaattgttatggtaatgaaatagtagggattgaaaatacaaggttttagaaaacattcaaagataagagttttgaacggaacgaccttttttggtttctttcgtaggatagaagaaaaggaattttgggagggatggatatcactccttccctcccaatcttctcatccaattatcttcttgacaattttcccgtgcgcgaaggtcacggaagggtgggcttgacccttatattcaatgcagtttttacaggttgatccattagtttatctttgttcgttttcatagtgattaatcatttcatttctctccaaactactccacccaaacatacatagtagactttcaacgccattcagatgggttgtgaaaatcaggtcagcaagtttttttttttttttttggctttaaaaattaatcaaatactaatattaagataatgataatatgagcatgtagataatttttttattcttttcatttaaattcattagatacaataggcctgttcaaaaacccaattaagcgttgctaattgaaagttaagcactgaatgaaattaaacttctataattatcctaattactatctgactttaaaagactccattcagtaaaaacatttacttaatctagtaatcaatatgatagatagtttttatattcttcgcaattatattattaaattaaaacctatcaatagtaatcacaaatccagttttggtaagaaattgattgtattcactaacgtacttttaacggtcatcttcttttttcagcgtttaacttttcagttttaacacaacaagcccatagtttcatttcaaggctgctagcggggaaaccattttaagctcgcgatgcttctaatttgatggagagaaaaggcatgattaaaattgtttccttttggacccctgtgaaacttcgtttttagtgagctctaagccccccaactctttccatcgtagtcactcctgcgtaacaaaacattaacttaatctcattcttttgtttctcctattgattagcaaaacctatttccttctttcgtaattaatccgtccaaaagatagaagctagtaaaatggaagctaacaaggacaatccgacgtggccataaaataatcccctcgtggacatgagaattactccctcattagttgaatcttatgcataaaatatataaataaacatgtctaatgtagtctctctcttcataacaaaagaaaaaaataaaaaaataaaaataaaaacctcatttacaaaatgtaattaaatcataagacctttcggttgacttagttaaatcctaaacttttaggaaaatctgatatttcgagtcatcacttctacaaaattcaccaatgttacaactcacatgggcaatttctatctatgacataataatttcaggtggaaggactagatcacaatttcttgagaagatttgagatttcattacattagttgaaatgatggcatttgttaaataaggtttagtacactttgtccttttgtatatgtatcactagcatcgttttaacttacatggcatgagatcactccgtgcacaatggtaaagcttagtcacaaagtagtgactgaaattgaagggatacatacttcattgtgttccatttgcacttcttccagatcatcaagctattgactgggtatacaa

SEQ ID NO: 9883 - DNA, 4296 bp, Eucalyptus grandis
  Intron number 1 from transcript Egrandis_v1_0.015460m (loc us Egrandis_v1_0.015459m.g) derived from phytozome v7.0 (c hr-ID scaffold_7; pos 7026818 to 7031113 reverse strand)
tctcgagatcttcgaaaatcctctgaccttcatcggtacgcctttctcactcttctttgcaagaactttgatttctttgtgtctgttttcttgtttcttttagtgatttcttggtgggaatctgtctctgtattccttcaattcgtttgcaagagcagctttggcgatcctattgggttggttgggtttattacgggttgcctctctgtcctgttattaacagctgctttttgtttgttcactgggttctgaattttcattcttgagcttgtgggtgcccataaaggtttggagctttctttttgtttgttcactgggttctgaattttcattcttgaacttgtgggtgccccataaaggtttgaagcttttctttttgttcttaatcaacttggtacggtctctgattctgcatattcgagtcaattatgggattaatcttctatgtggatgataaaggatggggcagtaaattcataagtatggttatcgaggaataaagggccgtgtattaatattgaagagcctccgagtgcttttttgtcaagatggtgcttaacgcacatttgaatagtgggcatagcagtgagagttttcgatgcattgcaacttttaggcaagatgggagaaagaggaagaaaaggaagaatgtgaggaattgagtgagatcaaggaggaggggaatgagggacgaaacacagacaaaattggaaagcttcgtgtattcttatacatggaaaatcttacctactgaagatagatttattcttcgattatgacaattatcttttggctagacaatcacaactatctgaacgcatagattaataatagtaaagttctaatttgcttgtcaagtcctttcttaagttcctatatgacctatgacctatgatgtttgacgacttgcggttcggtattccttgcttggtcttcctcaagcttcttcttaagcttcactgggcttgccctctcttcaacttcccatctaatgcttccattttttcaatacacatgagctcttcagatcttggtttgtgagattagttcccgttcagtgcgaaaacccatcagcgcttgatccagccaattcacttttgtaataaaacatacaggtctttccagatttgtgatgtattatgtcacagttgtgagatcccataatgtaactatagcattgtttatgctgtaaaggtcgttataagtttgtaacaagccaaaagtaatagaagactgacgttgaagctgcatagagtatgagttggacatgtgcagtgctaggaacaaataaaatggtttgggtaggaggtctctgacttagccaaagttattaggatttaggattgaagaaggtgtctataagttgacatcctaaaaatttggcagcaaggcaaaatcttggaatgtcatatggaatctactagttatgaacgttgtgtgtcattaaattaaaaaatagtgtgaatttaaagtttgtgccatctttattctggatgtaccaggaaaatcaacttttttaatacctaaatatgaggacatactgaatatgacgatatacttatttcaaggtcaaagtatgaaaaagttggatcgatgggacccgaaggatcgtattgatcctatgattttttggagcttaggatcaggaccatgtaaaaatcattgcaaattaagatcctacttaagatccagggcatttcttaagtttcgaatcgcaggatcctacttatgcaattccatcttcttcatctgggaagatatggcttggttttgttttgcatgcgttatggctagtattgaaatagttctattgattggtcatgtcatttatagcccaggtcgtgcatacaattgattccatacatgatgtcatattgtgcagtttttttgttggctaggatggtgggaatggcatagggtgcaactttagttgtcctagtagagcttggttgttacttttgtagaggaatagtcaggaggactccagcgccttgaagatgtttttcgtggatctcgaacttatttctactcataggcctaaattagtcaagatttttttatatagttctttggctgctggttgtgaggaaaaatggggaaggccccattgcaattttttattgaaaaatggcttctagtgcactagcagtgatgaggactggttgtgtgcttgatcttggcatgtaatgatgtggttttcttttcttgtagggtgcaatactgtagttgtcccagtagagcttggtagttatttttgtagaggagtagttaggaggactccagcatcatgaagatgaatttcgtggatctcaaactaatttctactctaaggcctaaattagtcaagatcgtgttatagagttctttggctacaggttgtgaggaaaaatggggaaggcctggtgcaatttttttatcgaaaattggcttctagcgcactagcagtgattgggaacggtagtgtgcttgatgcttggcatgtaatgacatgtggctttgctttgcttggactggcattgacatgaaaattgtgcacattgcctgatgagcttgggtagaggggcattcatactcaatcaggaacacaaagttcccttaagctgtttggagattaaaattctgcctaataatcatcctctgatgtttccctcttgaactttctgttccagatgctataaccttcttgtggtttgtcaggactagaggacctatggaaggatcatgtgggcgtttgcatccacaatgtgtagtataatagtgggtgatagttagctttgtatatatgctgattgtagatgattgtttggatgatgttggagctgttatactcaatgtgaaggatgttcgtctttgagaagctgtccttgattctttaaaataaaatcatcagcttctagtttagaacaatctatgctttctactttgggttagtctgtcaaagtttggtggaggatcaagtttcacagaaacagcaggagaagaaggaaacaattattaaagtggatcctaagggggcaacttgatggatttctaactgctggtgactgaatagctagcaagatcagaagtgatcattctggtgcttcagaaactgaattcaatttatgaagtgcttgggctctcatttggtagctgaaaatagcttgtgatttttgaggatataaatccaggaggggcttctagtaaagttgtttaaacccttgtaggaagtgtcggtagtctgcaaggcttcaattattgttgacattcatattttacgcaaaggtctttcttacatgtagaaaaggaaaagaaaacacaagtaaacgagaaaattggattttttgctatgcattggattcttgcatgtcatgtttaagtattggtaggattattgagcgtttgagcatacaattgactacagggatattttagtcatttcatctaacgcatgaggcattagtagtgctttttagacttaatcttgagtactgcatttgagtgatttgcataaccatccggggtttgggacatatttggcaatttctgggcagaagagggaatgggtggagagacaaagcgtggtcactcggtattctattagttattttatttctcttaattaatctgttgctctttagcaagtcatttttattctgaaaaattgtgaattcaggtctatagacacatttccctcaaacaagataatttaaattgcagataaatttagggaaaaaaaattgaaaagaaataccttttgtccacgaccaacatggatgtggtgcatgacttggttcattggaccaacccgtagtgcgttttccacgtatgcttaagtcatggttcattttgtctatagattatcatttttatgggatatttagtgtctgtttttattttagattcttagtaactgttagggttgtctatatatatctagcactctctataactgggaattggacattcacccctctaagcattttttacatggcggcatcccacctttttttcatggtggcatccatgaactagtaccaattctcgttcaccaaattcacaaaaggcacacccacgtccaagcaatttgtcagaccagcatcacccattttccaatttttttaccctttatcatcccatgcaccttcaattatagtccattaacatcttgtgaaaatcactacgcctgtttgcttttctatgccacatcacatctttgggattcatcattgagctgttgctagcatctgggaagtcacaattcatcatttcactgcatcaggtcgtgtcgagttgttgttgctgtagtgacagagt

SEQ ID NO: 9884 - DNA, 1816 bp, Eucalyptus grandis
  Intron number 1 from transcript Egrandis_v1_0.023642m (loc us Egrandis_v1_0.023642m.g) derived from phytozome v7.0 (c hr-ID scaffold_6; pos 42469031 to 42470846)
cctccgcccctagattcccttcgcccacgctccaggttcggttgtttttttttccccccagaaaatatgcttgatactcaccgtgatgtatttatatacgtactgagttattggcattgaagatggagaagagatcgagtgatgaattcgcgaaaactttagggacgagtgctagaactattactgttaattagtgggctgtggtgtactaatacaagtacttaggctgtggtggcggatcgcgtaatcttttagcttctgcaagggtcggttttttctagattagagggacgatgcctcggttttcattcatttccggagcatttctatacgtggattgatgatccagaaagcatagaccttggtttttttctattttatcacaaagtatgttattaatcatcatgttctcagatcagaagaaatgtcacttggagactttgtaatgctttaagttaaaaagggttgcgcctaaattaagaatcaattctgtgaacttttgtcggattaggctaagcaaatgttgctgtagtttttagcagcacagggattaagagttccaaatgttgattgaatttgaaaaaacagggcactaacttcaatgttgtaggagcaaatttgtagtttttagcagcacagggattaagagttcaaatgttgatcgaatttgaaaaaacagggcgctaacttcaatgttgtaggagcaaatttatcaaatctagcattgataaagattaggatttgaatgatcctgaagaatattatggtcgaaagaaacgccgacaaccctgagaagtgtgtggtgtaataaagtgagacgtagacagatctttgttaccacagagagtagttcagatccgttctaaattggttcgctcacttgaattgtgtttgagccggggagtcctagccattctcagtcatggtgctaacagccatgtatgaactttgcttaattggttggttttgattgccttttgatttatgttttcggtagatgagggggattgtctgccaaagtcagtgaaacttatagaccattaccttttatcagccctcaactaattcgtcagtggcacatagatctcagagggaccaaattatggaacagatctgaaggcaacatcgacattaaaaagtagaggtagagaaagggaaaagagaaatgaaagaaataaaataaacagatggttcaacagaaaggagataggtaggtgggagagatccactccaccggcttcagaaccgcattcaattcctcttccttttccaagacatgaagcaaagtgatatgcaacctgtcagtcgatattctgattcatgttcacttacacttgtttgatgtacctaaagtaataatcaactgccaatttccatatttggaagttatcgtgcgcatgacacgacagaatatattctatgacttagataacatctaacatccactttctcgtaattgatgtttttagtaaagagtgaaatccatgtaaatgtttgaagtttcaatagatgtactgggtagtatgaggaacgttctctgtagatcttgaaaggtaagtcctggtaaaatcatagctcttgcctaatattgcgaatcttctgttaatgagagtgctcaattcaaacaagccgtcatttctcatcaaaacaagaaatgagaaaagggtcaacttagtcccgagaacttcaggattccggaatgatatcattacctatgttttgcatcgaatgctggtttagcaattccaatcatctcaagatgcatacgtgcatatgcacaggcaaatttccagaggccgtcgccagattcttttca

SEQ ID NO: 9885 - DNA, 1595 bp, Eucalyptus grandis
  Intron number 1 from transcript Egrandis_v1_0.033946m (loc us Egrandis_v1_0.033981m.g) derived from phytozome v7.0 (c hr-ID scaffold_4; pos 37725877 to 37727471)
accttcagtccaccagcatctgcattgaccgccccgtaatctctctctctctatcgcgttggtattgctgtacgaaaattcgtgatgggctcattcccctccgtccaattcgtctttttttccatgctttttttgagcttgtaatcgcgggtaggtgccgattcatcgccgctcggaccattcgtgtcgtgggtctgcccttagaaattgtgggtccatggcgggattatccgccgtcgcccgaatcgaaactggttttcattgctgggctgtagaaagttcgtcagttgaaatgcaagatgtgggttcccctttgattgcctgctttcgccgcgtatctatcgtgccggtctcgggcagtgttgttggcattggattggtcataagggccagcgaaacgtttctgatcacggggagcttatggttgccatttgacgcggctaatgtgaatgttattttcataggttgcgtgctatttagcctgcggggcgcgggttgattttgttaaactgcgcttggtcgttgactatgattgggtgattgttttgacttccgttggggcgtgcttggatgaagttcttttttggctctaaggtgaatgttgtcatcatcaggaaactactgtgccccacgaaatggatagtctaggatgattctgtattctcctctctttgttgtaggtatggtattgcctttgtatgctaatggtgaaataaatgatatgcgcattgctggaagaaagatagcctcaaagcaaatcgaatttatacttgagacgtgtgtgtattctgctgagtaaaagattaacctgctttcattgttataaatcagatagcatgaaagtcagagattgaattgtgctagattgaaattgtggactgcatgggctacctcttctgatccctttccatgctgaggcagcttcatggtggccaaaggccaagactagggatgctatgtttgaaatttggatgtccttgcatacttggatttgaagattgtgactatgatttccttcataatttgaatatgctaaaggtttatttttgcaaaatatttactgcgcttctgtgtttaccttatttaggctttggaaataggattatctttcgtgcatagtccttgtaactggtgactaaaatatatcttttttcttagtatggttgtttggattctgagttcatgagacattccaccaagagtagtatcagaattagttgctgaaagcttatggtcacttgctggccatcatcgctttatttgcagcttttagcttcagtggaacaagttctcgaagaaacaaaaatttttgcaatggattatttcacagaagctgtggtctatggagatttacttctcatttacaacatctatttgttgtttacaagctagcatggtctttctactcattccaaggattgtttagaataggtgattcgctgtacgatagcggcctctctttacccatgtgtttcaaatgcaagtattataattcataattgcttaaaatacagcttttttcatttggaaaatttatcagttccctttgtttgcccgcaggctttttatcatcatcctgcatatatagtagcgat

SEQ ID NO: 9886 - DNA, 1440 bp, Eucalyptus grandis
  Intron number 11 from transcript Egrandis_v1_0.005790m (lo cus Egrandis_v1_0.005790m.g) derived from phytozome v7.0 ( chr-ID scaffold_11; pos 23953321 to 23954760)
cgtaatcgccaggtaacaccagccatcatttgttcactacaatcacttgagtatttgtgagtttcttctttacttgtgaatctggtgtctggagttgttttgcttagtcttcagcatgcagttgaactcctctttctttcctctgctctttgctggactttgttttggccgtatgacgtgcagaaactaatttagtaagaggattaagaaccatcttttaaagcattctcactatgccacaacttatagggactagttcattgctatgaggagtgtgttaatggacctgtcaacttataggaaagagccatactgtcatccatgaattcgcttagcattcgatgatattatttgatatttgtgaaggctatatgtgctggaaaggcataaggatggacaaagggatttatgcattgttttcattaatttggaggaaacatgacaggttacaagggaaattctttggagaattctatagaggaaaggagtacatgttgttcatgtacaacaaagataaatcaaggtttatcctctagcctaggattgatccaagttttcggctttaagcttatccttacgctttcaaagctaattgggaatattcaagatgatacccttggcatatgcattttgctgatgtttgtagatgaaagctgacaatcaaccggagagaattcaaaactcacattgtagtaggaaacgttggaacattaggatttgcttaagtcagtccaaaaaattagtatatggactatggaggataagttcaaataagggcagcgggtcaaatgtcacaatgtagatggagaaattatggagttcttacccacaacatacaagtgggatggagaatgttgaggagtgttcttggttttacgcaaccgttgattgccacttaagcttaagtgatatatctaataaaattggtagtcaaatgctgacacatactcagaatggggatagcggatgtgtgaatgctttagtgattgtatgggcatttttaagaaaagccataataaagttgtggcgaacatggcttttctctgtacttgacgcatttgccttagaaattcagtgtggacaaggtgatactgccgtgtaagccattttatgccccgttaaaattcttgttggttgcttggctttccatgttgggcatcgtgatttatttcccattttgcagaatcaccatacccatgagaaccctgttaaaatatacaactaagaaaagctgaggatttaatgggaccttacatttaagggactactagatgataatgaggtggaggataagaacgcttgtttggtttcaatgttaaggaatgctgatgtctgcgattttttcatttcaatttttggtagccggtgtgtgttctgcattgtaaagactgatgacacgtcttttttgtttcaactgattggattatggggcagcacgtg

SEQ ID NO: 9887 - DNA, 2774 bp, Eucalyptus grandis
  Intron number 4 from transcript Egrandis_v1_0.028141m (loc us Egrandis_v1_0.028141m.g) derived from phytozome v7.0 (c hr-ID scaffold_5; pos 45641343 to 45644116)
aagtgagtgttccgctgtcttttccctgttttctgtacccgtccgttgtcgatgcttgttcggatttattgcttcgtgtttgtttagtaatctttaccgtggaattgaaatgtttggagtaatggtagcaatttaaggcacaggggatggttttcttgtttccattaagtttgtagcgcttgaaggcacaagtgatatcaatgccaaaatgccactgtgtgtgtggggggtttgtgaagggcttaatcttttcactcaactgtcttgttctttcaatgggacatttgagtactcatgtagtcccttgatacagattaacataaggatcatgggctcattgggtagtgacgattatgcctaatgattatcggttgtgaagggcttaattattaagctgtttgttgtggctgcagcttttggtagagatatttaataaagataaagaattcatgggtgatgtaatgactagaaacagcaaactgtctcttcagttcattggtttatctatgtcatcagggtttgcacgttaggatctctgaagacttaacgtttttttcccccaacgacttagtgtgatattcattttcttatttctggtgttcaaacctacaaataattgggtgagaataactcaaactaatgaagtgatcttggaagaattaccatttatgaaatttgaccataactttgctaaggaatagcctactactttggtttaggttatcagtttctcaattttgcttatgaagaataggttgcgccagtaactactattaattgtatgttttggctgatcatagtctatctatttaaggccttgttaaaatgtttgtgttgttgtattgtgaattcactgaattatgctacttgtgattgctctacttatttgttgacaccccattttttgaaggaacaaaccttgttaaactatgcaaggcagtcaagttaaagtgtatagggattcctattcccaaagaaaagcccttttagaggctatgctcagactaagctagactttctttattgctacaatgtgatttgtattaggcattctagttgcctcttcccaaggatcggtaccaatgctttgtttgggaaggaggggaggggaaagaaaattggggtaaagtttgaaactttggcgcagataggacagaaatttaaattttctttccattttcatcccatccttgccttctaaatgaagtataagaatgatagactggagaggataaagcagggcaggcaaggttgtcaatttggaatagatggtaagatatgctcaatgatagttgctcctgtcctggggttatatgtgttaatgcttggggtggttgtggatctagagtagcagaagcaactcctggtttagatcgtctcaaaactatgatgacgtgtagctttccctgaattctagacaacgcatttcatcaattttatcgacaaagtccttattggttgtttctttgttggttgtattgagtgccaaaatctagtcatgcaatctagtcctaaaagatctcctttctagatcaaatccctgagacttctgagtaggttgatctaatggtatttctgttctgagtgattggaaggagagaggaattaaattgataacttttggggttagcttgatctcaaggccggtttcaagcaggagtagaataattttgtttctgcaggattctggtttagattccattttcaccaaggtgtcatactctattggcttgccatagtcttcacaactcagccagaaaaaaagcagtaccatgttcatttgtctcgtgtgttcatctcactcactgaattttggtatataatgatcatacaagacaattgcatgctgttttccccagtctccctgcagtaatgtatttaaaattccttcctgtccataacagtgtcatttgactagataaattgtgtttgatagcacgatacttttctttctagttagagaacatgttccttcttttcatcagcactcgaaacctatcttattctatggatactgcaaatatgacttattggcttgtcaatgcttaagactggcttagagcattatctaactctccttgaagaattatatgcaaatgctctggggatgtttctttatcgctattggtacttgagttggtctaaactgacaagatggtatacaacaaaaattgtcttgaggtcatcgtcaaagtacttgaatgttcttacggctgtaaacatcgtcatttaggactggtcattaaatagatgggatttgatggcatctgttgtttgccttatgtatgtacgcttaacatgtattttactttgaccttcaggctcatcatgcaactatggtctcatgaccagcaaattgagcattgtcttctaattttaccatggttaactgagattaaaggtagatatatttattgaccagttggttttgttgtttggctggccaataagtccaattcgaggagagcagagtttccccatatattattcattcctcatctgatcgttaccatcttgcttggattaccgttattgttaaggcctttgatggagttaaacatgcattccttctctagtgagtagtaagagaattcagtgtgcaaatgctatcgctgttgtagttcgtgggtgctacgtttagttcgttaatgccttcttttcccacgtacagcatatctgcaaaaccagaacctacctcattaatttgatcctctcgttgcttgccggatacttgtacagaggcttgtctacaggggattgccccacctccacct

SEQ ID NO: 9888 - DNA, 1691 bp, Eucalyptus grandis
  Intron number 2 from transcript Egrandis_v1_0.028292m (loc us Egrandis_v1_0.028292m.g) derived from phytozome v7.0 (c hr-ID scaffold_9; pos 6010379 to 6012069 reverse strand)
tgactccataattgaatataacggttttgttataggtagagctctgcactttttattgattagttgttttcctattatctcttgagtaagaaaatagccattggtactgcaaccttggttttatcacaagtcctgtggatgctatattttgttattcgtagatgctgcagatgacagatgtattttgcaaaaaagtagaaatcatagaagttatagaggatcttcaaatatttgggggttcctaattttgacccattgaaggtaaccattatttaaggttataacggaacctggtcttttggagttatccttttattttcttgaattgggcattaccatttaggtcttctttcttctttatctatctaatgtcattatcactgtacttcttgttgttattgtccatcatcatcatctttgacatttactttagatttcagatcttaccttttttggttatagattttcgtaggcaataggttgcctgtcattttccagcaaaacgttgtagatagttaagagtgctatagatgacagactttaagtacttgacgctgccagctgaggattagttttttgctgctcagctagctattttgagtggtgatgtgccttaatggcttctaatacagatttgttgtctatggcttctgatagagtagattactcagaatatctgcattttctatcaactaattaaattcattttagtacagccttgtatattctggaaaaaatttttagaaattatattaaacatgattattctcatcaatcggactgaaagtatcatggatcaagagtttgtgtttgatggagcctgtgatgaacctttttaattcctttattctgaaagtattcaagtgggaaggagaaagaatgtacttaattgtcctgctagtgaaaattgagctgcaaggatgtgtctgtactctgtagtgctttcaagttctacctttgggtctgtgatggatggttagaagaccccacgcgtcatccattgtgctgcagcatgccttacagttgaatggcacttcaacatctcatcttttctattccagtaaattgcctgaaaggacttcctttcacgttagagcagatcttcccttaagccatattttttgttgaagcttttccccaaaacagacatttttttatttttattttgtttgtttcttgaatttgacatcattgatgtctttctttttaatgaactacccaactcttctctttttggtggaacaacccactcaaattctccctgctgattgatgacttgcaagaaagataaatctattgcctccctgctgtttaggtgacaattatatggtatcagcaacttgatttggctatatcagattgttgagtgtattgagaggattagccctaaacatccaaaattttgttctagcaaagaccagatagtacacaaattaattttaaaacccaagacgatgaagtatgctgcctgcttagtttctgcagtccaatgggtagtcattgaatttgagtacaatttcctgcatatgtgatctctggcttacacatggcagagaaagtagaaatcactttcaaatacattactttgattttacaagagttatgatactatctcctaaaatcatctgctggccacttatgattccctgttgcctctgcagtttgtgatccaaagagccttctcttcttgt

SEQ ID NO: 9889 - DNA, 791 bp, Eucalyptus grandis
  Intron number 21 from transcript Egrandis_v1_0.039530m (lo cus Egrandis_v1_0.039530m.g) derived from phytozome v7.0 ( chr-ID scaffold_377; pos 25441 to 26231)
tggcatccgaaggagtggaatctctgcttgagtgggtaagtatgagtagaattactttcatatggatcttttaaagttgtttaagctcatttttattttggccaatggatttagaggatctggaacccctctcaagtttctttcaatgagtataagaatttgcaaatgaattttcaaatgtgtcatgcatatgggcgtgtgcaccctgcatgtcgtatatatgcggtaatggatatgtatctttatgcttgttatgtgtaggtatggatttgtgcatatttgtttgtatgaggggcatgtgagatgtcactgtgtacttatcgttctctgatgataaagacaagttgtatctgtgtcaacgttatagccactgcacttataaagttttctaattaactgattctgcttcattaaaaagatctactccataccttaatggatgtgctgaactatggatatatagtttctttgacagaaccaccacatttcggatttagattaatgatgtatatcagaaaaatcagcaagaacattttattcaaaagggtgcagataatccgcttcaatctgcagattaactgaaaaaaaatgggcgtgtttcttgggaaacagcagttgggaagggattgattcctccattgtcttcaccttttggggaaaagaatatgagacaatccacttcttttcttctttggtaatagtcctctggttttcaatcatgcactttagtttgcttactttgctgcatttttttgcttttaaggcctggcaactgtacgagaacgagtgcc

SEQ ID NO: 9890 - DNA, 1902 bp, Eucalyptus grandis
  Intron number 4 from transcript Egrandis_v1_0.006295m (loc us Egrandis_v1_0.006295m.g) derived from phytozome v7.0 (c hr-ID scaffold_8; pos 33382299 to 33384200 reverse strand)
cacagcagcaaacaccccttagacttacccagcaagtatgtattttgagattttctatatgcattgattgataaattcctttggtcaatgctaagtacttattgggaaattatattttctgctctgctatacctacaattgcacattgcaccttcacattttagaaattacattttgcatcctcaatttaaaggatactacttctgtcattggaatgataaaatagtatataattccctgaaatgaaatttctcttggcatcgttaataatgaattagtgacacctgaagtcttagcctgtctggagagttattgcatatccacctcccctctgtataaaatagcatgtctgatattttggagttacaagctcaagtataaatgttagtatataaggggttgttatgtcagacgatggtttactcgactcagtaaaactgatgtcaaaagataatgatatcaatgatagtcagccatgagaatttccaagtggatgataaatggttctgatattccctatagggtgttgtcaggagcataagggaataactgtcatgaagaagaggttctcaaggatctcaaaagatcaaaagcatatatatatatatatttttttttaaatttgggtattttcaaacatgtaatcatatctatgggctttaatgatttgggattcacaatgtgacaatttcttttctcatgtgatttaattttagattacacaatgccgcatatccttacgtgctgctctaacagctatattatatattgttgccaaatcgtgtggatagtgttctttcaaatgtactttgaattaattgaagatgatgtctaaaataaaattaataagtcaacaggattaagataccatatgtaccaccattggtcattccataaaattttggttcttgaaggccctcattgcaaaaaattcaaaaaacatttggaagagtagaaatttcaattaaatattatatatatatatatatataaagatgatccagaatctaaattatgataagcagtgctcttcatatgcttcccatcaaagttttgaagttgttgaggatgggacgtgataggtctaattttgggtcttcgtatgaaggtgatcttgtcttcctttagagttataatggtattcttgtgaatcgatgattgactaaggtcatgtttggattcttttgtttctcggtcaacttttttctagtttatttatagcagttttaggttaaaatgttgttggctatgacagcaaaagtttgcatgtcatagagcattatatgagttttggcattcacacttaccaattgacattgatttagatcgttcaaagcgatttttcagcaattgccttactagtacatgatgcaaggaatgacgtgatcccttttttaatgttatatgtagttgtgttgaacaaattgaccttgggaggctgaagaaaatgtagttatagaactatgtatactcgatgtatccaatgagatgttttatcagatgatgcattggataacgctttcttatctgatgcaaaatgcttaatgtgacatacctagatagtatgttgaggaagctttagattcatcaaatgcaagtggaatcaatatgtctttgatcatatgtgataagataagttaagacttcaatttggcacttatttgttcccaccaaatttaagaattttcataagaattatctttctggtggtaaaagcgacttctttttatatactttaaaaatagttgattaatctggtttttgttttcatcagaaacttctcaatgtggttttaaaaaatgaatttggtcaaatgattattgaaaaggatttatcatctagttcttttacttagtgaaggatgacacaactttgtaagaagaatttcaaatgaaactgcag

SEQ ID NO: 9891 - DNA, 2580 bp, Eucalyptus grandis
  Intron number 2 from transcript Egrandis_v1_0.002315m (loc us Egrandis_v1_0.002315m.g) derived from phytozome v7.0 (c hr-ID scaffold_4; pos 25227669 to 25230248 reverse strand)
atcctcagatagtctggttttggaaggtatgttcctgtgtttgtggattttattatttaatttgttaccttttgagtcaataatctctctctgcgtatggtagtttgtttgaatgttatctggtttgtccttttattatcttttttctcataatcttttcatcgctgtaggcctgtggcccctcatattctgttttccatattatgtaaaattttggatatcagagatgaagctggacttggatcctaattggggaggatattgccatgagcaaattcctttggacattatgcctaaaggttataggcagcactgttgggttcatttaagcatcatgagtaataacattattctatgactgaattcagaagcaaagaatgggttgaattcagtaaaccgcattaaatcatattcatgaattctgctgaaatccaactctaacccgtttggttcggcattcccaaaggctttaagcccccaaagccccttgggaaaaattttaggtgtttggttcagcatttggaggtctccttggccaaatgcttgcctttgaaatccacctgctttgggctttcagcattttcggaatgctaaataggggtttaatgaatttttttcttccaatattgccctcactgataattgcgttttcctcttttatcctaaaaaattactgttcatcgtctgtcttcttggacttgttgctccaccggtgaagttcagctggcggagctcaaccggccagatctggtcgccgagaagggtcgcctgacctcaggggaccttgggcatcgaccccacgcaccgccatcgcctgggtcacgtggccttaggcgatgccgcctaggtcgcactacccaggcgacggcagtgcgtgggtcgcgcaacctaggcggtgtcgcctgaggccgcaaaccaggcgacggcagtgcgtgggtcgtgcgacctaggcggggtcccttgaggctgcacgaaccaggtgacggtggtgcgccgcctccccaccaccattgccaccagccgcctcccccaccacaactaccagctccagctacctcccgatcgttcccctctgcttcagcatctcctcctcctttttccttttctttttttcctttttcttttcacctcaaagctactttgcaaaatacaccaaaatgagagtatccaaacacttttgccttcatcaaatgcccattcctctaaagatacttggggaaatgcaaagcaatttccccaaagttgaaccaaacgggcccagtagaaacaagaaaccttgaatttgagttaaagtagatatagcaaatttactaaaatcctagcatacctctaattttcgtaaggttacttatctaaaattagctagccaaagcttgcagtcagccatgcagagtcagaatgcttcatcttcttggggacttgagtagatatgtttattagacataattagcttgtctaatctatgggtgcatcatttcttcccactggagataacgtggcctagagttatggaagtggtcaattattagcttctttcaatttattcttattgtcaataaatttgcagctggaaccaatagttggtcagtctgagcatgctctgggaaaatttgctgaattagacttctgtttaaaaacccttgaacttagaatgtatcacagaatcaatctactaaaattagcttagacattccacatggatgcaaacctctcttcttctgtccaacataattttggaggaacattttaacctgtgtgatcaagttctccataacagaagtacatgtcctgctaggtgagaaggttatcacttgctcatgtccttagtatgcttgcttatgaatggtaagtcatccaatttctcgcgcaagtgcaaggtgcaatttcatggtacctgtctttatcaaccaaaacttaataaataagtaagaagcattcttatgttagtatgggctctatttacatggctaggtttgcaggtgtgtgctcctgaaagataatctgtacagatgctctcttgactatctcaagcataaaaatggttctctgcatttcttagcctggactctgcggggaggaaagattgcccttgctttaaaaggcattggatttttaatataaagtatgaaagatgaaaattcctaatgtctaggctctgtgactcaaccacgcaagatgcatggtggaggctagtttccatggcaatgcattatggacagactgtgattgttggatgcataatgtgtttgtactcttgtatggtttttagattgcagctttctttgggttggacttgtggaaagtttcctccaataacacgctagtcatggtaatttagtgctgaactattgtagaagagtagtgaaatgatgcaattttgcatcacaggatcaaaatgtaggtcctgaagatacctcattactgttggtgaacgatcctctagatatggctggagagacctagttaattccctaattggcataaaattatcttcactaattttatatgttgtaatgaaaattctgcattacttttctcttcatcatactcttggtaaatccaatgcagattgtcagcgaa

SEQ ID NO: 9892 - DNA, 1558 bp, Eucalyptus grandis
  Intron number 2 from transcript Egrandis_v1_0.009510m (loc us Egrandis_v1_0.009510m.g) derived from phytozome v7.0 (c hr-ID scaffold_9; pos 14409649 to 14411206 reverse strand)
acaaacaagaagccgaactactttcaacaccacaagtgagtactttcaagcattaaagtattttgttaagtacataatacgtattgattgatggttctctcctatgaagaaagagagttatgcatgatctcttgtgaaaatgttcacccactctgccacagaggttgctttttatgagcatctatttatatctgcaatcatgatctggctttcttagggaaatatctcaccacttctatgtattggttgccatgctgtatgtcattattggtcccaaatttttgtatatatagtttctctattacatgataattgtgattgttctttgacattacgacaatgtctatttattataggtgcatgtgacgcttcctggatcgggtagtcatgaaattgcatgtcaacctggtcctagtagctaattcatgttaaatgataactaatataggtcattagtgttgagcacgtgctatgggtgtgtgcagtcgaatatatatgtaagaaaaaaatagattaatagttgccttagaaaagaaaaagggtagtttttctttgagtggagaaattgggtgaggattattatttattgttgcttgggtggtggttgggatttgattgttagtctttcttatcatataatgaagagtaattttggaagaataacaagtgttgtgagatagagtgtgttttaacttaaatatagagatggttcatatttttgtggcctcaattcctttaatttcagatgttatccttcatatggtcttccagccagaattagttatttcaacattctagttctccacagatttacagcattcaatcctttttgtacttccgttaatgttttttgttacccaagttatattctttaaaggctcaatgggacgtggcaggaaaagctctacaacattgtgtacatcttttctttaacaaaatgcctgttgatcaaatttaaactatgacaatatggagattttgtgcaagagacgcgacttctgctgactgtatgcatatacttggatttgatacgtttgcagaaagagcaagttgctagctaaattttgctaaaacaagtgggtgtttggtcaggcatttctttttgctctagttgtgcgatttctttttgcattaaccacttaagatcgtttaacacatatggacacagacatttgaaatcaccacactaacaattgacaattggacattgttcgaacattatatatgaacaatgtccaaacggaattcgaaataacccaactaacctcttggaccaggtaagatgcagactatccaatatgcgtcattgaaccataggtcctggactgttgagcattcttggtggttcaattgtactgttattgatttctccattttgagtactttaatctcacttcttatttgtccaagaaaaaaagaaaatgccaaattttatggaaattttgctttttcatgagatttcagttttgcaaattatttccatcaatctcatttttcctattgagtgtgagatgccgtgtgtcaccttccttggttgcagatattggaagcaagagca

SEQ ID NO: 9893 - DNA, 880 bp, Eucalyptus grandis
  Intron number 1 from transcript Egrandis_v1_0.043732m (loc us Egrandis_v1_0.043732m.g) derived from phytozome v7.0 (c hr-ID scaffold_5; pos 70723867 to 70724746)
gacaacttctacgttatcttacccagcctccacaggtaagaaaatgaaatctatcggaaattagtaggaaaagaaagctatagttatcgctgcaaactcagcttctatgcttatatatggttagaacaaaatcgaaaaataacgattaagttcattggcatgatggattctttagctttgaatgttgacagaggaaatttctacaagggtccaagatcctagaaaattgtttacaccattatttttatttcagtcccttacgaagaggccaactttagcaactcattttcctggtctggctctgttttctcagtatttctgttagtagcttaggttgctttcgttcagtgagtgcagtctctagtgaaacttatatcatagagaatctgaagagacttagcttatatagccttcacaatggcaaaagccaaatatgcaggaaaattactgaggcaatctattaagctgaaaagttctaatcagcctctttattattgtaggatgcacttcacaattggcaatctacttaagctgaaaagttctaattagcctattgatgcttcaggatgttatccatatattaagatatttattcaacttatgaggaaaacaggagataaatggaagaaagggatgattggtctagtcattggcgtcctgggactcctattaactgttcttgctggatcttgcgccctctacttcaaccggagaaaagcaaaacaaggcatatatgagaaaatggatgttttaattcatattttttttagagctaatccagactcaggtaccttcagacctggaaagaagcctgcgtgctttgcttaatgatttaacaaatccagtcggagtggaaattattgaagaaggcaacctggtt

SEQ ID NO: 9894 - DNA, 1614 bp, Eucalyptus grandis
  Intron number 3 from transcript Egrandis_v1_0.000175m (loc us Egrandis_v1_0.000175m.g) derived from phytozome v7.0 (c hr-ID scaffold_7; pos 46336336 to 46337949 reverse strand)
tcgctcctccattcgttctcgtttctcgtcacctggtaagtgacttaactgagtcagtgtatatttaaatatgcttatgcatgtctgttatggtagtagccctgtctttactttctcaagtagttgatactgtcctttgcttaagctgcatcagacttaactttcttgccaccagatccattaattgtcactttgttgtagtcaactgtgataaattatgccattatcggatattcctttgtcatttttgacatgctattttgtgtcccctactttttgtcccgcatttcctgctggcaatctctatttaagagcaaatgctcaattgcttttacttctgcaggacaagatgtttcactctgtttgtatttctctttttaacttgtttccagttagattattttcagcttctactcttttgacacgttaatttgacaacattcggagtaatagaaagtactatggggatgattgaaggagcttaaaatatccagatactttaaaatgctctcatacaacatcagtttaattgattattcttgtagtatgatttccagttttaattattattctcgtagtatcatttccagttactttcacttttagcatcttttcttccatgaaagacatgctttcaaagctgcaatcttttcagaatacatgtgctgtggacctaaaaaccaataaaataggcatgcaaattgaaagtggatgattggtggaaaatgattttggtcaatgacttaaagctgaaagttgaacttatacttttggattattggagtattgccccttaggctctccaacaaattcatcttgattatcccaattagtctttgatggggttgtattgggtggagttgatgcaatttagtactcaaggtcgactcctggtgaatataagaagctcaattctcgactcaattgattgaatttgactagattgagttgtccattagctcaaactagatttctagaagttaaacaaaataagtaaattgaaaaatagtgccgtttatcctgtatccgtgaacacaaattagactgattttaatatgcctcttccaagtaattgggagtcttgctatggtagcttgacttgcttacatccttattttgcagtgcatgcgggcgtctgtgttagcaccattttcttagagtagctatttaccaggtttatgctggctgccatttgtctttataagattggaggaatgacagtgatggactcctcaactgcatggaaatgtcttgtgattctatttatcgtagatatttttgcttgattcttgtcattttttgctgaagaaatatgggttgatattctggttgtggatttgatttttgaatgctttccctgaaatcgtttgacaggtgtaggttaccacctttttgcactgtgcagatgttctcttgaagcattattttaggaaacatcagctgttcatttatgttctgatattctgaatgtgtttcccttataccctgttggccaccatgtgacagtgaaattttggggtcgtgttaagaacaagatatgttttgtttgtcactgtgtgatgtataattttattgtccttacagtgaggaatttgagtccggtaccatcatcaa

SEQ ID NO: 9895 - DNA, 1311 bp, Eucalyptus grandis
  Intron number 2 from transcript Egrandis_v1_0.000165m (loc us Egrandis_v1_0.000165m.g) derived from phytozome v7.0 (c hr-ID scaffold_3; pos 60384135 to 60385445 reverse strand)
agaggtactctcgtgggcatgtgactactttatttagagttatttattctgctaaagcttttctctcaccttttcttgtaagtttcatttatctgcttcgggtgtgttgcattgtttaaaggagttttctcctcccaaaactgccagttgggcacctgtcaaaacttttagtttatatagtagctgtgcccaaggctaacatgcttctaggcggttggttttaatggacagtacagcatcatatgaggttattagtccccatcatagggctaaggtggtataaatattgaacaggtggtagaaacttgttaaatttctgcttcctgcactttcaatattgctagctgctttcctaattgatcagattttagtaaatatcaacatttttcattgaggtatttgtaggcaggttatgtgaagtgtcttgaccataatatataaaactggcagcgtgaatttttcagtataataaagtgaaagtgaagtcaatgcaatgaaatacttgagctggactttgatggtaaattctctgctaaatatcaagtttaacctgagcttatttaaacctcagctggccaaactcaactcaacaagatattgaaagttttgagtgggacttggttgttccggattgtcacagtcgagttgttatttgggctagagcatcaacttcaggtcgaacttgattgcggcaagaaagacaaagcctacaccgtcatgttttatgaagggtagattagagactgaaatgcttgatttgatttattgaagtgtttgggtgagctatgcagatcattgagctttacttggtagatgatctgattacttggacactatcataacttaattgagccaagataggttaatcagtacattgtgattattttccttgagagtgcaatcccatattttttaattttcaccccaagagattcgtttttagttgtttgctgatcttgcttcctcgcatctttttctttgaactcatgaatttcatggacctgatttcaagttttgataatgtttgcacaatgttttcattgaatctgatgagatgtgttaatttgttgcgtaaagccataaatttagagttgcttagttttatctgctaaattgtgtcataacttatctgtattcttcctttctttatgactaagccccataacctttcttatttcatcaggtgccccccttccctagactatacgttgggtttattgtcactgttcttaacacttatcattagactgacatgatgatgtcaattttgattgctcagtaaggtggtcaaaggagttgtttgcaagaaaa

SEQ ID NO: 9896 - DNA, 993 bp, Eucalyptus grandis
  Intron number 2 from transcript Egrandis_v1_0.013935m (loc us Egrandis_v1_0.013935m.g) derived from phytozome v7.0 (c hr-ID scaffold_10; pos 10735103 to 10736095)
tttagcttcctcagctgcaggcttggcctgtttaggtaacagatctttttctcagttacctttaatttaacttgtaggttgaagcgtttaatctacccatactgtggatagctggatgatgcctatttcaagtactttgtcaatttgctgcttttttcccccttcttccaattaactcagaacatgaataatacagtaggtcaatctttgtcatccatgggatactccaactggtcaaattttgtgatgtactaaaaagtggtctgtagcaggacgttacgcttcagttgaatttttaacccttcaccggcccaaacaatttgtatcgacctctcctgcagagttggagtttcaaagagcaagaatatggatagaacactgtctaacaaaagacgaggcaacatggctattatctgacagactagaatgaaaagcacaaatcttgttctaacaaataccatatgtagatgcttattcgtgcactgctgcatgtttgcgttgggcatatatacatatgctcagttaatttatagcattaaaattaggtataagtttctcaaatgtccatacaaaagacaatcatgtaggttaagaagcatgcgggcagataacagaactaaagaaaagacagagtaattgtaatatttagagatcgtcaggtgcataaaactagggaaaggaaaagaacaagatattttgatgggtttatattttacatcgaggatgtacaagaatgcccatgatacagatcaaaactagaaaggatctctagaagtatcattgctatttagacttatatctagttgatgtatactggacttttttattcccacatgctgaatctatggttcctacttaatttattttattggcgacattgtttcctcgccttgagattatgttatgacatcttttgttttattaggaaaataatggacagttctaaaatttgtgatttcatctctttttgcagtgtttgctcttggaaagtta

SEQ ID NO: 9897 - DNA, 2205 bp, Eucalyptus grandis
  Intron number 1 from transcript Egrandis_v1_0.004633m (loc us Egrandis_v1_0.003994m.g) derived from phytozome v7.0 (c hr-ID scaffold_3; pos 48519282 to 48521486)
tggactgaaagaaacccggcgacagttgttcactggtgagttccgcccgccctctctctctctctctctctctcctccgctctcgatcttcgccgcagttccccggctcgattcgccgattccggtgacgctctccttctccttctccctcctcctcggatttcgcggctcgtgcttgtcgtgtccgcagtttcatcggcgttctccactcgatgcttctcttctcttcgcgtcgcgtcgcgtcgtttgaattatgaactgtcggtcaacgcgcgcgcgcgctcgtccgctcgtccgcgtctctgatttcggagtcgactcgctcctctcggcggtttcgttctgttgccgtggcgagttcgcccgcggtcgctggtcaacgccgaattcgttcgcgacggggaggatggggggtttgcgaagatttgaattttttgtcgtggtggtggtaggcggcggtgaagttcgttcgccgtgatcgtgtggcggcgatgggccggcggcgaaggacgtctgggtgcgtctggtcgggaggggcggtgttgaggggcggtgttgatgggcgttgctgtgtaaatttctgtctaatgttgtcgcggattttaacggaaaaaagacggattcggttccggctatttcgggcgagttgtggggttcgactgtcttagcaacttagcagtttcgagtgatgcacttgcttgtcatttaggtccactttgtgggttcgattccccgaattgtgcggcgcttctatgtttagatgacctacttggacttatgttttacttgatcgtgaagccggggttcacttgtggtttactctccatttggaatattgtttatttctttccctttggttaggggagatggctgtgcgtatcttggctaacatcttctggaaggtcttgaaggatttgattttcgctttagaggacagtatcataggattagctctagtttttaagaacacatggtagtattgatcttcaaggggtcagttagctgtgcactagatttttcaaatgttagagcacatcggcttgatcggtctcttttaactggtctagaaatggtttttctctatccatttggtagttctcatcgaaaattcttgcctgaagtgtttggaatgaagtacatgctgaacatgctcttgtgttgttgcctttgctgttaacgaaattgattgcttcatgttcttaaggacatgcttctacagcatgctgtctgtcctgctacatggcatgtttttatatgtgcatattttaagtgtccctttgaaatggatttagttataggatgttctcgtggcgatgactgtcagagataaaattttatgtatggctggggaactgcctgtctaatgcattattaatgaaaaaaagaccttttaggtaatctttgttttctttttcttggttctgtcaaatgcaagtaataccactttaggccttctgaaacttaaaccactttcttgttcttcaggtgacttatatctggtttttgtctgcataatgttcgactgtggcttgaaatctcactacatgggtggccaacaagagaagtttgtaaggtagtacacaaaatagccatattttccatctgaatgcaatgtacagtgaaggtcctatgttggatgatggctaatagttttttcgtaagaaaatatttagaaaagtggtcaattttgaatatatattggtgaaggctgagggtaaatacctgcataccaatcaggcattttgtggaatttggtaaattatgggcaaacatttgagtgcttatcattaatttcttattcctgtaagtactaatcgccgaggctcttcagaacatcgctttattcttgtcttggatgaaagttaatattatcaacttttctttttgtatgtacgagtgagcatattgtcatttggaaaaaaattgaatgttgggcatatgtgatttcagcattctgagacagttaaccaagaaaaaaactgtggcttattcatctaggttcatatttttgctttctgaattttgaggcaatttcaaagatgcttactgagattttttctttttttttttcttttcttttaccattccatgaaaagagttggaatggatactttaaaatgataatgaatagttggtctcttccatgctaacgctgtttttaaacttctaggctggacgatttggactctagagtatcatcatctt

SEQ ID NO: 9898 - DNA, 7744 bp, Eucalyptus grandis
  Intron number 3 from transcript Egrandis_v1_0.001651m (loc us Egrandis_v1_0.001651m.g) derived from phytozome v7.0 (c hr-ID scaffold_7; pos 11935527 to 11943270)
tcaaatcataccgcactacactcttcagtcaagaggtacgtgattaacattatgtcaaaatattatatataacaaaagtattaaataggcaaaagacaaagcatagccaacgtacgaactaactaaataaggctttccattgtaagttattgttaagaaggaataaaactctctcactaatcaaatttatgtccgcaatcattttccaagtaaagatcggcgaaagattcattatactgtttagcaacgacactagtatggagcttttcttactccttttgtttttttttttttttattctcttttttccccttttgtgcgacttaataatgcccctctcttcttggcacatgtatatattaacatttcggaagttcctaaattcgtgatttaactaaatcaccaattccatgagagaacattgcaggttgccttttcgaaattggagacattagaagtcaagggcttggataatgtcgagtttttgtttcccccatccatgattaaatctctcgcacaactgagagatctacgggtatcttcttgcaagaagatggaggcgatcatgacggaggaagaagggttgggattggaaatatcagaaactcaggcattcccaatgttaactagcttaaaattaaattatttggaaagtttgatgtgcttctctcgcaaaaagtgtaagattgatttttttttttatcactaaatatcttcctgtagatatgctcatccttgcaatacaaatggcaacattcttttcatccattgaaaaactgatgacaggttcacgagaagctcggaatcaggaccgaatcaaatcataccgcactacactcttcagtcaagaggtacatgattaacgttatgtcaaaatattaaatataacaaaagtattaaatatgcaaaagacaaagcatagccaacataagaactaactaaataaggctttccattgtaagttattgttaagaaggaataaaactctctcactaatcaaatttatgtccgcaatcattttccaagtaaatatcggggaaagattcattatactgtttagcaacgacactagtatggagattttcttactccttctgtttttttttttttattctcattttttccccttttgtgtgacttaataatgcctctcttcttggcacacgtatatattaacattttgaaagttcctaaattcgtgatttaactaaatcaccaattccatgtgtgaacattgcaggttgccttttcaaaattggagacattagaagtcgagggcttggataacgtcgagtttttgttttccccatccatgattatattttcgcacaactgagagatctacaagttttggcttgaggacgatggaggcgatcattacggatgaagaagggttgggattggagatatcaaaaactccagcattcccaatgttaacgagcttaaacttaaattatttggaaagtttgatgtgcttctttcgcaaaaagtgtaagattgaatttttgtatttatcactaaatatcttcttgtagatatgttcattccttcaatacaaatggcaacattcttttcatccattgaaaaactaatgacaggttcacgagaagctcggagtcaggaccgcatcaaatcataccacactacactcttcagtcaagaggtatgtgattaacattatgtcaaaatattatatataaaaaaagtattaaatatgcaaaagacatagcatagccaacatacgaactaactaaataaggctttccattgtaagtttttgttaagaaggaataaaactcgctcactaatcaaatttatgtccgcaatcattttccaagtaaagatcggggaaagattcattatactgtttagcaacgacactagtatggagattttcttactccttatgtttttttttttttattctcttttttccccttttgtgcgacttaataatgcccctctcttcttggcacacgtatatattaacattttggaagttcctaaattcgtgatttaactaaatcaccaattccatgtgtgaacattgcaggttgccttttcaaaattggagacattagaagtcaagggcttggataacgtcgagtttttgtttttcccatccatgattaaatctctcgcacaactaagagatctacaagtttcttattgcaagaagatggaggcgatcattacggaggaagaagggttgggattggaaatatcagaaactccagcattcccaatgttaactagcttaaacttaaattatttggaaagtttgatgtgcttctctcgcaaaaagtgtaagattgaatttttgtttttatcactaaatatcttcctgtagatatgctcatccttgtaatacaaatggcaacattcttttcatccattgaaaaactcatgacaggttcacgagaagctcggagtcaggagcgcatcaaatcataccgcactacactcttcagtcaagaggtacgtgattaacactatgtcaaaatattatatataacaaaagtattaaatatgcaaaagacacagcatagccaacatacgaactaactaaataaggctttccattataagttattgttaagaaggaataaaactcgctcactaatcaaatttatgtccgcaatcattttccaagtaaagatgggggaaagattcattatactgtttagcaacgacactagtatggagattttcttactcctttttttttatgattctcttttttccccttttgtgtgacttaataatgcccctctcttcttggcacatgtatatattaacattttggaagttcctaaattcgtgatttaactaaatcaccaattccatgtgtgaacattgcaggttgcctttttgaaattggagacattagaagtcgagggcttggataacgtcgagtttttgttttccccatccatgattaaatctctcgcacaactgagagatctacgggtatcttcttgcaagaagatggaggcgatcattacggaggaagaagggttgggattggaaatatcagaaactctggtattcccaatgttaactagcttaaacttaaatgatttggaaagtttgatgtgcttctctcgcaaaaagtgtaagattgaatttttgtttttatcactaaatatcttcctgtagatatgttcatccttgcaatacaaatggcaacattcttttcatccattgaaaaactgatgacaggttcacgagaagcttggaatcaggagcgcatcaaagcataccgcactacactcttcattcaagaggtacctgattaacgttatgtcaaaatattatatataacaaaagtattaaatatgcaaaagacaaagcatagccaacataagaactaactaaataaggctttccattgtaagttattgttaagaaggaataaaactcgctcactagtcaaatttatgtccgcaatcattttccaagtaaagatcggggaaagattcattatactatttagcaacgacactagtatggagattttcttactccttttgtttttttttttattctcttttttccccttttgtgcgacttaataatgcccctgtcttcttggcacacgtatatattaatattttggaagttcctatgatttaattaaatcaccaaatccatgagtgaacattgcaggttgccttttcgaaattggagacattagaagtcaagggcttggataacgtcgagtttttgttttccccatccatgattaaatctctcttacaactgagagatctacgggtatctttttgcaagaagatggaggcgatcattacggaggaagaagggttgggattggaaatattagaaactctggcattcccaatgttaactagcttaaacttaaattatttggaaagtttgatgtgcttctctcgcaaaaagtgtaagattgaatttttgtttttatcactaaatatcttcctgtagatatgctcatccttataatacaaatggcaacattcttttcatccattgaaaaactcatgacaggttcacgagaagctcggagtcaggagcgcatcaaatcataccgcactacactcttcagtcaagaggtacgtgattaacactatgtcaaaatattatatataacaaaagtattaaatatgcaaaagacacagcatagccaacatacgaactaactaaataaggctttccattataagttattgttaagaaggaataaaactcgctcactaatcaaatttatgtccgcaatcattttccaagtaaagatcggggaaagattcattatactgtttagcaacgacactagtatggagattttcttactcctttttttttttatgattctcttttttccccttttgtgtgacttaatattgcccctctcttcttggcacatgtatatattaacattttggaagttcctaaattcgtgatttaactaaatcaccaattccatgtgtgaacattgcaggttgcctttttgaaattggagacattagaagtcgagggcttggataacgtcgagtttttgttttccccatccatgattaaatctctcgcacaactgagagatctacgggtatcttcttgcaagaagatggaggcgatcattacggaggaagaagggttgggattggaaatatcagaaactctggtattcccaatgttaactagcttaaacttaaatgatttggaaagtttgatgtgcttctctcgcaaaaagtgtaagattgaatttttgtttttatcactaaatatcttcctgtagatatgttcatccttgcaatacaaatggcaacattcttttcatccattgaaaaactgatgacaggttcacgagaagcttggaatcaggagcgcatcaaagcataccgcactacactcttcattcaagaggtacctgattaacgttatgtcaaaatattatatataacaaaagtattaaatatgcaaaagacaaagcatagccaacataagaactaactaaataaggctttccattgtaagttattgttaagaaggaataaaactcgctcactagtcaaatttatgtccgcaatcattttccaagtaaagatcggggaaagattcattatactgtttagcaacgacactagtatggagattttcttactcctctgtttttttttttttattctcattttttccccttttgtgtgacttaataatgcctctcttcttggcacacgtatatattaacattttgaaagttcctaaattcgtgatttaactaaatcaccaattccatgtgtgaacattgcaggttgccttttcaaaattggagacattagaagtcgagggcttggataacgtcgagtttttgttttccccatccatgattatatctctcgcacaactaagagatctacaagtttctttttgcagaagatggaggcgatcattacggaggaagaagggttgggattggaaatatcagaaactccagcattcccaatgttaactagcttaagcttaaattatttggaaagtttgatgtgcttctctcgcaaaaagtgtaagattgaatttttgtatttatcactaaatatcttcctgtagatatgttcatccttgtaatacaaatggcaacattcttttcatccattcaaaaactgatgacaggttcacgagaagctcggagtcaggagcgcatcaaatcataccgcactacactcttcattcaagaggtacctgattaacgttatgtcacaatattatatataacaaaagtattaaatatgccaaagacaaagcatagccaacataagaactaactaaataaggctttccattgtaagttattgttaagaaggagtaaaactcgctcactaatcaaatttatgtccgcaatcattttccaagtaaagatcggggaaagattcattatactgtttagcaacgacactagtatggagattttcttactccttttgttttttttttttttatttcattctcttttttccccttttgtgtgacttaataatgcccctctcttcttggcacatgtatatattaacatttcggaagttcctaaattcgtgatttaactaaatcaccaattccatgtgtgaacattgcaggttgcctttttgaaattggagacattagaagtcgagggcttggataacgtcgagtttttgttttccccatccatgattaaatctctcgcacaactgagagatctacgggtatcttcttgcaagaagatggaggcgatcattacgaaggaagaagggctggcattggaaatatcagaaactctggcattcccgatgttaactaaattagacttaaattgtttgaaaagtttgatgagcttctctcgcgaaaattgtaagattgattttttgttttcatcactaaagatcttcttgtggataaattcatccttgcaatacaaatggtgacattcttttcatccatcgaaaaacttatgataggttcacgagaagctcgaagtcaggaccgcatcaaatcttgctccactgcactcttcagtcaagaggtacatgattaacgttatgtcaaaatatcttagatataacaaaagtattaaatatgcaaaagaaaaagcatagccaaaataagaactaactaaataacttacaaagtgtactctggttaaaaatattttaaagaaaatgagtggtgtacaaacataagtattgagagttgccgacatgtatgagttgcatttttttaattttaatttctccagaaatagtttccataaagatggttaaacatctcttatggtacctacacaaagcatgaacgagtaatacgactgccaaacaagatctctaaaagctttttgatgttcataggaaactcaaagctcttagcaacctcgcatgtatggcattgacattgcacgcatgcacattgaaagcaatttaagaaacaatggagaggaaagtgatagtaatgttcaagaagctgtagatgaagggcctttaagatactcacttgacttcatttgctcttaaaagatcgccttttttgagcatatgaaggacgctttagtctcccttaattgcaccagcaaaaggtattgagccctctccgtcaccaaactgaacgagaatctagggtccagggcattcgaatcactcttttaagttttaacatgaattggaagaccaaagtgatcatttggtgacttctctaagtgcattgcaattccatttaattatttcatccatattgtaacttaaattaccgtttctaagtgatttaacaaaagccacgtatactagctatttcattcttgggttagcaaaaagaaaaaaaaagcacaaattgtgatttgattattctgggaaattgattcaattcaagagagggagtgatttcatttaaatttgagattatgagagataaatgtgattatatgatagttaaggagcatatccaaattaccattttgccattgtcaacaaaatccgatcagaattcccactttttgttttgtctgtagtaattccacaagtcttctagatcaacattcttttttttttttttggtcagagagtcgtcgacatatttatatggacatttgtgcaacttaagacagaatcaccaatttcatgatttcgaattttacatattgacactcatctatcatggaagttcatgactaactcaatcatcaattccgtgagcgaatatcgcaggttgcatttcctaaattggaggcattagatattag

SEQ ID NO: 9899 - DNA, 5092 bp, Eucalyptus grandis
  Intron number 1 from transcript Egrandis_v1_0.018145m (loc us Egrandis_v1_0.018070m.g) derived from phytozome v7.0 (c hr-ID scaffold_6; pos 37015911 to 37021002)
tctacttttgggaagccaaggtaaacaacaacaagacgcctgcttagaacgatcgcaacttgaaaaggaacatggaaactagaaacggtttacacccttagaatctatgtcggttaatgaatctccttctggcagagacaaaaccctctatttcctagaatctatggtcatgaagctggagggtgagtgaatctcagtaagactgtctaattattaaaaattcatggaactgatagcatttgatgaatctttgaatttgggtgagttaggatttttgagagcgtgggtgagggagtgactgatctgaaaccaggggatcatgtcctcccaattttcactggggaatgcaaggaatgtgcccactgcaaatcagaagagagcaacatgtgtgatctcctccggatcaacactgacaggggagtcatgcttagtgatgggaagtcgagattctccatcagaggacagcccatataccactttctagggacttcaacattcagcgagtacaccgtggttcatgtcggctgtgttgccaagatcaatccactcgctcctctggacaaagtttgtgtcatcagttgcgggatctcaactggtatgttaatgctcaatgcatcccagagaaataacaattgaccatctctattaaaaaattaataacgacaaagattgtggcttttaggcctgggagcaatggtgaacgtagcgaaaccacccaagggttcgacggtggctgttttcggattgggagctgttgggttagctgtaagtcctgcggtaatatagactttgatctttgagaatttgacaagcaaaaacttacgcatctcttgatgatggataggctgctgaaggtgcaaggattgcaggggcttcgagaattatcggagttgatttgaatccaaatagatttcaaggaggttattactcaatcccatgatgcatgacctctcactgctcgagactatactgatcatttttatagatctttcccaatattatactgaagtccttactcgacacaaactataatccaaatcaaaaagtcttgcaaggatagcgacattgcagtcgtaaaatttgtcatagataatattgagaaaaatgaagaagccataaaactagaaacttgactcgcggctttcaagcaaagacaatagatctagctaattgtcgcgactttcaatcagtgatcaaagtccttgctgaattcattttcttatttgctaaaaatggggcctatattactctctaataatgactctttctcaattgtctctcaacagcaaagaagtttggtgtgactgaattcgtgaacccgaaagaccacaacaaacctgttcaggaggtttttagtgaactgtctaaggaaatagaatccattcctccggtctatatcattcttaggtttccctcaaatattgattgcttaccaggtgattgttgagatgacaaatggaggagttgataggagtgtcgagtgcactggaaatgtcaacgccgtgatttctgcgttcgaatgtgtacacgatgtatgcacttttcttttggctatgcaagcaatttgcgagcgagaaacttacagactgtcctaattatatattacggattctaatgaattgagaaactcctaacaaggttggggagttgctgttcttgtgggagtgccccataaagatgctgtcttcaagactcatcctataaatctattgaattagaggtctctgaagggcacgttcttcggaaactacaaaccacgttcagacattccctccgtcgtagagaaatacatcaacaaagtaaaacaaactctgaactatagcaatcgaaagcatcaatttatctctctgttttttacttatgtcctgtatgaaattgatttcctagtcttaaatgttccaggagcttgaagtggagaagttcatcactcatcaggtcccattctcggagatcaacaaggcattcgactacatgcttgaaggcgaaagccttcgatgcatcattcgcatggaggagtaaagaagcggataaagaacccgatagcactgaaaagaaatagaagtaatgcgtgagagaattcgctgaacgagcgtgcttaagggtccaattcaaggttcttttggaatgttcttctgctgtcatccatgtacttttgagaataattgcatctggtttgtgatcttttagcctttgaaacttgactcgacttataatccgtaaaattccttgaatgtgcaaaattatcaacttggacttaattcgatgtttatcaacggttaattgaagtgatgattggattcaaaacattctcggaatcaaaaactgtagcgtgattcatcttgcaattataaatgaagaattgaagccttcatataaaccttctacaatagtcgtcacactttacctcttcgagagttctcttagaatcaagtattgaatatagaatttccatgagttaatgcatgagctgaatttccaaattaaggaacttttccatggcatcaccacactcagtgagattgttaggatagagttttcatgttctgcaattgatttgaaattcaaaatattataaatgatatgctggattaaattagagagcagatggtaatttagagtgacatgagacgcaatagagaataaagtgctcgatcttcaaattccttattgacttactggcatatgctaattattaactctttaatctataacatctgccctgtaacttttacatgaatacatagtcctccattcttctctactgcaaaagcgagtcaggtgcccattccattataaacatgaggcttcttagaaagacaaatcgatccaaagagtggtgtagtgttatctttgccaaagatatcccacaagtcttaacccagccaataaaactgcatacgagaaccccaattagttgaacttctcgacgttgttcaccgaactaaaaatatccgccatttgacttggatataatgctcggcattacaccaagtaagcagggtcctagaccaattgatcatagtgcctaactatatacaggcaaaatttcagcatactccggtccctaactacccttgcaatcctgaccatcttattcgcataccacgatcttgatcactgggtttagggttcatgacctcctactttgatacgattcttggcccttgagctctaataccacttgttaaattttagacacgcagctttgatacgacttgtggagtttgtggaaatgcgatacaattataacacccaaaaatctcactttaacattactcagaacaaactagctcctaccatactcagagcaaactaattcctactaacttttcatacaacttttttttattttactctccctcgtggacggactactctctttttctctatttgtgaagctctcccaatttaaggctctctctagccttcctctttcggtctctctatgtttctctcatctctctatgttacgacaaatgcgaatgggagcacctattgaggacgttgacaagttgcctagtcgctatggccaattttcccccaaggaattctagaggtggcgcacaagttgacaagttgcttgacaacttgtggccagattttccttcggaaaaatctagaggtgacagcttgaagaaaaatcaagaggagagagagaggaggcagtgcttctttgacaatttacagatcattcaaatctattgagggttgcggcagtggataagagaacactcatagaagacataaatccgatagtcatagctacttttagcacaagcgaatatactgtgtccgatgactgaaacaggataagagtattttccatttatccggtacagctattgcggtgagggtgaaaaataggttgatcagcaaaatagcttcataaaactgacactgcattttccccctttctggaaaaattaggaagttctaaatttaaataaataaaaaaggttaaggaagcttactgttagcgacaaatttattcaagacattcaaatcactcaggcgggccgttagctaaagagtggcccccaagtgatctgattgcacagtagacttgaaggggtctgatccgaaagagccgaggatattgtcgtgacaaaagaaagaaatagacagatgcaaaaatatcatcatgatcgtcaccgagtggattatcgtgcgggctttgtttgttctcagccagcagcatcttgactttatctgaagtttcattgtccatcatctttatcgcaaaaggagagagaagacccacttggcaatttcaacattttgatctgtcatgctgaagtaaatctacagtaaaaccagggaatttgatatctcgaactggtttcaacatcgcccgttgtatttttccttctcgtgacaaggctcattgaagtattcttccttctcgtgataaggcttattgaacaggtctaaataactgttcctagtaaaaggaactttcgcaatctttccccctttctttcttttctttttttttttttttgctaagaaggaaggttgcctctcctttagtttcgtgtatatatatccaccaaatgacactgcccatcaaagcaaaagctaaaggcttcagtttgattgtttttaggtatcagataaaacatattcctttcttctttgagaaaacaagatgtcaggcactgctggtcaggtgatacattgcagaggtacgcacttttcttctttaacgagaagctttttcttcatttaaatggaaacaaaaactaatctgctggagttttgtcatattttgatggcctaattcaagtgggttctctttgggtttctagctgctgttgcatgggaagcaggtaagcccttggtaattgaacaagtggaggtagcacctccacaagccatggaggttcgcttgaagatcctttatacctctctctgccacactgacgtctacttttgggaagccaaggtacacaacaacaaagcccctgctcaaaatgatcacaacttgaaagcaaacaagaaaactagaaactgtttacactcatagaatctatctatgtcggataatgagtctccttcctgcagggacaaaaccccctatttcccagaatct

SEQ ID NO: 9900 - DNA, 1424 bp, Eucalyptus grandis
  Intron number 1 from transcript Egrandis_v1_0.003996m (loc us Egrandis_v1_0.003898m.g) derived from phytozome v7.0 (c hr-ID scaffold_5; pos 60393150 to 60394573)
cgacgtgtcgcccctcctcgaagccgcctgcgcaggttagtccgtcgtcgtcgcgtttccatcccccctttgccctaatgctttgcttgcgatgcttacggaaacaatgccatctgggaagtggggatgatgtggaaaggtagcttttttggatgttgggtctagttattagtgacgttggtgccgtttgatgagtttggagttggaaggaagagggtcaatttgagtcaactccagagtgttatctctcggtgcacgctttgtgattcaatcttgtgcaactggggacgtcggtgctcgatgctttgccgacatggttattggatagcaggttataggggaaaaagggctcgtggtttcatttttcggtcttaatttgagttactgtggtgtgagcatcatcgaagtattggtcattgatatttgagtttgcagggttaggtcggtcagtctgttgagtaagcatcaatggaaagttgcactctgaaatatggagttttggtttggttgacttggtgggggaagagaagatcaagaagttgtcgatgtatgcttgttttccattgttaagaggctgtggggttgagcttttagcttaattgtgcctctctgcagcgaatggagaatggattctttaccctaggatatgtttgatgagggcgactattgaatttttttgtggccttttactgagtgttgtttgtagttgcatgagaactaattcagtgggggtcttaagttgaatgggagggaatctcttatcttcctccaccagagaagagattttagttgaaggcatgcattttgatattttttcttatgatttttcagttagtgtggaaggaaaggagtttgtaggtgtctcttttgtaaacagtagatggctacaagttcatttcacttggataaccggctgcattttaaggatgcatgctttgcatattagaatatcttcaaataatctgtgaggggggtggcttggcagccatttggtgccttatggtataattctttaacagaaggcaaacaacttgcttagtcttcataaaggcagattaacatacttgttagaacaagaagtgggctggtggataagacagctttaatgctgggaaaatttacattttaaacaggatagcataggcaggttttgcttccattgcttttggcagagaatattaaactgagaaagaatttctactgttttctttggttggtgtctttttcatttcctttgttgcggaattgagattctgtgatactaaatttatgaagcaactgattatggttgaatactaacccattctgtgttgaatttagaaaatggaatcttagatttcattcatgtccatcatcagtttttttttttacttttctaaatctatttgaatgggctgcagatcttcaagagggggaactcattc

SEQ ID NO: 9901 - DNA, 3855 bp, Eucalyptus grandis
  Intron number 2 from transcript Egrandis_v1_0.033650m (loc us Egrandis_v1_0.033650m.g) derived from phytozome v7.0 (c hr-ID scaffold_3; pos 54432570 to 54436424)
ttggaaattaaggcaagcttcaaaactgtatttattccactctaatatgcaggacaagaaatatactgagcttctctaggttgtttggaaagagatggaactcatcattgcattcacttgtggaaagaatttacaagcatttaaataactatttcatatttccatcctttgctaacggtgaggattgtttaacaaaagaagaaatgccacaactatttcatggtcatctgcatatgaatctaaaagatatacagatgatcattctctctcaaggcattgagctcttccacttttgcgccatcagccatgacaattgtgcttcctctcttgccaaactttttgtctgcacccaccaaattaagtaaaacaacactaagtcaaatttgtcatagagggaggcatttagaactgaaaggatgtaaagagaaaagtgatcttatgtaacaatcgcttaacagactgtttgactctgtgtactaccaaaaaaatagtaagagcacacaaagttacccttatagcagctggcagcacatcgttaatgatcatcctttgtgcaagcatgtgtgcggggatgtgtacttgtgcttttcatgaatttatatggacatgtgtgtgcatttgaagtgtgaaatatacaagcgcttctaataatgatttgagcagattaattcattgtaatatgttgatggctctgctgtttaaagccattaagttcaacagaatttgcatatttatgtcttccattgctgttgcttgattttctggggaactctatgtttcgcattacatgaaaatgacttgattttcaataaaaatagtagaatatgttcataatacctgctattttgagaaggtcttctatggagtcgggtagatgtatcagtttccctgtcatgttgccttccaatgtactttcatcgggatgatggtcgtgtataattacccttactggaaatgtacttggtaaagtagtggagggtggtggtgcttctgcgaaatgcacgcataagattttatgacaggataataaatataaagaagtggttattcatgtggcgtggtcaaaattataactgaggcttggcatggctcactgatgtgatgtgtaaatatgtcttggaggtgcaaataagtttatttagcataagaaatggaagtagagagtaagagtaataattgttttctccacacacccgataaagaaccgattaaaagaacattggctcctgaaaaagatcttggtagccaatttttctttaagctaacactgaacttaaatatatcactttaatgaagcccaccataggttgggtttccctcagatcccaacctttggacataaaacacatttggacttatacaaatcttactaaaactgcttgttttttcatcagaagcttgtgatttagtttttgatgcagcaagtaggggaaaacagtttttaattgttggtaccaagaataaagcagctgattcagtagcatgggctgcaataagggctcgatgtcattatgttaataaaaagtggctcggtggtatgttaacaaattggtccactacagaaatgagacttcataagttcagggacttgagaacggaacaaaaggcggggagactcaatcttcttccgaaaagagatgcagctatgttgaagagacaattatctcacttgcaaacatatctgggcgggattaaatatatgacggggttacctgatattgtaattatcaggttcagattcaattacacaagaaaactagtgatgctgtagattgaaatcatagtaattagtagcttgcagaaaactaagttatgagagagaagatgcaactgtcttgcttgatgttggcgctgtgaaaatgcaactgtatctatgaaacttatatttacctatggtgaatagatgtagcatgtaggctctgattgaaatatcacccaaactatctaatcttcttgatcaccaaagccctaaaagtcacatgcagtcggagggacttgggtctatagtaccgtgttttttcacaataagattgttttctactagggattcaaggatcccgttaatgttaaagaaagaatatgttgaacagggacttgagtgagccctgccacagcaggaagttggtacttttggagtttggttctaagacatgataacttgtggctatttccagatggcataatgctgatattattgttttgggtgagagaagctaccatttccatttgcatctccattagcattggcagcattctcgagttcttcatttgataacatttgctgccaaagaagagaagaataacaagaatatcaatcatcacaacccctgtttttcccattagctgctggtttacattgtaatggtaataaattacgaatgttctttaccatgtattgcttgcattggctactttttacctgcttaagtggactttgaatttcatcgaggaaactaaatctatcaaaatattgcttagttcaggagatgtacctctatgttcacatcacccagagattctgtcagaaattctatttcctttagcacttctggtttcaggcctttcagatactgattacggaaaaggaaacaaaaaaataaaattaacatacacactgagtgatttttatgtaatgataaggaagaaagaagtcaggatagccaacaaactagaaacaaataggtttagtttagccgaagaaaagttctgatatcaactgtaaattggcaatatctgaggtggaaattcttctttttcttttaaattataatatttaacttttatggcatgcttcgatctcaaatttctgatggcccccttttttttattacttttgacaatgatttagctgttatttcgcttcagattagtcaagtgaaagtagaaacaattttgtgaacctgaacaaagttggtaataattatcttcccatctttgctatgtggctgcaccagttgcttgaagtggtgatggctaatccggatgacttgagagagcctttttgtccttactgtaaatggttgagggatattaaaaattaccccaatctctcccaccatttcggaggagcctaattttgtcagaggttgctgcaatgacgttatattaagaagttaagttacaatgtagaaagtttaagatgtataggagtaaaaaggtgaaaacttagcatataagtgtatgtgtatatgtgcatatttcatatgtatgtacaatgtataatatagtatcaccaggagctccagcaaccatcaagggatcaaaatttaatctcttgagagtttcagcataagaaagattaactaatgcaaaaatgggatatgatattcgaactagatgaacttttgctgatcatacctgctccattccatttttgtatgccaaaacatcctgcaatccaggatactgttaagacttggccacatgatttacttgcataatacgggcaattaaggagaaattttaccactgctccagatactactatgtagaagtctgttggaatttcattttgcaagatgatctcaaccttaggtggaaaatactccgctttcatctcagatacctgttgtaaaaaattcaatgacttaattctaaggtattgtctgttgaaacaaatgattgacatctcgcagttgaactaatttctgtggaaaagacatcaacatagtttacctgcctactctttgaccatattaaaaccacagaattttagacactaggagaaaataatgttgcatttagccctcagttatggcaagagtacctattatctgagacggggtgcgcatgaacttttaacaaaaattttggggacaagaaaaactgattaatcttttaatgataggtccagag

SEQ ID NO: 9902 - DNA, 3956 bp, Eucalyptus grandis
  Intron number 2 from transcript Egrandis_v1_0.021439m (loc us Egrandis_v1_0.021439m.g) derived from phytozome v7.0 (c hr-ID scaffold_7; pos 36826052 to 36830007 reverse strand)
acggtaagttcatcaggaatgtcctcagagagtagtaaccttttcaacttcagtggttgcttatgatgtgcttggatgttgtcagtgtttggacttggtgtctttgctggcataatcttgttgatgcacttatgtacttgtcaaagcaaaatgttagattatttgcgtttcatgtgtggggaatcaagcctatgtcatgcacctaaaccccactcattacccaaattttccctaagagcaaggcagacttttataatcaagtaataaaaaattcagctgatattatgttcttcttgtgcatgcactcggaggcttggattgtctcagtgcataatgtttcttcaaataccttcttagagtccactattgtttttcctacttttgttactgtcactgggacatacatgcaacttctgtcatgggatgatctctccttctttatgtcaaattcaatggagtgttgttttagtcagttaagcagtaaaacatataaaacttggcctgatgttgaggtcatttgcttcggttaaagagtgaatccaatcatgctcctttgcctaacttttatgactttcattactaggaagtcaatgcaatatttctgcaaattcatacttggcttagcttctgatgtaattttctcctgcatgatatgcaaggacagtccataacaataaaatttgtgcgtgtttattgggctaagtttggaaactaaaccacactcattactgaaattttccctaacaacaagtcagacttctatgatcaagtcatcagaattcagctgatttagatgttcttgtgcatgaacttggaggcttggattgtctcagcagattaatgtttcttgaaatgcctccttggagtccacaatcgatttccaattcatactcatgtcattgtaactgggatatatatgtgacttctgtcatgtgatggtcttgccttctttacttccaatttaatgagtgttgttcttagtcaactgaagagtaagaaaaataatgcttgggctgatgttgaggtcagttgcttaggttgaggagtcaatccacttgtgctcctttatctaactttgataactttccctaggaggtcaataaaatatttctgcaaattcaaatgcttagcttctgatgtaatctcatccggcacaatatgcaaggagagtccattacaattgtggaaactagtggtggcaagcttacttgttatcttgatggtcattccttgtttaaattgattgtgatgacaaattttatatgttctattctcatactgaatgaatgaaagtagtatggtgtcgttaaaatccattagatttatcttttaaaggaaaaaaggaaatcattgaaaactattgttaaggattgagatgacttgatagctcattgggagttgtaaacatggttgcttctcataccaaaaagtccttgagctgcctcctgtttgatcgggttttttgctccttgcttttataatatgatctctttcctggaccttctggtaacatgctaatcaatagaagagctcaccatagtattggagaaaatgtttctgaattttaaggccatctggaatctcataatgatctagtgttacatgaatgaaacttcatcttgataatatgatagatggaaattgctttgcctgattatgctggtgcttttagttcatgaaactcactttgtctccttttcttttttgagaaattttcttttctttactaatcttccttgatatcttgaagccacagaatcttgtaggagaatttgcactacttggagcaatagatgtaaacttgaataattgcttcagcattttattactgggtttttacgagaaaagcatcagttgtatttgttattttttttgctactaaaccagtcttgcttcctgaaatgtgtccataccattttatattctatcagaaggaaaattacactgaaagggtactgaggcatgccaacatgtgtatgaaatcacttaactagctacaagataatagaagaaccgtggaaactgcaatccatacatggcttatgctccattgaagcataagggttgatggtcactctttcatggttattgccaagagcttctatttcttctctcctgcttaagttgaacccagaaaaggaaacgaggaacgaaaagtaacttctctcattaaagagaatgtgaaattttctgtgctccgtcatcttgacaatcacgtttgtgtcccacatgttcatgaagttgttgctacctctgctcgcattcaatgtaataacaaataatagaaaattaggtgttgtctagctacccctgactaggttgagttagaaggatatattttacaaattacaagtgctctatcacattgttggagtgtcagttggtagatgccaagcctcttttggccaaggtagtatgttggaagactttgttattctccatacttcagccaaagcaaagaataaagtgttacagacttcattttcgcattgcttctattgactgattaacctacaaattttttagccattttgagaattcactttgtcatatctaagatattcctatttaaaccttctatagatgtttgttcatagttataagcatgtatatatatttaccctgtctttgactattatacgtatttgggaattattagcctatccaatttctgtttggttgatatataaatcttctcctctcaagattgtgagagtaacatcattagttgcttagatttactttttggctctgaatgtttggtaacacaattattccggtcatatgtttcatcaatttatttgaaaacatttgaaactttgttcaatgatcaacagaagttttataattgaaagagtaatcattaggaaaaaaaaaaaaaaaaaaaacggaaactggtgctatacacctgcaaaagaggaatttgctgggcaactttttaagtgagaggaccctaagatattgtcaatcttgcacagaagaatcaattgccagagttatctacagaagactctcaagtctatatcaccccaaactttcatatttgtcttgattaaaactgacgtcactcaccaacatgaggataaagatgtgcacccccttggtaccttttcaatttaattttgtttttattgaccaacatggcaagaaagggggtgggggtaggaaggcctatgttacaatttttcaatgggcacaagctgagatgtctcttatagcccctattagtttaaaaagctaattgatgacacagtctgagaaattccagtttgtactagggcagtggacagactgttgtactgcttctcttgcaggtgatattataatattctgattgcttaaattgactggcactccctcctatgtcctcttatgttttgaaatcttgtgcttgaaagtgcacttgttaagaaagtaagttgattgtgttggagtaggtggtgaggttgcacatatgggctgagaactaggtctatttattacttacccatttttctccctagtcgatcgaagttctgaagataaatcaacagaaggttggggatttttccaagcaagctttatatatgttattttattatcgaaccttttctgaacaaagttggctgataatatatgaaatggtggccacagtgtgggattgttggaggaggtaatggttgttagattaaggaaacatgggatgttcttacgaaaatacttcctcatgttaagcttgggctacaagaccttcttggctcttttgacttgctttgcagcttgaactaactggtttgatgaactgaccggtaatatgacctttggcatgctgaagcatactcaattatttcatactaattataagacttgtatatttatatcctttcatgaggataaatcagaagattcattgatctgacttatgctgtggaattgctgcagaggaagcgaaggaaacctgaagaacacaatctagg

SEQ ID NO: 9903 - DNA, 1329 bp, Eucalyptus grandis
  Intron number 7 from transcript Egrandis_v1_0.007156m (loc us Egrandis_v1_0.005735m.g) derived from phytozome v7.0 (c hr-ID scaffold_2; pos 53226109 to 53227437)
aagtaagcttccttgtgtgcaacttatccttgtttgtagaaatcttttctctaaatagtaagcacgttatgagaaattgttatgtttgttaccaccaatctcatgatgatagtgtgtgaaaaatcatggggtagatacatgcagtacagaatttgttttcatttggtgtacagacatgcatgcaaaactatccatattgcatttggcatttgtttcccttgacgaacaaactgcaaattgttacctagcgtattgtgcatcaacctgagaggcatctgtgattgctgaaattcgcgcaggaacatacacttccaatttgaaagggaatattcaaacacatatttactctgactctgagaaatgcactggagtatcaatgtgtaccatgcatgtgaattgagaactacataaagaagcataattagtacaatggaaattgcactcatggttattagttgctcacaagctggaaaaaagtattgtttatatcattagcactttccaattagctcttggttagaaattatctgcatgtgttgcatggtaccttcatgtagtgagagggaaaatttatttaatggataaaatgctagtttgaagggctttgctttttcacctcttgattcagtcgttttagggacttagtgactcaagtgtgccttttacgacactggtctaaacaactggttctgttctagtggtaatttgaggttaatcaaggttttccatgtaatattctgtgtttgttaactattggaagagtagtttatttttttggctgaaagaagagtagaattagcttgtgtttaacccaaccacaggcagcgcagttggtgtgcgttctcccttccatcgcagaggtcgggggttcgagccctctcgttgctaaagtgtcttaagtgggggtcctggtgttggggtcttgggctagcctcccccgaggtattgacgcttggtccggagtgcaccacgcactctacgggccgtgggctgcccggcgggcctggcggatcctcagttaccaaaaaacaataaaattagcttgtgtatagatttagtggaaagcttaaaatcagatataaacttgtggaactaggggatggaaaatgtaatctattgtctatatctggaagtctactaccctgatatttcccataatgacatctctattaatatgtgtaagtctatatagttgctcacaaaagagaatcttaaagcttattttccttgtcttttatgcatcttttattcctataaatgacacttgatcttcttttcttgtttgatgagctaggtcaatttttgacttccaggcgatccgaaagctgc

SEQ ID NO: 9904 - DNA, 4620 bp, Eucalyptus grandis
  Intron number 9 from transcript Egrandis_v1_0.045895m (loc us Egrandis_v1_0.045895m.g) derived from phytozome v7.0 (c hr-ID scaffold_4; pos 4060644 to 4065263 reverse strand)
gtggatttgcaactaagctggtaataactcgaacttgcttttttggaaaagcaactgagtttattttatttttccttctgaattcttggccgaaaattattgctctttgcctcccttttgccttattgacaattttcatttggcaattcttccacgatctcttcattagttgggggaatgtggatagatcaaattgtgaggaaaatatcaagagacaattggttttcaacatactaatgcctgtggttataacatttgtcttgttcattagatagatggttgatccatttagtcagcttggaataggtgtgttgacgcctaaaattaggctttattattattttgtttatttaattttcggataataaaccaaaaaaagaaacgaaaaaagaaaagcgaaagcggaaaggcagccccctctccccgcgtgggccttggcccattgtcgcctcaagcccggccccctccgcgtcatcttcttcctcgcgccactgaggagcacgcgcgagcaggcgcgacgccggagaagcttgagcagacggcgatcgcgtgcggagcagaggagcagttggcgttgacgggacgtgactggaggaggcgatgatggcggatgggacggcggtccaaccggcgggtcgaagcctcgccgaccggccgctcccgcgcctataaataggccctccatcctcgacgaagggagacacggcagagaggacatcaccgacggtaaagcttcgacagcttcccctgagagactttaggggaggcccgaagacgagccgccggagatcttgagtctcgccggagggaggagtagagagcggacaccgagatcgcgaagagagagagggagccagattgagtcgcaacccttggacaccccactgagagacttcaggggggccgagggctcgcgacctctgatctgagccccgccagacggacagggagaggaaaaggaggaagaaagagagaggcggccgaagctcggggtccctgagagacttcggggagctcgagtgcaggccggccgtggtgtggtgagctcggaggggtccccgagagacttcggggagcttgacgagcgaacccgagagagagagagagtgagccccggccagatctggccaaacccaggcctcaccgtcgttgcccgccgcagcccccaccgtcgcaaatcgcccccctgccgtcgtcgtcgtagcccccgttcaagaaaaggtaaagagctcgtagctgtcgtccctgccattcatcgtagcccctttccgtcgccgtcgccgtcgccgcatttgggaaaccctagggttcccgatttttcgggtcgcgaccccgggtagacgggtcggacccggatcgggaaccgggtagggatcccgcagattacgggggcggcggaaattcgggtcgcgagtcggagccgggtcgggtagggtttcgccgaagggagcgggttgtcgggccgggtcgtcgggccgggccgggtgtccccgaacgcccggccacgacgccgtttcatttataaaaaaaaaaagaaaggaaaaaagccgaaaaatccgagtcgggcccgcgttgcgggcccgtccgcatttgggtcgccgacccgggtcggacccaacccgcggatccgacccgggccggttttgttttattattttaatataaaatatttttctaataaataataaataaataatttattttcaaaaaaaaatcaaaaatgttttaatttccagaaaatcaaaaaaatatttaaaaaatgttgaaaaatgttttattttctaaaaaaatcgagaaaaatcaaaaacaatttattttccgaaaatattttaaaaaaatattaaaaaatattttattttccgaaaaataaaaaaaaatcaaaaatatttcgtattttccaaaaaaagccaaaaatccaaaaaaagggtcaaaatttcatgaaaaagtcaaaaaaattgagaaaaagctaaaaagacttgtatttttccaaaaataccaaaaaatcccaaaaaaatcctttttgtgtcaaaaaaattagaaaatgactcaaaaaatgtttttcctcccaaaaatgtatggaaaatccctcgaacatccaaaaaacctcagggtttaaacaagattaggtaccgaaagggcattagtgattaactagtgtaatcaagttcccgatcctaatttctctggttgcgcaggagtgagtatttctcccgatacttcacttgggtttctaatcaacccaccccaaatcgattagtggcgactccaatttaaaaattgatttacaggttaaaaactcagaccattaagtcgtgaattggtggacttgggagagtccaggcttaattaaattcagccgaaccattagcctccttaggcgctcgtacccgattgcgggtgccgaaaaaagaggtcgcgacaaggtgaaagagagtatgttcggagcctggcataaaaatacaagttcagcaagtattgcgggcatactgtacaaaaacattttattatgacttaatcatttggctaaaattgtctcacttcagattttttgttgggttaatatcatgaaaatttttgaactggtacatatgtgacaaatttacctcaactaattttttgattgccaaaaaccccaaactgatatatctctgataaatttaccttccattagttttcgttaaattttaccgtcaaatttctgagttggatgacatatgattgttgatgggtatatcggttttgttttatccttcgtttatcataggtctactaatttgtgattttttgtggtactattcaatttaattaaaactaataatgggtaaatttgttacaaatgtaccagtttagggtttttggtgtatcggtttggagtttcggtagtcaaaaaattagtttggaatatatttatcacgaatgtactagttttgggtttttcgtttcattaacccttttttgtgtgggtgtgattgatattctcaacgtaattaccaaatagtaaagagctatccaacttacaatgacatcaaacaaaatgatgttcaagaagaaaggatttgaaatctgaatcttcacaatgcattgaattctctacaccttcctttcccctgttgtctggccctctctttctcactcaagcctataagctgagaatgtgtgacctgactgtatatgcatgcatatatttccattgttgttcttgatttactcaaagttacttgaataggctggctttcattgtctgaaacacagaacatggtggactagctaacagaaccttaagtcattcgcaataggaatttatgcaagaaaaacgttgatggaaaattttctttgcacatgattaatgatagtgacgtgtgtactttgagattcctactatgataatgcatgcttatcatactcagaagggtgcttgctcaaaggaaactttcttctgacagcatctgctatagaactccgtaaaaacttccaatgcgtgacaaaatcccctatctacttcctcctggcagcaatctgttgttctctgcattctccgtattttagattcctttgttagaggtctaatgtgaaatctattattctctacatatgcttccttaaagccagcatgtttaggtcttttgtttcatctataacaggcaatatgaaagcaatttattgatttccctccttagtttgtttctgttggaaattgtgatccattttctctaaaactttctagaaacttcaagattgatattagctagaaaagtcaaggaaaatccttaagaaaatctagcttaggtggccaagaaaatgtagaagtctctagaagaactacaatctagaattacctagatgaaactggacaacattctatagaaatctagaatgttgtactaaggtgtgactcatgcctataaataggcttgtagttcattcatttgtgtgcgtgaggtttagacctccacgtgtggaggagtaaagttaagatggtttatatgtcatgaaatactcctccattatatcaaaatatcctgtactatccatttccatcaactagataaattatatcccatgttctttgtccttcaattatcctatctcatcccttgtccatcctctacaaactaaaccatacacttgcacacatcactaacaaaaaactatcatcaataccaaaatcatatttccacgcacatttaaattttgacagtttccttctctcttcattaaaaatatagcataagccttctgctggaatggtgaagggactaataagggtccctatctttgtacggcttattatatcattaaattctacctggcttctactaagtatatgcagtcgattgctctgcagttgttctgctattacatttattcatgtagttgcatgagcagttgggcctagtggcatgacccagcttctgtagactggaaagtaggacacactctacaccagccaaatgtaaagagaagaaacactagagcaattagaagaatcttctatgatgagggagttctctttgtgatatgtttctgtgtatgcgcaattttttgaaataaaatataaatcattgaattcctatctgagatgcaggctaaggatttaaatcttgcgaaatcatcagctga

SEQ ID NO: 9905 - DNA, 1468 bp, Eucalyptus grandis
  Intron number 7 from transcript Egrandis_v1_0.006713m (loc us Egrandis_v1_0.006713m.g) derived from phytozome v7.0 (c hr-ID scaffold_7; pos 25690900 to 25692367 reverse strand)
tgcggtcatcgtctttgcgaagagctgcattaagggtatgatgtctttacgcttgcctcaaagctcttcttggactgaagtgttgcacttttattcttgtttgaagtcgagtagtctcataaagttgcttgttgcttcaatgttctccaaaattaaattttagaaagaagagttaaacttcaataagggcctcttttggaggcttcattaatataaagcattgttagaaagctctgatgaatgcatgcctgttgatgatgtcttctgacgactacttcctacgctgcaaaaagtggctgctttggccagggatttttaagtgactcagatgtgtgcattcacacccttgcgtgtgtgtgtgcgcatttgtcaatatcctctttttcaattaaaaaataaatgattaggaaaacagcagcttgcaacattgatagatcatctggctcaatgagagctgttttgacatcattatgatttattcgcatttcaaaacttagaagggtacgacatcatgaagaaaatgaactcacatcatgagtcagtacaattgcaggctatctttaccttgacttactttgtgttctgatattcagacaattggagtagcacttcaccttgattttgttagtgccatgatatactatctattcaaatcactttggaaattctcatctaaattaaatacattgatactgcttgttatgatctatctgatgagatagggaaggataatttgggtggtttacaaattattgagtttttaagggtgacccacagcaatgcatttggatttgatcatcgactatgataggtcaatgaatgcagctctttctactgccttactgtcactcttttgggctgaatgttttgacaactttaaagcagagcaagatattattgcctcaagtaccatctttgccccactcagtttagcacattcaaagtagtgctgtcatttagtggttccgtgtttaattcaacttcatgctgagaaagtgcaagcttgaacaacaatacttgtgttacatattccattgtcccatttctttgaaagcatttcctctgtaatctgtttgaactgtttcgatgcttgaaagttttgtctaatctgggaattggagaggctttggatgaagagcctcacaaattccctcgggtcccattaaattgtgcagcaggattcttcagtttctcagctgataactaattaagaaactgaatgtgtaagtagtgcatatttcacagcttctaagcttgaattcttcgtagataaagagagagaaagcttgaattcttgagcttaaattttaagacctgatttagagtggacttctagcaacatcttaaattcagatgcacaatgaatgttacaatttcaaggtttcagtgtttgctatttgttcaactaaatttctctgaattacattcgatatatcattgcaggcgttagcaaagacattgacagtag

SEQ ID NO: 9906 - DNA, 3148 bp, Eucalyptus grandis
  Intron number 1 from transcript Egrandis_v1_0.029816m (loc us Egrandis_v1_0.023896m.g) derived from phytozome v7.0 (c hr-ID scaffold_11; pos 3653335 to 3656482)
ggagcccatcaacttggcaggtcagttctttctctctctttccgtgtgggtgattgtatcatttttctatagcggcgtgaagctccttcagtagattttctctgcatctcttaaaattttttgtaattatgactagatacttccatgatatcataacatgaccctgtcagttttggactgcaatgtgcataagtagcactcactctttaactttttacgtaatgagtccatcatttcaaaagaaatgttctaacatatgcctacctatgtggcccaattgaggacatccgcggcatgtccgccatggatgtgctctatgaaatgtgtgtatttcttgttgaatcaaacagaactataggggttccatgcgatcctcatcactccaataagctgggacacttgaaatgttgagtctggttgtttgcttttgaagggctgtggctttgggacattcggtttagtttgaatttgggctggtggtcttttctttgagctggttgtacttggggttgggctgatcttgtgatatcgtacatcgctcagtttgtttgggctttgtggtgtttcttggatggggccgattgtattgggtgaaattgtattgatttgaaaaacattttcttgagtatatagaaaatgtcatgtctttagacccaaaaaaaaaaaaaaattctaaatatttttcattgacgatatggtggtgatcagtttctaagtggattgatttccaatttgaaattggggattggatcgaacagggctaattaagaaccgaccccgttcgtccttgaatcaacaatgttaaatggtttatactataaaaaataaaacaaatgtgtgtgtatatatattttttgggccggttttgttggttcggtctagttggtaaagttcctctttagcaattgagaagtggactaattctcgagttggatcaaaaccttgcacatgcacactatagttgaagatcatttttaagaaaatgtttccaaaactcttttaattttcaatgttagcattgattgggtttgtattaggtggggttgggtttatgtgcttttttggcttgtaccgggatgtttgtccccatatccactaatccaaaggaaaaaaaaaggaaagacaatcttaagatagcacttgaatgttctcctaacatcatggacggtctccttcatcaccccccctccttcttctggaaactacattataatctttcgatatcatagattcaaattagatatagatagaaaattagatcggggtgctcagaatagaacagaatttcccccagtttcctcgggagataaaaaaatcattccgtggcggggcaagcgcacgtgcctatcgcacctgccccctctcctctcgacacacctgcccacttccctcggtttccgtttccgttcccgagcctcccgaggcaagctcggcacccgaacctccggttcgggagctcccgcctctcaacggcctagatttcgtctcgcccaacgcccaaacacgctgccggatgtgttactcgtccttgtaaaacccgccattggaagaagccgaggcgcacgaaagacagacgctctctctctctctctctcctcttttcttggcggagatccatggcggcagatcacgcaggagacgcggagccctcgctgatggagaagaacaccgagaagatccacgtccccgacccgccctccgcctcctcctcctccgattcggacgacgacaagccctccgtcgtcgattccgcgaaatcgaaagtctacaggctcttcggcagggagaagcccgtccacaaggtcctcggcggcggcaaacgtaatctctctctccctccctccctcgatggatttggatgagtgcgttgttaggttcgcggattcggaattttctctctattcgaatcgcgtaatgtagctgacttgcggagagaggaatcgcggattcgataggaatggagtcgagttggtgtcggggtaggtcggggcgagaccgcacgcgggaaatgagtgcgatgagattgtcgccagtccgagtttgtaagcgtcgattgattttttatttcttgcgtctggatgacgttatacctgcagaggaaaagattagaaaatgtttgaggcccgagatgagtttttttttgctttggttgaataactggtgttcgattggtggtggaatgtagcgtgacattgttatttggtagtatatgattgaagagggaggaatggatcgaacggggtgtagatcgcgatgcttccttgtgtatatgactgtttcgtggcttgttggtcgagcggattgaccatatgcagttaggcacgggcatgacggtatccatatgatatttgtagatgccacttaaaagttgaatgttgcttagttggcaacaaaatgtggcataccacaccgaggcagggttagtgattacatttgggttataggtgatccaaattgtttttttttttttctttggattttttattgtttggtttttaactcagtcgatttttcttgaagagtttgctttttccattactaaggtttatttccttgagagttccccttgctctatgtcagtgtagtagggatcatctcagacaaagcatcgatgtatgttgtacttcctgatatgggttatataatatatgaagataaaaaattgtcggaccacaattttttagccctgccctcctacccatagaaaaggaggaacaaaaagatgaagaccttattttccaaagttacattttacttcccaagccaaattagaaattctgtggcctttctggattaattttaacattttacctttcgcttaatcataatctcgtggcccacgtacttcggttcttttacaactgaaacacttgaaactttcacaaaatgcacatgttgatatgtaggttcacatagaataattggatatttatttgaaatttgagtaatattatattttgcgtttgcttgctcataagctgaaacaagaagacccttagactacagtcatagtgaatttcttaagttatcctcccattagggcaaaagccgaaaatatctcgtttctctgcatggctaaattatcctcttttaatgggcttcctttattgcagctgctgatattttcctttggagggacaagaaagtc

SEQ ID NO: 9907 - DNA, 2446 bp, Eucalyptus grandis
  Intron number 6 from transcript Egrandis_v1_0.007596m (loc us Egrandis_v1_0.007596m.g) derived from phytozome v7.0 (c hr-ID scaffold_9; pos 38540818 to 38543263 reverse strand)
aattccatcctgaaggtatctagtttcaactctgcgtgtttatttttgctgccactgtgcttggtcattaatatcccaattaggatcttgttatctaaaatttaacgtattactcagatctagtaggatattgatttgttaggctaatgtgagagtctgatcctaattaatgaaatgaacgtcagcactatgtaagtatgtatctaacccccccccccccccccacccgtaaaatcctgataaccttagatttgtttgttgtttccaccatcttctcgagagagtatacccaacttgcaatatccagccccagcagactgaattataagggaaatcatcatattttagggagaaatgagcatgaagtgattctataaattataagcttctaaaagcaacatagtattattttaggttcttctcattttcatggttgtttagcttagtataaacttgtaaagtgaatataacaattattaattttaggagtgtgctcattccctcggtgagtttttcccgatgtttttctcagtaactccatgactaaatcctcagattgaatactccatagaagtccaggctccatctagaatccaatttatgctcactcctcccatcatcgccttgttatgaagcttcactttgtttgtggaacagttgagtctccaatgatgagtaatctgtcttgcaacggaccaatagagtaaagtaggtagtgtcaagggtgcatttcgcaaacaggtcatatccatctatgctgtctctttcctattgttctcaattgcaagacagctcgccgattggtgatctaggagaacaaagatatgatctacgaggcgagtcatcaggacttggtatgagtatttaaccaattaaagtgagagcagctgcaatagagcagggacagcaaataccaagctccgattctataatagatggatgaggtcctgaataaggttttgcagaaagagggggcctgtttttagaagagccaactttagagctgaagtcgacatttaaaagaagagtttttaggtctcatgcaccgattttctcatcatcacctatacagtgtcttcgtaagtaattatgcctaagtctgattttttctatgtttaacaaatcacattgaatgatcgattactctccggaaatgatactctgcttaatttgaggagatacttaggtatacaaacctcactcataaaggaattgaaatgcacctaggcctgatagaccattatgatgtccaccttcattgccatcttgataaattaaggagatgttcctcctaaccttgggggaacagacccctctttgaccgcatctccttcactcaacatacctttgataggcagactgataccgggctgcaagttattcgtttctccaacatatatacgactaagatgaataaaattaagatatgactggacattcctataatcgagcttatgaaatgtcctagataaataactttgaagctcctactgatgttgctagcagcaacatgtctcatcacttcaactgctgaagttattctactagatccacaaaaactctgagcatttcctgaacctctggccttttgtgtttctggacaagatccatatagagttccattaagttgatgtctgaaagttagcatataaaatcctactataccctagaatccccaattactgaatggattcttgaagcacttcatcgagatactctttttgtgacatggtttgacagggaagactgggactggtgacatttttctatattcatgtccagagcatcgtagtagacttatgttcatccatgtcacattgcggcattaggaagcaagcaggttataaaagtatccccaaggttaattatatgcatcaatagataaagttcaagttctatccaactagtacaccgtaattttttggtatgatcaaaatagaagaacaatgtctaatgctatggtcccattattaagtatttatttcaataggaaagcataatgttaagttagtactcgtagatgtatccgggaaaagatttttggggaggtcttttgggtggagatgtactaaacgtcacttccttgttagacaccaatctcactaacattccgcctgaatcatgctcaaactctatcaaagttttcagagggtcattttctcagaaattattcgctcaggcgctttcctcaaagtgaaaagatatgggagaacaattgacatccaagtaggttgtcctttgatgatgttgggaggcttgacattataaaaggagctccttgttcaaatattggcctctggcacactattgtcttgtttcggttgaatgaccaatgattagagattgtcaatcattttaaaagggtttcgcttgtgattgccttggtttcatttttctgcgagttaacctcaagtttttcctttgacaggcgggagaacagaaagcg

SEQ ID NO: 9908 - DNA, 786 bp, Eucalyptus grandis
  Intron number 24 from transcript Egrandis_v1_0.000005m (lo cus Egrandis_v1_0.000004m.g) derived from phytozome v7.0 ( chr-ID scaffold_9; pos 34047930 to 34048715 reverse strand )
ggttcatctgtagggtctcatttaagacaggtatgcctctcatagtttcttctgttcattttgacacttttctgtacacaatttctagatctcatattccgtgttgaagaacttgtttttccttcctgctgataattgtcttgtgatgtgatggcttctctttgtttttaatgatttctcattgaaattctgtgagctgctcctgatgttgagttgagttatttcctgggtatcaacttggggttaggttcttatcttccttttaaaatatctgaagcctaaaataatttgatggggatgaaatatttggttgtaattatgtaaggaataagtaccctaaggttgaagattccactgaggtggtaaagtctttgattggttgttgcagggcctgatcattgtgttgttgcgaataccaactgtttgaaggttctttgttaattaggtgttagtttgtaagatgttccagagtcctggaattacattctacctatatcagatttgtagttttcattcttaaatggttgagagagagttaaagtgcaccatgttttaaggcttgtttttctgatattactacaattgtcttcacccttgtgcaatgtataaaaatgggcttccacttaggatttgttgctttgtgatagctctctcaatgtggctgtcagattctctgattttaaatgaggcaaattccttgctgttttgggttttttcctttgttttgattttttttggagtcatgtctcttcttaacatctttttctttacagggtcagaggaccg

SEQ ID NO: 9909 - DNA, 6051 bp, Eucalyptus grandis
  Intron number 6 from transcript Egrandis_v1_0.044852m (loc us Egrandis_v1_0.044852m.g) derived from phytozome v7.0 (c hr-ID scaffold_4; pos 19226417 to 19232467)
ttgtttcctggcgtatcttggctttaataggtactgttttcgttctcttctgctttattttgttagatttttgttgagaaacatcaaaagatcactgtccacgatttcattttcagcttgcagcccctgcgtactttttttttttttttggtcgaaatagctactgatgtattagcttacgaagtcttggagatcaacgaggcgttacattcagaaagtaaaatattcctaagggatagagggggtctattcacccaatctggaggaagttgtttacggcggtgtgcacgaacgagccaatctgccgctttatttacctcccggggataatgcgttactgatacttgacggcccatacggagctcctgttcgcacctttggattatgcttcttagattccatggtgtctcggcccagcccaagacatagtccaccatcgctgagctatcgctttcacatacgaagcgaagttcttgactttgaagcacttgcacgtgattggacggccagttggagataaagcgaagaccgtgtaacagtgcttcggcttctgcttgttccgcagacgaaaccctagcttccgcagcaaaaccgtcgaccacgaatccctctctatttcttgcgatgccggctaccgaacatagaaattctcccggtacccatgaggcatccacgttcactttcacctcactggtttcgggtggtttccatacctctggtaagagtctatttttggttcggttgaggtttcgtattttcgttcctctgttgaaggcgtgattttgggtgtgtgcgaggtcgattacatcctctgcggttggggttttgtctcggaagatccgtgcattgcgtgctttccagatctgccatagcacccatgcgaggacctctttctcaggtaattctcttcttgattcgaaggctgacagaagccattggtcgattagcccggtttgtttcgtcaagtttgttccctgtattctgtgatctcgccagatctcttttgtccatctacagaataggaatatatgctcggtggtttcaatttctgtgcgacacagctgacagagagggtctagacggatcttttttttgtagagattttcgctagtagggacggcgttgtgacaaatactccacaggaaggtccgaagtttcggcggaacggacaggctccatatctgtgtccataaagatcgtgggggttggtaagagcaagacgctttctgtaaatcttgtttggtttgcgttgcctgtgttctgttatagccacttttgaccgtatatacccctttactgttacctgtccaaattctgctgtccggttttgactctgaactcaaggggatagcgagaatctcattcgctattttctcctcaaaatactgatgaataagagtgtgtttccatgtccgagagtcttcgtttatcaaaccttccaccttgactggttctgattgctgtgctggttgcccatttaggtcctgtgttaaccatttatcctctctgatgttaattaatttgccgtccccaactaaccatttgatatctggtttgatagaatctcaccccatcaacatgcttttccagccccaagatggtcgccggccctgctgtgcattccagatgtctccatgggggaagtatatactcttcaggactttagtccatagtgcatcctgggatgtgtgcagccgccatacttgtttacccagcaacgcattgttgaaggtaattaagtctttgaaacccattcctccttcgtcctttctgttcttcatagcagcccaattcttccaatggattccctgttttgaatctcctttttgccaccagaaagaagctattcgcttttcaattgctctgcagatggagactggcactttgaagatcgacatggcgtatgtcggtatagcctgcaccacactcttgatcaggacttccttacctgctttggtgagtaatttctccttccatccctccaacttggaatttactcgggttaatatccaagagaataattctttcttggattgtccccactctgtagggatacctaaatattttccagtcttgtcaaccacaggcactctcagctcttgagccaagtttcttttcagtggtaagggacaattcttactaaacgagacccctgacttatttaggtttaccgcttgtcccgttgcatagcagtattgattgagtgttaatgacagattctgacattccgttaaggtgccatccaagaagaagataacatcatctgcgaacataaggtgagagagctttgggcaatacctgttaagttgtatgccttgtatgctgccttcctcaactgcttttgtcattaaccatgttaatacattcatgatcaggataaacaaataaggcgacaggggatctccttgccttaggcctctggatggactgaaaaacgaggtaggttctccattgagctttacactgaaagtcacagtagtgatgcattgcattattagagtcacccatttgtcagaaaagcccattttcagcatgcaatcccgaacaaaatcccattcaattcgatcatatgctttttgcatatctagtttgagtactgccttatgttttttctgtcgtttggtgatccgcagctggtgtagtacttcctgcacgatcaggatgttatcctgaatctgacgccccttgatgaaggcgctttgctcaggtgtgattatatctggcagccactgcttcaatctatttgcaagtagttttgagatgattttataattgaaattgcaaagactgatgggtctatactgactaattgtctcaggatttttaactttgggaatcaagacgatatgggtttgatttaacttcggatccaagactcctgtgttgaagaaagtctgtaccatttggaacaggtcagtctaaagaatttcccaactgttttgatagaataggctgttgaaaccatcgggtcctggcgctttcatagctcccaactgatacactgccagtttaatttcgtccaagcttggaaaacagaagcagtagaatgtgcacaaaaaggaacgggcctatttacctttgtgttccagtcagaggtagaaaaggacagaatactcaaatcttcaccttggtcttactccagcaatttgctagtgctgaaacaatgtgatcctgaaattccagaacattgttatgatttttctagagcggctttctaggttagaattggaggtattccccctggttggagagtcgaaactgtttaccatgaactgggaagaaagttaggccaggtgcaggaaatccagcttgaaaccatgggacacctgcagcaaagaggaggtagagtgagagtggaggtagacttaacaaaccctctaaaagcaggcaccattttggatattggcaagaaatggatgtgggtagaattcaaatacgagagattaccccattattgctactcctgtggaaggataggccactatgcgcaagattgttcagaatttccttatgcagaatccccatgggcagttaacaaaatcggttcctatggaccatggttgaaagcagaagtcagtgatcacagtccttattgggagactttttatggaaatcttgaagaagacattattgtggaggaaaccataccggtagcaacgtctccaagcagagaacaagctctaatcataagagagaaagggccagaaatgtgtcgggaagcctgcagcaaaaaaagacccgaaagctctgtcgagcaggagagaatggaaccccctgacccaaaccagaaggtcaatacagaccatggaaaacagattatatgctcagatactcccacacagaatactcttaaaattggaaagagtagcaagaagaacatgaaggtgtagaaagctaagaagcagagatgtttacctgaaccaactcctattctcattgacgattcaggcatgacagagacgctagtgaaatttctaaaagaaaagaagagactgggctttggtggctagccctaataagccaccaaagacgatatgaaaatcattagctggaattgtcaggggctgggcaaccccctgacattccaagagctcagagctttaattgctcttgaaaggcccagtatagtcttcctcatggagaccaaaaacaaagcaacaatggtggaaggtatatgcaagaaaatccagtttcagcatctatttctagaaaatccaacgggtatagcagggggattggcgctaatgtggaatgaggaagtaacagtgcaagtccaaagcagctctaaacactacattgatgtaagatgtactgattctaccaggaaattaagcatgcagattacatttattcatgcatccacaaattttggggaaaggcaacaattatggcagcaattgaagaggttgaaaccacacagctccagtccatggatatgcatgggggattttaacgacattctatacgtatgggaaaaggttgggaaaagggaagcagatacccaaagaatagtagctttcagaaatatgcttaatgagttatctcttatggacatggaaagccatggctgtgcatttacatgggcaaataacagagaaggggaagatcttgttaaaaaacgtctagatagagttttgtgtaccttggaatggcgcgtaatataccacgatgcagaagttcatgcactcccaacaatcagatcggaccacagtcctctggttctcagccttcaccctgcacaaaagaagagaaaaaaggaatttagaatggaggcattctggttggagaatgatgaatatcatgaagtaattcgtgaagtatggaacatattatcagcccctacacagcccactttttcagccaaacttcaagtgacagccaaaaaactaatacaatggagtcaaaaacagtttgcacatgcacctagaaggataaaggagttaacacaggccctaacagcaatcaccaatcagccacaacagcattccagcagacaggaaatgaaaagtattattcatcagatcgacactctaagaaaacaggaagagcaatactggggaatacgatcgagaattaaatggttacagtggggagacaaaaatacaagcttctttcacgcaacaacagtgcaaaggaggcgtagaaatcacatcacaatgctgcaagtggaagatggcagatggtgtcgggatccaggagaaattagacatcacatatctgactattactgccagctatataaaatagtaggggaacgaaactatcagccagttttgagccaatgcaaatctcctattgatgatcaaataaacgcatccctggtggcccctgcgtacttcaaatcttcggtttgttttttatcccggagtctcctagatggctggtaagttgtttatggaggtatcacatgctcatgaggagccacatagatccttatcattcttatttgaaaaataaaatttgaattgtggagatcatttttactctatccatcttcatccaatggtaacgatttcatgtgtgtgatgtccaaatttcttattcgatggagacaatttgagggttgagtaaccatgacataatgaaacttggatgagtagttgatgggggaatctaaatggcacaagtagcaagctgcatgccattgaagaatattttgtagcacaccgcgacgtatcaaaggcatgggaatcattttgaattgctcttgcacgaagcacattaccctgataaaattttagactgaaaatgggaagagtattaaagaattcaacatctaaccaagaatagctttccacttgactgaaattgaagtctagtggaaaaaggagaatggccggaggtataggcgttacgacttcctagtcaaatacaattcacgtgaatcatttttgtgagaatgtactaattatttaaaaatctaaaatcataataggaaggtgatgttgtaggaattacggagtgaggattctgcaatttccattagaagaaagatgattagtgtagttattgacaggtaaaagtcggtcaaggaagggagtttgaagtcac

SEQ ID NO: 9910 - DNA, 4344 bp, Eucalyptus grandis
  Intron number 1 from transcript Egrandis_v1_0.044017m (loc us Egrandis_v1_0.044017m.g) derived from phytozome v7.0 (c hr-ID scaffold_7; pos 12337633 to 12341976)
tttttgctgttggaagtagtacattagacgaccaggttggcactcaaattgcattcttcaatgggcaacaggtaactttctatcaaaagagctagtgtgcttgtgtacaacttatctttttcccatgttttgagcttccatgaacagagctcgctttcaaagataatggagccagatcaaggaaattttgccaaaaagcttttgtgaccttaccttttttttttttttttaacatcgtaatctcgtgtattagatcatttttgcatcctttacaccaagtttaaagaagatgacaacttttcaagttaaaaaaggggaacaattacaaagttgataaattagattgtcacagcaacaattaatgtcattcaattgaaattgagggcgattatttgtaatctattgaattctagactagtaggtggaaatgtagttaatagtttagctagctttagtgataacattttataggagatccttttggcataatatctactcctagtttgaagaagatgacaaatcatgcaaactaaaaaacagaagcaattataggtgaaaaatcctttgttatttatttttatcaacgaaaatgatgttatgccgctgtcgatatattttatggtcctatctacacttctacagatagaaatttactaacatgaaagaaaattagtaaaccaagcataaacaatgccccaatcaaggaaagctcccagctgtatgttaaatggggggaaaacgttgcaggtagagggttttatttgactagataaggttgctctttcacagtggcgcaggcccaaggctcatgccatacgttagtttccctgttgggagatgtgagtggtgggtcccacaagtttttgatgtcagagtgacttttcttcaacccatgctttgagcttccatggagagagcttgcttaaaaaaaaaaatagcggaactagatagggaaattttgcatagagcctttgtggcttcgcttcttcttcttcttcttcttcttcttcttccttcttttttttttttttttttttttgtcgtagtgtttgcggcttttaactttctaggattctaaatcttcgttaaagaattaatgttgccttagtaccttttttattattattttttgagttaaaacctaaagatgcaaagatccatgggcttataatcaaatgtttcttcaaactgtaataaatatcctcagacattataaagcgctggcagcctacaaaggagtagtctaagattggcttttccagggataacaatagactaatgaacaaaacacaaaaaagttaaacttgcaaaaaaatgtaaataaagcttttcattgtcatggggaccataggtctcttcaccttttgagacatgttggttaaggaaattatgacgacaaggatgaataattaggataggctacatacacgtccgacttgaaaggaatactcgaggtaatttacaaatgataagtaaaaagaagtccaaataatcccaagtaattcactatttttcaaagatagttgtgatctcaaccggtagccatgactagtgactactttgttattccaatatcccaattgctgacgtgtctaattttatgttgttttgcgggtaaattagtccctatatgcctaataaatttggagaaattagagacatccaagaagaaaaagacaataaaatgcctattttattggattttatcaaggaagcaggtaatagcagagtgtgaaaggtcctctctacctaaatggatgagaatgacgtcacgttcagctatcaactccctatgtccataagtcatattcatatatcgttgtttgcccaaggtttaattttttgagttgggctcgttactagatgagatatatatatatataacgcacaatctcgcctgagactaatgggatatatgctgtatatatctccatctaattgatataatttggcaattagacaaatatttcatgcataaattgattgtcattagtaaccaaaatgagtgcgaattcttgatgattgcaattcctgatattgctagaaaaatgcaaacagaatccattcgtaatagcagcccttgttatatcataaataaaaggtaaagtacattagttgtcttttaaggtcataaattagcttttatttgtcatagattttcatatgtgcgaaattattctaaaggatgtacattatcttgcctataaatttcttcggcaaccatttataatacccgctatatcacataatttcttgacggtcctttgtaattgtaaatactatgttgatgggtttgtctatcacatttcaatcccatccttgtagtccttgataatggaaggacttctcaatcccaaagaaatatgttgtcaaactaattgtatgaaacccttgcaaatttagtttgtgatcggttctgagttatctcaatttactggttgcaagtatatttatattaatggagtttcgtcaagacaaattgaagggaatgttggcattgaagtaattccataattaaagtaatttataatcttttgaaatgtgttccattaaatttagttatcaaaatatgttatcatccacaaaatgtataatataggtgactctcttagaaaccaatacgaagaatgggaaggaggactgaattttcaaataaaagcagctatgctaatctaattgatgcatgccttttgtatatcgtgtttaaataggcacttaatcattgcatagtccccataattgtaagagtacataattttgtgcacagtttttttctcttttatagtaaaagtaggccttggcaattgtatggttttcattatgtcacaacaaagtcattcattgcaaattcggaattcttgctcttggagttccaaagtgatctttaccatttctttactccatacagcagaatttgaaatcccctatgatgaaagaaattacttttgtatagctccatatcctccatcaactagagaatgtctcaccatgtggctcatgagtaaggccaagtctgtaacaagtctctaacagattcaccttaaatgatcatcttattttgtgatcacccttagatactcctatgggggagattgggtcatgtgaataaggccaaagtaacaatatccaaaaatggaacttgatgccataatggaaaattcactatcttaaagtgcaaataattttacaaagacttacttcaaatgttttgacgtgtcttgtatttcaattcagctacttagtatgtgttagtttagtttctgaagcttcaagtgctccacattataatcttcaagaaatttgtgctgaaatatgagtttttctgttgttgagtccatccgatttagattgtaacattttatgtagtttttcttagccaattttcaccatccaaattaagaaaaaccgatggttgcccagtctcgcagaatcatatgtggtcattgcgccgtttctctccatggcgatctacaaatctaaatatcaagtcctttcaactaagtgtttttgcatttggcctttatagttatgtatatatatataattgaatgcacttttggcatcacgaacaaaaatccacatatttatgtttgatatcctattaaattggttattaataatgatttactaacattaaactaaggacaaacaattgcctggttaagaaaagcgcacaacgattttgtccaggaaaagttgaggcggctatttcgttgaccagaaaagattgcacttttatagtggcaattagcacaaaagttggtggggctcaagactcctgcaatgcgttaattttcccgtcggtcagtaaagggtcctggacatatattttgcgggtcccataaggcaatgtgtgtgagtctttacgtctttgctttttcttaatcgtcgcagtctttggagcttttaactttcgccatagttctcctggacgccggccatggatatcagtaaaacttttttttgggccaaaatttgaggttaaaagtattattgggtttgctttatatagagagagataagtaatgctgcacttgctaatacatttttgatggataaattcttcgacggaataaaactagctcacccatcaaattaagcttagcattgcaagtttttttagcgaagaaaggacttgaaattggaaacaatgctagtatggagattttttttactccatttttttgttttattctatttttttttccttttgtgaaacttaattaatccccctctccccctagcactcgtgtataattacggatttgagatttaaattaatcactaattccatgaacaaattctgcaggttgcctttcaaagattggagacattagaaattag

SEQ ID NO: 9911 - DNA, 4837 bp, Eucalyptus grandis
  Intron number 3 from transcript Egrandis_v1_0.009959m (loc us Egrandis_v1_0.009928m.g) derived from phytozome v7.0 (c hr-ID scaffold_9; pos 18057708 to 18062544 reverse strand)
tgtaataagttttctgcaagattgttctttctgatgtccgaaaggctacatgagacttcaagaatgccgaaacatgtttcgtcctcagttggaaatttactgttcaagctttaagttgagctggagcaaaacttaccttgagctccagaaacattaactacaggtgaaagtttggtattgacaatgcatgaagaacttgaagagctttgaagctattgcagaagcatatggaaccaaacgttagagaaataaatgatgataacccaaatttcatgataacccaaattccacgataagccaaaaggctcggataggtcactttcggaatctctctctccctccctcgttgggtctgtccctgcatgtgcgtgaagtacaggaagacaaacgaaaggcgaaagcgcgacagagatggaaagtggataaagaacgatagaatcagacagttgatgagtgacgaagagaagtgcaatgtggctctgcagattggaggagaaatcttatcaccttcaaagactttaaaaaaattcaagtggcttatactccagcaccgatgaactggagcaagtcttgtccggatgctcaagaatccctgccccttcctctttctccctctcttatattcttccccagaacgtcacggctccaaagcaatcgaaactgacggtttcagcgcaaaacgacggcccgaaagagaggctcttttattgggctgtcgctttttctccagttgtgtggccgttcttgtggatgcagagataatggctgtgccgccttcgcaggttgctcggattgcttccgtgggacatgatatgaccactgaccaggtcgtgaccgttggaccgttagttgccatctaactttctcgttctcggccacatatgtaaaataaggagaagaaaagaaagaagaaaatcaagaaggaagcgtgatgtccactcctttgttttcattcaaacccatgagctgtttcaagtaataattgtatggaattctaatcatcaaataagaaaaaaaaaattcggaccagtgcccataaatcgtgacttatacgctttgataattgccaaagaaacaacccttccaaacatattaagaattgatccataaagtgccaaccgtgtatgtagaacatatctctatgtatcaatgacatgactggctcttaattggctaatctagcatcccatccatgtgtttgtacctagaatttgcttgaattggaatgtaaaaatatattgtagttccacataacgtacttgcatactcatactctaccgcgattaacggtgcatgtgaactagacttacgtgttaagtgcatccaaggtaaggggagagaggcttgttagatggaggaaagtcagtttcttgcgatgcccctcgatccgaggaagataagtgattgggtaggcccgccgaccgcctaaggtgggctaatatctctgtattcctgttctgaccaactcacccaataaaaataataataacaaaagtagcaaaacagggagaaaaaaaaaattctcatcacaatcaaacaatttccgaagaatgctcgctgtctcattagtcatttctagccgccgtaataattaaatcttcccaacgatgttcaataaaatatagaattaataaaaagtgtgctagcaagtgcttccacatatttattcaatattttaaatataggcaaaagggtaaatctcccagaacaataataaacaattgtgaaattttaattgtgcattttacgataaaaattagcgcaactagacctaacttctatgttattttattaattttactagatctaaattctgggaattctcacaaaattcacttgtttctagggactcctttaatattcatttggtttattcatagaagactgtgagtgcccaaaaatgcgtctacatacaatgatgtatggaggagcttgcacgatccgaatcagagagtatgggcaaccaataaatagatttttttatgattttctttattaattagtgattttaatgattttgtccattttgaggaaaagctcattatcttaccctgctgcggcctagaaattagaactgtaataatgcgagggacacattatgggccacagaaaaaatttaagaaaaaaatgaataatatattttttgggattatatataaattaaaggctgattttttatttcttttttggcagaagatccacaccgccatccgctgccgaaattacagaatcctagaaaagtgagacaagtttaatatgcgtatttgaatacgttatcagaagaaatgaaaaaaaattaaaatatatatataacatatatttaggtagctaactattctttgattgtccatctaactttctctagctagaaaattcaccatctttcgtagcagactcgtcatttggaaaatggtacagcttccgggtgataaattggaccatatggaccataacctagtatcaataggaaagggtgttttacttgtcaaattatgttcatcttcctcaatagcataaacatacgactttttgcaattcgacaattgccatatgtataccaccatattataggtcgctagatcaatacatcacaatcgacaagataataggaaacctaacctcacgacccaacatcaaagagataaaagtctacaaatttcggtcaaacaagataacctttggtagttcatactaactctttacaaaacaatgatcatattatcttatttgcatcttgatgccaaggaggtaaatcttatatacaaatattccacagaggcaatttctaagttgaatttattcattaaataatagttccacaacatgagggtatgggtgcccctacttcctatgatgaggaagcaatctttgcattgggtcatcacccaataaagtaattttactttataggaatattagtacctctaactttcattaatttggtaaattctccgaggaggtaccattagcttctaaatttggcttcagagacaaattggatacgatgttacgcctttaagcatcatttctagatatttgagagacaataaatgaaatcagtccgattttgacttttgttgagggctacatttgatttatcttggtctccaaccaaatttctaattaacgaattacaagtatcaatattactctcaagtaaatattttattaatattgaatgtgggatattttttactttgaaaaaataatcagcgaattgattgcgacaaaaattcttcatgtggaggtacaccatgagaaaaattatggcaaaaatttaataaaacaccgaaaaattgttttttgcaataacaaaaagtgcaaaacgaaacgaaacaaaaaagaggggcaacgtggtcactgctccaatacatgaaaagcaagaaccctagcttgtggtcaccgctttaatacatgaaaagcaagaaccctagctttagtgtggtgtgacatttccccacctactcgggcgatgatcacgaggtctatccgacccttgctcgtggcggaagagcggcaatggtcgctctctatagagtctacatcgtcggctcccatgtcatcaatgttgataaaaacgaggaaatgacccaattgtataaattaaaataagtccgaatgaaaatattcagatatttaatgaatttgcttaaataaatccgaataaaatattcagatattcaatgaatttgcttaaatcatattattttttggaaattcggccgtccaaagaggggaaaagtcgttcgtctgaggtgacgttggaagcttccattttgtagtcgagtaaaaccaaacattcgagtgtaataatgcacagggaacgaggaaagcccatgcccgcccgcggcaacgaacatggtcggctcatccccattggccctcccaagtcatttgctcctttgccgctggcgctgtcagtcgcagtctcatttatgttgcagaagaaataaagaaaagcgaaattcgcagacttaaaaaaatatatatttatgagaaatattggaaaagtaccttcgagatgaagctgtttggtaatataatagtttggaaatatctatatatttttgcttggcgtggtaatcaattttttgaattttggaaatgtcttgatctttgttcttcttactttcattcttttttactagacacctatgaggtccatttggacttatcgatgagacccgtttatagttcttccttaggctaaaccattttgttggtacttttactgttgagcttttccttagtggctaattaaccaatagtcagtgcttcatggttaagcttctctttaggagcaaacgtgcaatcatgaacttatcacacaggaatcaattgattcataaacccgagggaacatacaatcaagtctcttgattatattcgtccaaatttacttgatatggcaaatcaatcattggcaattgttttaagcatgagggtgacaaaattgatgtggacaaaacttaacgaaacaaggttgtattttttccgattctttttctttcctcttttcttgtttgtatcacaaccaatcgaacgaacccatatacagatagatattttttgttgaatgaagtaaagtaaaaaaacgttcttctttacaataacggactcaatgctcctcttgaatcttgacctaaatcggcattgaatcaaagcaaagttgccttcatttgaaatatacaaaattggtggaaaataaaagggtgatcgttaaccaaggcaaagtgtgtaatatttgaaaaagaatccactagaacatatacaaaccaagaaaccaagaaaattttgacttgaaaagaaaatctcaaaaagcaaaaaaaaaaaaaaa

SEQ ID NO: 9912 - DNA, 2185 bp, Eucalyptus grandis
  Intron number 2 from transcript Egrandis_v1_0.042356m (loc us Egrandis_v1_0.042356m.g) derived from phytozome v7.0 (c hr-ID scaffold_9; pos 6693859 to 6696043)
cgccctccagaagacgttcgataccaacgtctgtaatgaatgctgatgatgatttggtctattctctgcgcagtctcgattcgctacttgacgtgtgcttttgggtttggtttctgggatgaacgtgcggcggcaatttctgagctttgtgttgaaatgcggtgttctggtacattttgttacttgtaaggctttacattgacagttcgaagttactgctttgttcaaaatgtctctcctgctgatggtggatctgctcagtttgttgcgagcaactggaaagagtgaaactcttacgacattggtggtcctgtggatgagatggttgcttggggatgtgcttggttccgatgcaaccgtgggatcgacttaatggtctgaggactgaagatgtgtgtgtctaatgggatcgattcaccattgcaacaaatgggattgactttgtgattaaagaatagagatacgtttgtgtgatttagatgcattacacaggttcagttccccacaccatcaggtggtgcaaacaatttcatagcctgaccacccttggactttagctcgatttcttaggatcctatatcatgggcccagtatagcttttggatgtgtaatcagaggatacttacagtacatgaactttgtattgtggtttgaaagcagcatcctaagatatagcaacagcgcagctgtattctactcctactttgtcctatccacggtgcagtcgtcttggtacaagaattttgacttaaaaacacagaataggcttatgcagaatatttagacactgtaaagaatttttgtcagttgttgtggtgatttgctcttggtcttctccttgccaatccagtctatagtagttttaatcaagacatcacatggaaagcacaagtaaatcctgcagtaaaccacaaaaaggggtaggttagtaccaaaaagtaactcagatgctttcttccacaatatcaaagtctggtaatttcatgttctcaatcagaaatttcatggtcgattctcttcatccagaaatctccaaattgatccagacaataaggtactgcaaaaagattactctgtattgataatatccctttatttatagtaaaaaacccggaaaaagacattcttctagatctattggttgaaattagagttgtagaactgtagttcacttaggcaatttttctgcatctctgcttatatacatactcattctgtatttatgttgtttaccagtggcatcacactcttgcaattatcctgggactatgttcatagcatagtgcaaaatactttgaccttgacgattaactttagtgacatgattgcatctcttatatcactgatgacagtttcagctcaaaactgatcacatgttgtcagaggaagtaataggcaccttgagacttgagacttgtgtggacccatatattgtttaaaggggtttcaaaaggtcgtggaataggtttcagtttccaaaagtttagaatcatgtctactcatgttagatgtcctttcaagtaggaaccgcacactccttttgtgtgtgctggagagtagagacagtagtatggcagtaaagaatgaataagactgcatattagtatgttatctaagggtcaagcttatttgcctctgtgaatgtttccaataaaacaaaaacattcagctgccaccccattcaacttgcagcttatagttttcagaattttctctttgatcttttctgctgcttcaatccaactcctttatggtggatggaacaaaattccatctctccgtgcaagcatggcttaaactggaaaaaatttgtctgctgctcaaattaaatgtttctgctgtagttttggattatgggatttactatttactgggttttatacagcattagaatccttgagcaagtgttggttgaaaattgtcaatgacttcccttaggtctaaacggatctcgtggggatttttgtagctaattgtgacaaaacatgcatgtaaacgtcattttaatgatgtgatgggcagtccatccattacatacattatgaaatggttaattccatctaatatgatgtagacttgtccaattcctatttcatttttctttcagtctcttggcaactgtgaagtgagtgtaaagtatagccttcttgtgcatttctccatctttcctacaggatcattgaga

SEQ ID NO: 9913 - DNA, 1322 bp, Eucalyptus grandis
  Intron number 2 from transcript Egrandis_v1_0.019127m (loc us Egrandis_v1_0.019127m.g) derived from phytozome v7.0 (c hr-ID scaffold_5; pos 73100617 to 73101938)
ctgtggcacaacttgggggtcctgacagtgagttggcttatgcttctttttgttgcaaagcttcattttaacactttttctgtatttcctctttgtgtaagcatgaaaatctattttctttacagaatcttctgcaccaaaaatttccaacatgtggaaagtagattgctgcatatagttaactattacatttttttcatgttccttaaatgctgacattattttgtggaccaaccacttttgcatagaatgagatgggacatatgaaagtgcatttatgcattttcagatgggttaatacataatttgaaacccaccctaaacaataggtgtgcatgtcagggctggtaagccactaggtcagacccaagtcactccaaagaaatggaataccacgctaatttctttgatttttcttgatgcttatagagcataaatcctgatgcattaattctcaatcagcactgtggaaagaactaaataccatgatactgcatacttttcctctccgttcctttgatgcacaatattttcctgggctctattatgagtcttatgatgtagtattgttcttgaagatatactagcaatgtgatttaagatagccagtctacagggattgaggttataagtgttacaagtacaggtttataagtgcttatcttggtggttctcttcctcaaaattttgttcgttgaggttcactgtaaatgattctctctgtggatgttacgtgcataaccatgttatgagatctaccagatatttatcattaatgaaaattgattgttcattttgacatgttttttatcatgccatgtcattctgagaaattcagtagacaccctattaatctctcgaataagtggctgtgttgaatgctcctacttcatttttgtcccttcaaggagatactcccttattttattttttttggtaaaaaagatactcccttattttatgtttcttgttaccgctaattaattaaaattaattaactagtagtgtgatgtcagggaggagttgcggcagcaataccccattgattgcctgttgttttatccaagataaatgggcttctagatgcggtatttcattagtgatactttcaagtccttggcttgtcacatgagtctgaaagaatgtttagtccttgataactcctatatagtggacattacagtttaagagagctggtgatggagtttttccttttcagacactgtgttgttgggtacctcatataatcaaatggggctattcatcgagaaatttatgtttgtttccttacaggggccactcctaaaggcgtccttagagtg

SEQ ID NO: 9914 - DNA, 5448 bp, Eucalyptus grandis
  Intron number 4 from transcript Egrandis_v1_0.033230m (loc us Egrandis_v1_0.031557m.g) derived from phytozome v7.0 (c hr-ID scaffold_5; pos 36296796 to 36302243 reverse strand)
gcaagagaattgattatatctctgctgaactgtatgttaacagaccacacttggtttcttattgctattgtgatcttctcatggcttcattggtttaccagttgatgtgatctagactagagatgtgtccatgtgtgtctgtgtatctgatattaaggttttacatatttcattgtctaattctaatttaaagttcacccagttgctttatatcgatttgtgtgtataattttgaaaaagctataaattatgcctagattatgttaggaagtaaacagtgtggcatatatattatatagacagagactgaatagtaaagtttgaggagagctagagcatttaacttaaattggtatgattcttcacttaaaaactactatttacagcttatctaaggttaagatagataatatgatcgaggagcaagataagggagaatagttcactaatattacttctctccatctactggttatttctatgaatagcagtgaaagaatttttcaaatcatgatcttaaatcacaggaaaaaaaaaaacagtggtcgagcatagaagtaagtgtcaatgttattcatgttaaatgcaatttgggcatggtttaatctatcgctgcattaataggtttgtatggaatattgacacaaaatgttgtcgatgcatttgcttgcttcatttagcaggatggcttcatatgattattattgcgggtgttcttatgtaaaggttacattttttacaacaaaatggtaatgtgtgcttgaggagcaaagaggatatgcccaaccaaattgtactatctaggggaatttctcccctcattcattaccttataaagcaatctggctgccttatatatagagattctcagaaacaaaattttattctcatggatgggttttgcttgtgtaagcataatttcattagagaatagtaagatttttacttgtttaggaattaagaatttttaggtaaatattttagaaattttaataatttatttcttgtatcttcaagatttaattatgattatagagatactgtttattgttgatatagaagttacctacttagtttctagatggtatttaagagattctcttgacatttttcaatagttttctatttatctcttattaggatatctttaagattttagtctcaaattcattttactctctttcctaagcagcttatccctttaattaatgacaaaaatttgagataagtatctccagatatgtgtctttgagcgtgttgtgctttcgacgtgttgtggattgagttatccctgtttatgattttttctgctatgtcaattccttatgtacttggatttcttattttaataaaatcccttattacctatttaacaaaaaaaaaaaaagaaaaaaagaaggataacagcatctaactgtttaaactttttgaaagacaacctggtagaagatgcagtttgattaattacaaattaatgataataggggtcttactgaaagggcatgcttttgcaatttccagggatgagatattggttgtattatgtagtggttggcaatgactattactgatctttataacactttgcttcactttctcatctgaatatttggttatatcatatctaatttggtggagcatcaaaagttcaccttttggtttaaagatgactgctgtgcttcagattatgtatattacccggatggctcatagacagatcacataggttaatctttaattggtgatcctgcatgcaggaagcgtcttgatgcgactctgcaggatctggaagagaagcagaacagcaagagagatatggtctgtgatctatccttctgaactctgacatgaatgtgcgcttcattttgtgttttatggttactatgtctgacttgatatgcttgtgttttgtaatgatttcatatcctgttgccggtccagtgactgtctgcctctagtacataaccatttgaactcatgtggaggggcattatctccttaagtttatgaaggttctccttcatgctaatgaattatctattagctctttatgtagtctcttgtttatagacatgtagagaaattcagatgaagtggataggccttatgatacaatgtgttttcactactttttctccctttgaactttacctttctggtgctttagatgtgtttcttaatggtatcgtcatgcagtacagctaaccaggtttctttttatgctcctgctagtattgaatggggcctgcaatggataatattaagctgcatgacaatctcagcaaactttgaatttgaaagaataatttaggctgcacaacaagtgggtgaacttgttaatttggctgacgataatgtagaaactccataaaagaaaaattaatgattcatataaatcgcttaatgggaaatgtcctgaaattaatctataagtattctagtttgtaccctttttcattccttaggatgttttcttctgtctgatatgatcattattgctaagatactcattttccttatgctagtataaaacagcattgatctcagtgcgttctttgcggtaatcctccttataaagacacttagttatgcttcttgttactcattaatgtttgcagaatcaaatagtggaagagagataaaagatgttaagttttacttggtcctcgcttctgaatcaaagtggctcgctctaataaatgtgatgtactaattggtaacaagagatttttttctcctcaagagaactcaggaagaaatagggtgactaagcatgtcatattgtcaattaagagagactatgtgtcccctgaggagaggagtttcattatttgcatggaactcactagttgggttgttggtccaaccaaatgcaagagcaacatgggactgttcgggcattgttttttgactatgtgtcccctgaggagaggggtttcattatttgcatggaactcactagttgggttgttggtccaaccaaatgcaagagagacatgggactgttcgggcattgttttttcaggctctcttgctttgaaacacaattattgttcaattcattgcaagtcttggtagtgtctacgtgtacgactttcttccttcttttaaatcttgctttgagaaatgaataatatttataggcatttggaaccttaaggggagaggtactacaactaccgcagctaagcgttaggtaggtctgctatatgaatccgacataatggtgctctttttatatcaagtcaggtaatatgcaagatctgacccccccaaaaaaaaaaaaaaaaattaatatgtaagatctaagtacttcatatcatttcacattgttctattccatatcctgttaggtcttcccctcagcctttcatcaaacacagtgacagtttagtagacagatgtagtcagaagccaacttgcccttttcagcttatggtctttgagtgaaatatcatagaaagatgtaaaattgtaatctaaaatgtggaatacataattcataagatactttttgtttgcacttaattgtttgactgaaaaagttacacaaatttgtaagagtcaaacactaatttgttgcttctaattgatactacttccaaacactaatttgtagagtcaaattcaagccaagaagctgaccaaagaaaaaggcaagccaagaagccatttcatcccatataggtttttgcctatgtagctaacttttttaggatcctacaatgtctttgggtatcaccatctgaccatgaaaatagcagcaaagttttctctttagattctttatgcgagaagcactaatcaaagtaatggattttagctgatcaatttggtcatggttggtagtggggaccagaccattactgagaaacaaaataagtttgaccttatttcatttacattcttttgtaagccttcctggatatcttgggtttggtcccatcagatcaagagttccggttattgaagctagaattgcagtcatttagcaactttggtctttgtggtttccttgtattatttgtcgtcgttattgttggatagattgggttgttgttggcctttctttcccttcagttcatttcttcgctcttttctctttttggtgaatcatctgaatggagctaaatgttcaatctagtgcctatttctttgatagtcaagataatgtagctcacattctgtttgtttcgaataagcaaattcataaacaatgtagggggaagactcctgttaagcctcatgaatccattaaatccctcaaattatgttccaatttccacaaacattcaaatgcagggaagtgtttctgggaagcaagttgacgctgcataaactaccaaaaacaacactccattctatggagcagttcatcttgagtgttcatggagctttgaatttctagcacatattggttctgccattttgagcatgagcatagtttatgaatatcccaaagactgaatttgcctttacgtgttgacatcccggcagttcctgaagccagtagctaagaggcctcttaagtattaacttaacatagattgaaaatgatcctccgaatacccctagaaatagaccaaccaaagaacagaagtctcatcgaccaaacaactgccacatatactctagaatggttttgtttccacttgatcaccttctttggacatacaaagagactgcacaaattcttaccagttttcacttccaccacatgcatctgtttgccccaaattcttaccaatcatgcccaaccacgcattgcataattattagaacaaatcatttgaagagattgctagtgaaattctcttcaattgggcagtgaattctatgtctgagattgcaaactaccgaagctctttgttggagtctctctatctacctgtaaagtcagtgtgttattttttgaaacaatagtaccaattcattcaagaaacttcatatcacatgctttggaggcaagtcagttgtggggaacacttcaccatcatgggctgccacttgggttaaactgatgtagcttgtcagagtgtagtgcaatagggaacaaaataatcttttaagttggcaacgtgtatcttctcctttgagcttctgttaactttctagatattgtagagtgattaacttgatacactgtctagtattgctgttttggcatgtgaagccagagaaattggtcacaatgactacaccaaattataaacaatacttttccttttaagagaacagcttatggttccattctaataagtttttgaattagcactcatataatttgtctccttgatgaagttgcttggttagttgtttgagaagttggtcatggaaaatttgttttattaggaagggcctcgtgatgttcatatttatgttatgcatggtgcagatcctgaagttacaacagaggattcaatctctgcaggcggggaaagcaaaggc

SEQ ID NO: 9915 - DNA, 3122 bp, Eucalyptus grandis
  Intron number 9 from transcript Egrandis_v1_0.012388m (loc us Egrandis_v1_0.012388m.g) derived from phytozome v7.0 (c hr-ID scaffold_2; pos 43864304 to 43867425 reverse strand)
cacataagctctacggtaattgttcttttgaatttgtctcccatgaggattgctgaagaaaaagtcttcctatatttttacgtaattaacacaagaggaactagttaaatagcattttcattatagttttttgttgaaagacggaaaattgaattaaatgcttggttaggtcgatgtgatactaagctatctatttataataaagccaaaaagccaaaattacaatatcacccttattgtctccatacgtgaaataataaaggacatagaccaatatacccctatcagccaaatactctcaacacatgcccaacttgactaaaacatggtaaaatgatttaacctctagctctttagtgaatatgtcagcgagttggtcactagacttaataaagggcatacaaattaaaccactttccaactactcattgataaagtgacggtcaatctccacatgtttcgtacaatcatgctatacaaaactatgagcaatactaatggcaatcttattatctcaataaagtatcataagaacatgaataaatacaaccggatttccaagtaatcctttaagccataacaacgcacaaactccctgtgctatggcatgaaactcttcttcagtagtagaataagcaattacattttgctttttactacacaagtcacaagatttcctcctaagaaagtataataccctgaaatagacttctgttcaagggatccagcccaatcagcatctgtataggcttcaacttttaagccatcatgaggagacagaagaatcccttttctaggagcagatttcaaatactaaaggttccaaagaacagcatccatatgagtagagtatggatcatgtataaattaactcactaaactcatggcaaaagtaatatcaagtcaggtgtgggacaaataaatcaacttgcccactaatcattaataacaacccttatttgctggatcactatccttttcttgaagacgagtattggcctcagtaggtgtatcggagggatgacatcccatcaaggacatacttccttggggatagaaagatattttttgaaaatttgccaatgtcaatctcgagaaagttacggagctttccaagattttttatctaaaactcttgtccaagaaacattttcaatcggttgatcttattgttatcattccttgtgacaacattattgtctacgtagacaacgagaacagtgactttggcatttgatcttttcacaaataaaatatgatcagcattactttgtttatacccaatggaaactatagctttttgaaacctaccaaaccagactcaaggtggctgcttcaaaccataaggtgtacgtgttagcttacatactttactttgagttttatcacaagaaaaacctaaaggaatctccatatacacttttctttaaactctccatgaagaaaggcattcttcacatctaacgattgaagatcccatccttggttaacagcacaataaagtagaactcaaatggtattcaacttggcaataggagcaaaagtttcttgataatcgaccccataagtctgagtaaatccctttgccaccaccgtgctttatatctgttcaaagtactatccattttctgtttgactacaaacacccatttgcatcctacaggttgtttcccaagaggacgtgccatttttctttaaagcatgcatctcctccaccattgctaacttccacttcttatttacaaaagcttcttgccaaatctgtggaatggaaacagaagatagagaagacacaatagtatcataggagctagacaaagagtcatatgagacaacatgggatatagagtgttgagtacgtgttttagtagccttttgaagtgcaataggaagattagaaggagaaacctaaccataaggagtagaataatctggttctggaaatgatgaccgaatagacaatgtatcggtgatcttaacttgagtgttggtagtgggatccctgcaatgatatgtcttcaatgtctccccctgaagtggttttttggttatctccccttgaggtactatactatcctcttcctattgcattgttgtcctcttgagaaggagaattatcaaagactattggagaaagaggataactaatatcctcaataacatttaaaatgggcaacacctctacactaggacattcccttgaagaggtggagcagaataatagaaattacacctgtgaaaaatcacttccataggtacaatggtgtgcctagatggaggatgataacacttataacccttatgagtagctgaatactgaagcgaaaatgcagtggagaccacagggtgccaagtcttttttctccattgagagttagaagaaagacattcttgttacaaaacttaaggtaaagtgtgtaagttgaaacatgcaactcggattacaagctgcatgtggaattttgactatgcacattcacgtgaaatcttttaccacacaccttcatgtatgggacaagtgactctgataccatgttgaaagacaaaattgaactgaatgtttggttaggtcgacgtaaccccaagctatcaatttatgatgtagccaaaaagccaaaattacaatatcacccttattgcccccatatatgaaataataaaggaaatagacaagtacacccctatcagcaaatactctcaacattttctttggtctgtttgtagtgtctttaactcgtaacttatttagtgtttgaaatttgattttatctagttctgacctccctgagtttgtagaaacccattgctgtgaacttttatgatcaaatgcaatcatgtcaagtttttccagaatttatcaacattatattaaatttctatgttttggggtgaaagtcaatatgtaacttgctgtttgaatcacactggatgcattctgcaatttttaactgaacttctgctcttttctccctcttagttttatctcgctgtgataatttactcttataatagtgtatacagggtacttcttttgcaccttgataacaaaggaataaattatttattgacttccgcttgccatttcaggtcactggggagttacttgaaaatctatccggctg

SEQ ID NO: 9916 - DNA, 8457 bp, Eucalyptus grandis
  Intron number 4 from transcript Egrandis_v1_0.019972m (loc us Egrandis_v1_0.020022m.g) derived from phytozome v7.0 (c hr-ID scaffold_8; pos 68245261 to 68253717)
ccatcaacaaggtatcctacttattttctccatacctacatactacagtattgccaaatttataatggtgtcaagtggatcttgatctggaacttgaacttaactaagcaaaggattcaccttggactctctgctctttggattaccttcagaatttgtgaagttgcagtttataatgcaattgcacatgcgtctaaaagcaagatattgaagtgctcccacaataatcctttacttctctggatgtttggcattgcaaatgtatctagagatctactctgctacaatgagattcttgaatgtgaccttttggagagtggaatgccacgattaagattttctcttgataccggcagcttccccccacattttcctgtactgataaatgaggacagatgaaagatctttttcatctgatacctagatccgtatccatcattatcataagacaaaacttgaaaatccatattctttggtctctaatgtaacaagattgatgttttgatagtagtgaatcgtcctcagatagtttttattataaaagagaagctgaaacctccctacataaagactaacttgggctgatgtcactttgatctgcaagttgcctagttgatttctcctgatatatgtgtttatgaccactctaatggtatcgctagatatttttcatttatatatgttcctattctgtatgtcagttgttagctgttgaatttctttcaatttcttagtagagatttttaagttcattttaagacacagcttactctgggagattgctttggtgctgtaatcatctggaaacctctgtatgcaggatctgaaggctgatccaaatgatgaatttctgaaactgctgagatcagcaattaagtgcttgacttatccagagaagtactttgagaaggtactgcgtctggccatcaacaagctgggaacagatgaatgggctcttactagagtagtcaccactcgtgcggaagttgacatgcagcggatcaaagaacagtaccacaaaaggaacagtgttcctctagatcgggctattgcaaatgacacatctggggactacaagaagatgcttctcactttggttggacatgaggatgcttgagtgagacttgtgtctcagtgttccgtgcgaggtagatttaactggctgcgagatgtattgttatggttggagttgagttgagagcgtcttgtttaaggtttcgtgtgcgctcgtgatttatgtttggggaactttttgctggtttgctatggttttaagatagccatggaaaggtgcatttagcatcagtatggtcatgataagctggtggttttgcacatttatggtgtggaatccaactaataactgggaaaaacgggactgagaagtgattgtcgaggaggttatgtttatcaatcttaatcaacttgcttgcttcttctcaactttgaagtcgtaaaacataattgtcttcgctacttatgtgaggggttgtcttcagagaaatgacgagagatgtgatagagatagcttaatcctatcccttgaaagccacactcaagtgtcacggtcaagaggtttccatggctaaaggaccgtgcatcttcaaggaggacctccgagatcaccatgatttcccgcaagagagcttccaaaacattccaagggcgggcgatatgataattgagtcgaagtctagaactctcctatcattagtgtccatagttggtagattgagtggtacaaccttgtctgctcgatgaaaactcgattaacggttgtaatgggagggcttctagtataagaaggttccctccccctcatttgtatccatccaaccatttcagtaatcaaaaagttctcaatccgaatgaaccgggtgagcaagcgagcgatcaatccgagctggcttaggtgccccaatgatccgtaacacaagcatatgataaaaagaacaaagttgtaacagcaacatggtattattgatgattgctatatattgctctttatttctcaagaatcccagcaaaatgatcctctaaagatgtaaaggaatctgcaaatacctccattggtcaaccacacccagacaactgaaaattgatagcgttagattatcccaatatgcttgaagccgaaggggtacaaggaggaggcggagtactcgaaagagatgataccaccggagggagagctttgcctccgtttgccaagcagtcgtcctcggcattgccaaaccgctcgactatttccaggtctgggaatgtcagagctaaatgagagtcacggttaaggtggacactacagagcaatggacgggcacaggttctttatttcaaccaagaaaaccggaattcctattttttcttggataaacaaagtaacaaagcgtgacccaagacgggccccctctaaccggaccagatggatttatgggccacttggttgggccggctcgacccaacagcaggcttaagttctattttggagagcaccctagtgatggaaatgcaaggaaaagggcccaaaagttgtgttcgtttgagttaaaaatatttccgcgaattaggctccatttagaaaccttttatttttttttggctctccaaactagaaaggatagaaattcatttagtaacatcaattaatttttctattccctcgaatagaaaaacgattgaggaatagatttggaatagaaataagaaatagaaaaaagtaacttcttgaatttatagaaataagtcacttttttttttctttttttcccgtcttcttccttgccgcttgtccccccctactaccgcctcccctcggccatcgggcggctgtggccggtggacggcaaacaaaggacaggatcaacaaccggcacatagtgaagaaaagaaaaagagaaaaataattttaaaaaaattattaaaaaattaaaagaaatgctacgttataagaaaatttatggattgtactaaacgcatttatattctttttctatttcgagaatataaattttgtgtagttaccaaaaatgttcttttacttagaaattattctagagaataaaaatagaaaaagactatttcttaaaaaaaaaaaaattctaggaacaaaaatgttactaaacagacctttagtttctttgactttcatgtgtttggtttattgaaaataatttctatagaaaaccatttaaggttgaacaaaatattcatacttaaaataagaaaaatgaattctctaatgaaaatgatgttcacccgtattgttatataaagtaaatggccttttctatttttaacatatcccaattgttccaaccccccccccccccccaaaaaaaatacttgtctcataaatattctattcatgaacaatcaattcgtaatttaattttaatttaatctctcacatatttcagcattcaaatttgaatttttttttcccatccaaccagcaccatcttaaaaaaaataaaaaataaatctcaatacatttttctctttccacgtctattgattcatttttttttttgtgttgtctgtatttattaataatttatttctcgttcctaatttatttgttgcgcatatgcacattcgcgagtgttatataccgaaggtgcttaacattatttcaaaaatcttatataaatgattatataatcacttaaaaaatttcacatgctttaattaaatcttttccttatatgttaaagaggaaaaagcaccaaagtcctacattttgcttactgtgatatatttacctttatgatgtggacacatagtggcaaacaaagctaagtgactcaaatgaaataaaaactgcgctgttttgactgggaagtatgctgacttggtgcaaattttagggctctttgttcatgttcttgttgggaaataatccagctgtttgtgtttgctgtgtttctattcaagggacagaacacacatgactagacatgggaaacaagcacattcaggccaaccaaaaaattgacttcattaagtggtaatttctctgtgtgattctcataaaaaacgtcagtagaaagaaagagaaaatacatgaatctgggcttcatttggttacgatacaaacggatatgctcatggtaattcgtcgaatgaaaaattctcggaaaaagaaagagagagagagaatttagttaagtagaatgttcgagcccattaattttttgagttgcattgagaatagtcatctccatcataggaaacacttaagccctcatcgttactcaccgatcatcgctacagcccttgaggggcacatagatgccgctggaatcgtgacctacggctaagtcttaaagttgctggtatggtcacatccttcaactactgactaccgtttgtcatccatgctttagccataatactctccagcaccatcatcaaatcaacgagataatatttacattacgacgtggatcttttcattttaagttaagtgatcgtcatatcaactttatgttgagataataattgggatgggacgttgtctttttcaattttaagccaagtgatcactacttcagctccatttgccatcaacatcccgtaagtctttaagtccgaacccttaacatattcaatcggaccgattttcctgcgtaggacgctcgatttgttattgtcggtgcgagggaccctagccatgcccgatctctcccaccacaaaatatgaacgcgataaaatattttcttccgggcgtgaggaaagggagagcgtgtgatccaaagtcagaatagaaaaataattcattcagaaaaatacaaatgaaagtttcttcttttgaggccgggcagaggcagatgggcatgatgcctccaaatggaaaagcaacaggagagtagtcatttactttttgacaattggcaactaattaaataattaataaaaggaagtcgaacaattcaaaccaaaagttggtgtgtacgtgggaacacgctttcagatccgcatttatagcaatcaaaatccgcccccacctgtcccactgtcctaataaaagaaaaaaagaagaaaataaaatcatatcctaaagctgaatttggcaataactttaacttattcatatcataccgagcatctcctcttttaggttcaataattctcattaattaattttctaaaaaatcccaactttaagttcaatccaaatttaccccgaactttatttatcaaaaaaactcaattttaagttcggttccaaatctactactctaaactttaactttaatttcaaatatgtcattgttagtcttttgtccaaaaataactatttaacgtctctctcaaagaataattttattttggagataatttccacgttaccttattaatgttgatttgttaccgatgtggaaatatcacgccaaaagcctcatggtgattttggacggtcggttaacaaaagtaaatttgagattaaattatacgtagatgattgctttttcaaaaaaaaaatttgagataactttaggattatgctcaaaattaataatttctttagatcaaaaaagatccaggattggatataaagttgtagacttgtttttagacaaaaaaaaagaagaagctcaggttagaattgagacatgacataaagtttgagattcttttttgaggtagaattagattaaatctaaagggttaatccggtaataatcttgatttcccttaatatttctctgtctgtctttgtaaaagcccggcacagcatcgtcttcggctcctcgcgatatcaccaacttgcttccgcacagagagagagagagagaatggcgactattacggtgccaccgtcggttccgtctccggctgaggatgccgagcagctccaaaaagctttcgcaggtctcctgtattcatcatcatcatcgtcatcgctaaacttttctctttccatctactttcgtgttgctctgaacattcgactacgtggatcctcttcgagctgtcgtttcgtgcttcgatcgtcgtcggtttcgggagatcggatgctcatctgggtgtctttatttttttttctttttaatcttagcacaatgcatgtccttctctgtgtttgtttcgatggatctatgatcccgtgtcctgctgcggagtctctttctgatctgtgtcatggattgttagttccttctgatcaagaatagtttttagcgctagacgttcctttgtccgcgttgatctgatcagtcttgtcttacatgtcccctctttgcttctgctactggatgagctaatcaaaaacacagagaagaggcaagagccattgcttccgagttcatttgactggtgttaagcacttctacacatggagtttggtagtgattattgattatgcgcattttgtaggacgagttcagtggaaaaaagttcaaggatgatgttgaataattgataaaagttctgagaccatttgtgtcgtaatcgccatttttcttctgggtttttgtcaatcacgcgggctgctcttctagcgtatgtatccgcagcgcatttttgtacgttctgatggttgtttgtttgtggtgggcgagcaaattgtttagctgttggaaaatttgtgtccgcaggatgggggacgaatgaagatctgatcatatccatactgcctcatagaaacgcagcgcagcggaaagtaatccgacaaacatatgccgagacatatggggaagatcttctcaaagcgcttgacaaggaactctctagtgactttgaggtcagttttctattctgcagtgtgaaggatctctccaaaagccggttcttgctcagctgttgtcctctttgtttcccgtctcttatttccatcaaacgtttatcagagatctgtgcttctgtggaccctggatcctgcggagcgtgatgcgttcttgtccagtgaagctaccaagagattgacttcgagcaactgggttctcatggaaattgcttgcacgaggtcttcaatggagttattcatggtgaagcaggcctatcatgctcgttataagaaatctcttgaagaagacatcgcatatcacactactggggatttccgcaaggtactcctagcttttaatctcattgcaggatcatcctgtcgatcaaatagatatgaagtcaattttctgtagttgcactgcgtgtgaaaatatatgttgcctctactgtctcaaactgatgccttaaatacacaaggccagaagcttggagatttaggaagagaaatactaaaatatctttcaagtttgttaggtatgcttctaatggcaactcgtaagaatcacagaaatgtgaaagtctcgtgcttttctatgctattccgtttggctgtgcatgacctcatagtttcctagagcttgactttgttgtttggagctcaacaaagcatgcttattgctcacgcatacactgcagctgcttgttcctctggcaagtacctttcggtatgaggggcctgaggtgaacatgacattggcgagatcagaggctaagatacttcatgagaagattcacgagaaggcttacaatcatgatgaactcatcagaattgttactacaagaagtaaagctcagcttaatgcaaccctcaattactacaacaatgagtttgggaatgccatcaacaaggtatcctacttattttctccatacctacatactatagtattgccaaatttataatggtgtcaagtggatcttgatctggaacttgaacttaactaagcaaaggattcgccatggactctctgttctttggattaccttcagaatttgtgaagttgcagtttataatgcaattgcacatgcgtctaaaagctatggagaaaataatcctttacttctctggatgtttggcattgcaaatgtatctagagatctactctgctataatgagattgttgaaagtgaccttttggagagtgaaatgccacaattaagattttacttgatacaggcaccttccccccacattttcctgtactgatatatgaggacagatgaaagatccttttcatctgatacctagatcagtatccatcattatcatgagaccaaacttgaaaatccatattctttaggctctaatgtaacaagcttgatgttttaatagtaatgagtcgtcctcagataatttttattataaaagagaagccgaaaccgccctacataaagactaacttgggctgatgtcactttgatctgcaagttgcctagttgatttctcctgatatataagtgtttacgaccactctaatggtctcgctagatatttttcatttatatattttcctattctgtatgtcaggtgtcagctgttgaatttctttcaatttcttagtggagatttttatgttcattttaagacacagcttactctgggagattgctttggtgctgtaatcgtgtggaaacctctgtaatgcaggatctgaaggctgatccaa

SEQ ID NO: 9917 - DNA, 747 bp, Eucalyptus grandis
  Intron number 11 from transcript Egrandis_v1_0.050480m (lo cus Egrandis_v1_0.050480m.g) derived from phytozome v7.0 ( chr-ID scaffold_6; pos 40873577 to 40874323)
gtttaaccgccaaagaagtctcacatatgatagagatgccaggtgggttgctaatctttcattgaatttttcttctccagttaaaatgaagtaggaaagttaatccactgttttgatatattctgtgtaatgtttcaggtgaggcaatgcccgaaattgtcatggatgtattccaagcatttggattggcaataaaggtcagttgtggtgaaactaaatcaaattcaagaatattgttgtctaacagcaaaaaattcttctattgaacttcgcaaaaagtattagttggagtttcccctggcttatttttttttttggtaaagatcccctggcttatttttggtacctcttattcctgtatttcttgtgcttatgatttttcatttttcccgttaatccaccaaattttctggatttgatatttgaggtgggtctctccatttaaaactaattgagagagagatagagagggcgccgggttggggggacaagtgtatttaattctagacaaggaacccaggagtttttatagccagagatgataagcagccatgattttcttaagccgctaaaatttctaagtttaaggggtcataatagattcgtagcttcataaaggactacatctagctcagaactttaaaaaaatgatattcaacactggaatttttattggaaaagatatgttaaacttccattttcaataatctttacaggtcaacggatacaactcaactcgtctaattg

SEQ ID NO: 9918 - DNA, 593 bp, Eucalyptus grandis
  Intron number 3 from transcript Egrandis_v1_0.022417m (loc us Egrandis_v1_0.022417m.g) derived from phytozome v7.0 (c hr-ID scaffold_1; pos 40066850 to 40067442 reverse strand)
atccccaaggagcagagactgctgttcttctgtcggtatgcattatgttttcacacattccagttaatttttctgttgctctgctttcgtattttagcaggaaaaaatcaaagcactatcctacttcaggaagtgtttgcagtttacactccacagccaactctgctatgaggagttctactagttctttcaatcatgcatgctttttggtagatatcgagtctaaatggtaacaggtggccacgtaagcgaggaaagtgcaatggtgaaagttaattatttacagccagcatgcacttctgagtgcagaacacctaatgcagtgggcgatgggtttgaaaacttgaaatcttttagtttattcttcgtattttttgcaacatgaaattcatgcctgcaagctcaattaggtgttttacttgagtagaatatattatcctataaatgagtgtttgatttgattgttaccagatgaaagtttcttaaaggtattttactagttgtgtaatcccctttttggtttcattcaaacttatcatgtattttgatctgatgcagggagcaacaatagttgatcagtctgttactattgc

SEQ ID NO: 9919 - DNA, 1496 bp, Eucalyptus grandis
  Intron number 5 from transcript Egrandis_v1_0.014627m (loc us Egrandis_v1_0.014627m.g) derived from phytozome v7.0 (c hr-ID scaffold_3; pos 49703915 to 49705410)
ttgtttacctgcaagggacatatttgaaaccacatgtaagtacctccttttgaagtttataaactgttagctcttttgagatatagaatcagtctactttgtaatggataatttcagggcttggattttcctcttgatttctcttgacttctataatgacctctcgacacaatttattattggccagacatcatagagtaaggtagtatttctcctggttggatgagaaacagaactttcaccctagattgctatgattctgataaattatatagttgatactataaaaatttcattttatagtttttgaattgatgcttcatgttttgtgagtaagtggttgaagtatgcttaagagttagttttgttgtcatggatagaaaactttaatctcacagtttgtggtattactgggtttcagtgatatggagattgttgatatccctgcaaactacaaactatgcacacatgctgatataggttattcttgccttatggatcgctaaaattggcaatctgaaatataatcagttcactagacaattagaaagcatttacacaaacttttgaaatcttaaaaataacttggatgaatgattatagtaacattaaattaaatgttgctctaaacttgcaatcatgctacaaaaactagtgaaagaaactttttgtgttacaaagtgagtgatggtggctgatccttggagctctatcatgatccaaaatattgaaattattgaacctactagtcggatatcatgcttcttgacatgtgatctactccattccacttcggtaccattttccatagcataaaaagtctaggtcactaaggtagatatactttgttatagatgaatcttaagtagacgaggtacctctgcattggcggcatgattagtaaaactatctttgactaatgatctgcacacggtctttatgtgtaaggcgattcatggtgagatgagaggagaaagtaagtccttgtgattcttgaaatgattcttgcagcaaaactaagtccttttgatgtttagcccttgtctacttattactttatgcttaattaagaaagaagaacaattaaaaatcatttaaattttccgtctttgttcctcgagccaaatggaaagtgagtgacatttactgcaattggtttgtagtagtcatcttataggcacagtttcttccatgtcaagcaggattccattgctaaaattaattgcatgatgtactccaagttgcgttcgttatttattatttggcgtttaagattctattaaagtgtttgtttacttgacatcaactcgttgacccattttcacagtaaaaactgcaagcaataaccatttagtaggtgtaatattcaatttctgggatttaattattagtaagttgtttgaatgtctcagcactcgtgttagtttcaatttatgagttggtcactttttatttacttcacttttgggcagctggctatcttggacggtgtcact

SEQ ID NO: 9920 - DNA, 4564 bp, Eucalyptus grandis
  Intron number 1 from transcript Egrandis_v1_0.016307m (loc us Egrandis_v1_0.016307m.g) derived from phytozome v7.0 (c hr-ID scaffold_2; pos 52654724 to 52659287)
gaccttacagttacgagcagaactcttcctatcaggtacttcttattacaagatatacatacatataacaagatatatcattttagcttttctctttgtactagcagtaaaatccttgtcgcatgcagtccgttccttaaagtttccctgcacttacaaagagtatcgctctaattaacccttatgaattaagaaacaagctgtaacctaattagacgttccaaacatgagattttacagtgcatatatagtgtgaaagatcaaatatatgccatgcacttaaactatttacatatctcctcaatcttcaagtaaaccaatgtgtttaacttctcgcatgtaattaaccaagttatcaatcaagaattgaaatagagttggtcgacaaaattgctgcaagtgcttttgtgcatagttagcctgatctttacatggtcagtaattaatattacactatataaagaattgtactcttggtaatctcttctttgctaacgagcgtaagatctaacgcatgcgtttcctgttttcaccttgactttcgatgttcccccaccaatccgccccatcgtcggcacagtaatgattcttttgttgcacaacttcatgctatgtattgcacggcttaacctgcagagagagagagagaatggaggatgaaaggatgcttagggtatgtttaagccctatttggtaaccatcctagaacaactaattttattcttttgtttccggaaacaaaaaaagaacataattccatttggtaaaatttttgttctcgagaatagatttgaaacggaattaagaagtagaaaaaagttgttttttattcttgggaacaatttcaagaatcaagccaaacaatttcttttatttattttctccttctctcttcttcttcttccccccagtcctaactagtgaccgtgtgacggcccaaagtgcgggggcgcgtctccaatcccacatcgcttaggggggagtcctagggctagttataaggcttaggtccctctaatcttgtgacgcattttaaagccgtgaggactcagtgtccaaagcggatgtagttacaaatggggctcgagtcgttacaaatgatatcagagccaactcccgaccgaccgcgtgtggtgctcctaaggggggagagtatgacggcccaagcgcgggggcgcgtctcctgtcccggctagtttataaagtttaggtccctctaaccttatgacgcgttttaaagccgcgatgactcagtgtccaaagcggacaatattatacagtgaggcccaaatcattacacaccggccattgtcaacccccgatagtggtggctggcgattgattgagcgaggtttgctgagctcactcggccacaacgagtcttgaccttgccaaatctaggcaaggccaagtctcgcccaggtggcgtgaggtcagcctcgcaaagctagggcaagcctcgccaggccaagccaaggtcgatgtcgtgccacttgggcgagtttgagccttgcctagccaccgatgaggctcaacttcacctagatctagcgaagttgatgctcaccatggccaagtgagccttcaatgagctcatcggacctcgctcagccattcaccggccatggcaatccacaactgaccataaagaaagaggaagaagaagagaaaagagaaatgtaataaaagtattaaaaattaaaagaaaacaaatttaaaatcctactaaacgcatttctattctgagaataaaaattttgtgcaattaccaaatgtgttttttttgtccataaattgttcttgggaacagaatcagaaaaaaattatttctgataaaaaattgttcacaagaatggaatgtttaccacatgcacattagtaatcattttatttctgggaacaatttctgatcataaatatttttttttattctcgaaaataatttttaaatattaaaaggtgtttgctatccaaaaaattctattcccataatagaattgcttctgacaccatcttcaaaatttctaatccaaacaattttcttttattttttaataattttattacttttttttcttcttttctttttttcttttctttctcttcctcttcaacctttagctagtcgcgagccttgggatgattagtgtcgggtcagatgagggccaatgacctcgtcgaagggtcgttggccctcgacaaggtcatgcctcgttgaccaaaccttatcggcagttgagcgaggcttggccaagccttagttgggcgaggtcaagtctcactagtggctgggcaaggctcggccgagccttggttgggtgaggcttaacctcgcctagatctggtgaggttgaaccttgccttgccatagctcggccaaacctcgccctgttaggtgaggctcactctagtggctaagtaagccttgcccggcctcgctctggcctaatgaacctcccgctagcttgtcgaacctcacccaattagtcgctggtgactgatggcagtagacagctacggtggtggaagaataagaaaaagagaaaagaaaagaaagaaattttgattggcttgattctagaattattctcgaaaataaagaaacaatttttttttatttcttaattctattacaaatttattcccattaacaaatttatttccagaaacaaaatgtttatcaaatagatttctattctaaatttattatcgggaacaagaaaatagaaattgttattatctggcaaattgttaaatgcgccctagcatcgctgaaccaatggccaaatagacaaaaaaattattaaaaaaaatttgaacttattgtacttttgtcaattcagtcattaattttttaagtttgctaatccgatcctaaacattcacttcttggcaattgagtacacccagccaattttaatcgaaaattgctaatgtggccagtgtgactgatgtggcgtttttaaaataatttttaatatatatatatatatatatatattatttttttatttttacttttttatttgggttaaagtcggcaagggttgccgaccaaccttcgttggccacaaaggagggtcaacaacccttatcagccacaaggagggtcgaccaacccctactggccttggacaacggtgttgccacccttgctggcaaaagtgagggcttgtgagccctcacctagaattggcaagggccgtgatgccctcatcgaatctagccaggcgagggcgtcgtggtcctcgctcaaggccaacgagggtcggctagccctcgcctatagaatgcaatggctaccggccctcgattgtggtcaatgacgatcggccgacaaccctcgctagccctaaccccaaactcaataaagaagaataaaaaatattttttaaaaaaaaaggaaaaagacattaaaaattcaaaaaaaatatatttaaaaacgccacgttagcactaactggccacgttagcaatttccgccaaatttggccagatgaactcaattggtaagaagtgaaaatgtttaagattgaattggtaaaagtataatatatttaggactttttggaaaattttcccccgagcggaccttataactatgcctagaactccttctattagggatcttctatacaagatgaatacaaattccagtgtatgtggatcgtgttggttgtcactttatataattttatagcttcacgtggtagatcgaatttcataaaaagttttagcacgcttaacattctctccttttttctactagctgtgaaaagaatacaactcatgcccaaatgttgcatccattgaagattagaacagaaagctcgtgtgtaactggctccatggaccaagcacttactctatgcatcccatcatagtactgttttgatgatatatatttcaagaagtagatgatcatttttcactacctaaagatattgattttttaaaattatttagttataatttggttcaccaacgataaaattccctttgtctcataatttttagtttagtaattggactgtcctatctcatccttccttcaatatcttttccactttgcctctctcttcatacatccacttctaatcactattatatgaaaataccagcttttatttggtgaattttctctcttattgcacaagtatgctagtttttgagttgctactcgtgtttgcgaacttagcatattttctgtatttcattaccctgcttcggctgcatcaaacactatcaccgtcgtaaagtcattggcaaagactcgattcagcagttaagataacccttaacaggtgtactcaagcggtgagtattaattatggggttggtctggatgtatcaatcacttcataagctagtgcatgtattagatatctagtgaatctttcttccgtctcgtgcattcttagagggactggacattggacgatctctccactaaacatatggatgtgttttggaaaagtcttaattgcaattattaaaattaagtattgcaaaagtaatcaccacatattgtccgactctacagaaaggagtcgccgccgccgcc

SEQ ID NO: 9921 - DNA, 854 bp, Eucalyptus grandis
  Intron number 5 from transcript Egrandis_v1_0.001220m (loc us Egrandis_v1_0.001220m.g) derived from phytozome v7.0 (c hr-ID scaffold_3; pos 17608922 to 17609775 reverse strand)
ggctccctcaaacaagtcttacgaaagaaagataggtataaatctgtctgaattatgtacatggaacttaatatcataagcagacaaacaaataagtttaatgtcaataatttgaagttggaaatttaagtacctgacctaatgctgctgcttgcttttgctttttgtggattcccatataatcagtatcaaaaccagttggtttggtttagttgccttgacatcctgaaattctgaactttgtgaattatcaccaagatcataaagattttaagtgttgttgcagagagtaaccttgcattagcccgtcactttgtattctggcaagtttatttttctgttaccatctattctggcattagcctggcttgttcaggtgattatagagttgtcgacattctttatgaagttacggtgactgttgtcttgcactgttctattctaaagcccggaaccaattcctgaattgaagcaggcacatatgcctcctcagtactgactaaaaaaaagaagtttacccaactctatgcttgttaagagggatgaaataaattatggagtggagaacgttggcaggaaaggaaaaagcaactctcttccctgcaaggtcttcagtctgaaattcgaaactgaagtataagacacattctttatactgatatgagctgtgggtagttgtaccttagaaatcttctcaactaaaaccatttgtgaaatattcacatgaccgtttcatctctgttgtgtggacaaagtcctgtttcagcagttatggaatttaatttaaggccaattgcttatgtttctactggatgacaggacgattgatcgtcggaagaggctgattatagcaa

SEQ ID NO: 9922 - DNA, 2282 bp, Eucalyptus grandis
  Intron number 4 from transcript Egrandis_v1_0.021793m (loc us Egrandis_v1_0.021793m.g) derived from phytozome v7.0 (c hr-ID scaffold_8; pos 25691450 to 25693731 reverse strand)
tcatcctcgacggcgtcgtcggtccaccgaggttccttctcttctctctttatccaccttgttcctctctcttttttgcttttcactctttatctattaatctagaacgagatgaaaaacatagcttcgtaatttacgaacttctgaacaaaacccgttgttcaaaagattgaattatccctccttgtaaacttgtttaaggtattgcttagggtttgggtgatttatttttggttgatttttgagttttttttttttttgggtgagcgtgagaatttatgatttgggttaggcatttttagaaaaaaggagtttttttttttttttaaagtaggaatatattaataattgttacgaaagtgtaaagcgcatttgctaaaattatccaaccccccccccccccccccccctttttttttgttgagaaatatccaacccccctttttgggtagcagcattttggctttttaaaagggatgttttagaccttctttggagtatcttggcaagtgcctccaaaaaaggttcgaagcatctccaagaaattgaacttcctaggatatttggtaagtgcccggaaaaagctgaaagcatctggtctaaatatgtaacaagaccaatccaatagttaaaagtttcagcctcaaataattttttttttttaaagtccaatgcaaatccatatatattatccttagtgaatcatgatagcgtaatattaaaggaatgaaattccaaatttgtatgtaagttaaaattcttaaattcacaattctcaaaggggcaatatggtaattcaaatgtaaagaaatttctagcattcaaaaaaatcataatttcctaatttcctgcatctttaaaacactctccatattccaatttgaataacccacatctttttttagcaagctaaacccttatcactttccagttaacaaaagaaaatagacaaaaaaaacttcaaaatatttaattttatataatacatttatgtgttatttatcttcactcacgtaattttgaaattgaagttcttagaactgcaatatgagaataatgcttgagctttcatgaatatcaatctacgtaactaaatattcattgccaacacaacgattaaacttaataacacttgagtttttgacaattctagtgtgaccgccgtgttaaacttggccttcattttgtttaattgcttttggaaaatctcgaaatttaataaaactataaaatgcagaaaaataagtttttttttttttgggtcggcagaaaaaaaaaaaagttgtacaatttgtttcttggcacttttgtaattttcctgaagtgaccctcttttgtcccgtttcaaggtgggtgatataagcaagcgtggccttattagcgccttttatgaaacggcgggtggggcccaccgggttttgtcgctttctgtcccgtcattaataagctagtggatgaagtgaagatgacgtaatatttggcaaaaatatcttcgaagagattttccttttgaatttgtactttttgtttttcttttaaatattgagaagaagaaccgtataaaaactaggagtttacaatcaagcacatccgatccaaaatttgtgaaatccaattattaaattcgaattatttatcaagttcaacggcatctttaaaagagaagcatataaaattttaacgacaatgtaagaatcattttagaataattacacaacaatatactcacttaaccaacgtacaagttaacgaaatcatcaaaatcaaattctttagaaagccaaaacacacatcggctaagttcactaatgaatttttttttctaatgagtgtgtgaatagaatggtatttttagtagaaaataagttctaataaaaacgcaaagatgcttgagccagtgataagacagtcacccatcttccatgaggttcaatttcatgtcatgagcgaatggctggttgtgctttacctagctacgtcatatgtcctaattgatagtatcttggcaagactttagtgactgagttgcttagtctcaatcatgacttaacccaaacgtttctcagcaaatttaggattaatcattaacgcaggaccccgcttctcgtcctttaattaatacgaagaaaattctcattaattgaacatgtttgccgtcaccaacatggaaacaacgagaagacagttgtgattgatgaatatgatggtgatgatgatgataagcagcaatgaatggtgaaattgcaggggaccatcgacggcacatagaccgttggttgggg

SEQ ID NO: 9923 - DNA, 3774 bp, Eucalyptus grandis
  Intron number 3 from transcript Egrandis_v1_0.025479m (loc us Egrandis_v1_0.019605m.g) derived from phytozome v7.0 (c hr-ID scaffold_9; pos 27940593 to 27944366 reverse strand)
tggtcctaaaacacagctagccaaggaagtctttggtgcatcaagagtggcagctacatctagcaccggaaagctggacttgctgaagagtttgggagctgatttggcaattgattacaccaaagagaacttcgaagacctcccggagaaattcgacgtggtgtatgatgcggttggtatgtgtttgaaatatactctgttattccatttacaagtttggagttcgcccaacttcttagtcttgtcttaataatcttaagctttgatgaattcccccgtctcaacaaaacaaacaaggggatgcatatacactttccaagtggaattacagctatttctttatcctcttttagctggtatttgactaaagttcaaggtgcacttatcatatgttttgtaggcttctttgaagagtttaatcattctaaatgaaatgcatgcaggtcaaagtgagagggcagtaagggcagtgaaggaaggaggaagcgtggtgacaatatcagggaaggcaactccacctgctgtcctattctttttgacatctaatggctcagtcttggagaaactcaatcccttcctagagaaccagaaaataaagccagtgattgatcccaaaggcacattcccattttctcaagctctcgaagcgttcttgtttctccagactggccgagtcaccggaaagatcgtcatccacccgatcccatgagattagagagagggagatcctagcgttctctctaaatatagaactaggagcacatccacacatatgtatatatagtggctagctgtataaattatatgtgtgatatcaaaaacaagtcatctatcttttcaataaatttatattagaaatattcatttcattagtaatattaaagcgaatatcgacggtttatttcattgatcaatctcatactatggttgtccaaaaacccaacccaacacgacccgaacatgacccaaatacaaactgtatacaaaacaagtcgagtacatgtttcaagtcttaaaattgttcaaataacaattataaaataagcaaacaaacatgttttggtttgatttagagtcggaactttgtttggccgtgaacactttattgactccaaacaaacacgttctctcatccaaacacatcagaccccgagtaccgacgactctgccttctcctgacaactatgccttctcctctcgtcaccaatttcattgccctccaccgcccgtcctctttcttttccagatttatgcattgcgcgcacgtcactggtgattcgctcctctcgttcgaatgccactgtcaatgacttcttctcgttcgaatgccactgtcaatgacttcttgtgactctctctctctctctctctctctctctctctctctctctctctctctctctctttcgctggctctgtttctacgtgcgctctgttctttcgcgttgataaaatcttggggaggaggaatttggcgtctagtgaatccgggtctccgtaattacatgcttttcatgtcttgatgctctgaagcgtttttggttaactaattctagtttcctggtcgtctgcgttctttccgtagtgctctctagtagttatttgatcttgcaaagcaccaagaaagaaaaaaggcgaggatatgagattctgctgtagtttctctatgttgggctctgtctactttcgcgcattctctaagtccacatctaccgcactgctgttgcatggaagatggctcgaaagaaaagagagctgcttaaatttagatggaaaaaaatcaatttgtctgctcttgttattagttttagactgtgtagatgagaatactgcactttcttgctctttttagtgtgcaatccaagcatcgacaccagccaatctatgtggaatccatgcggcactgccattaaaattgatttcatgtgtgatgctggatagttagttgtagggttttatagtgagagatgataggttattaaacacgtaggttgcactgaacctggaggcagaattcgatgctcctgacagcccaaaccagaccaagtgctgatcaaagtcctcactgctgcattgcatgctgttgacctgaagagagcacctgggttcctcaaagccaccgtcacttgcgctccagtaggtaacacttccaactgtatgattgaccatgacatattattgggcagtagagaaatgccagtcgggcccaggtcccggatgatcgggaccgagacctagggggccgggccgttgaccctggcggcagggcttgggacctcagtggccaccccagagcccttgaggctgatcccaggcccagatccccgacaccctggcccaagatcctgatgaccggacctggcaacccggttctctagcccggctcctgctaagatgagtccgggttcaggattgtcaaagcttgaatccgaaacttagagttatacttgagatttcaactttcatattatttgcaaagtgcccaaaaaaaaaaaaaaacatccttcgaaaatattttcgaacaaagttcattttcaatgaaacaaatggagatataaataaaagatcgttttattcaaaataacaattaatgttgcagtaatatgctgatgaatcataaaatgatatcaaatcaaaataatagtgtctgaatgattgaaaagcattgatgaagattactattttaccaaaaatgtcccactatcatcatgaaatgatggagtccactcgaacattgcatctagacacaatgaacttggaccacaatcaattcttatacatcaacgaacgcaatgaacttggaccgcaatcaattctttatacatcgacgaatccaaggcgcttaaacccaactcaagttttcacgacgataatgaacctcacccaccctttacctttacgcgttaccttaactctttttatagattgacaaggtgaggtcacttcaagcaccaagaatcaacaaaactctattgttcttccatctcccaccaattcacacacaattgcttagcttagcttagcttagcttagcttagcttttgcttattcaatggcttccgactcagatgtcaccatcccctcgaagatcaaggcttgggtctatgccgaacgtgggaaccccgccgatgtcttgaagctggttccagacgttggggttcctgagattaaggaagaccaggtccttgttaaggttgttgccgcttccctaaatcccgttgatttcaagagagctctcggcttctttaaggacatcgactctccgccgcctgtaagacatcatagtacttacctccttcttttttccctttaattttgttcattgctggtgactactgatggctgttaaacgcgagcctattttgatctggaatttctcgttttgttattcatcaattatggtaacaccacttgtgaaatttaatttttggccattatcggacgatataaaatcttgatagcttctaattacttctttctgttggataatttatttttatttttttgcatcctttttctttatttcttttttttttatattcattaagattgtgcccggctacgacgtggccggtgtggtggtgaaagtcggggatcaagtgaagaagttcaaagttggggatgaagtgtacggagacatcaacgagaaagctttggaccatccaaagcaacatggcactctggctgagtacactgctgtggaagagaggctgctggctctcaagcccaagaacttgagcttcattgaagccgcttcgcttcccttggccattg

SEQ ID NO: 9924 - DNA, 1329 bp, Eucalyptus grandis
  Intron number 8 from transcript Egrandis_v1_0.013971m (loc us Egrandis_v1_0.013971m.g) derived from phytozome v7.0 (c hr-ID scaffold_7; pos 41792475 to 41793803 reverse strand)
ggtgcaagttttaagaaaattggaaagagaataaggtttgtttcagcttctttacaaatgttggtcagtagtttctctgtaaattttgtccgtgtcgactcactttggatgcttgatttttgtattgagaattggctttggaagatgtagattgaaaataagagaaattcattttctcagtttcaattgtagtagcacaaaatttgcacgtctttcgggtcattgccatttggtgcaagttaccagttagctatattacagtttctgcttgattgcaatcttacagcagaaaaatcatagataatgtcaggatagttccttaggtttgctgtataacaaaaatactactacaatatagcagtcatgtgtattcttctatgctggatgctggactaatttgctgacaaaaattcaaatcttatttgcatggaactacaagtagtttgattagtctaggggagggggatcaagatcaagaagttatcaatttttatttttttttattttttaagaatttgattgattaagggaacaaattcgacagggggattctgaaattgcagaggcttggttcgatcaagccactgagtattggaaacaacctatagtgctcactcttggaccatatgcatctcagttagtttaaatctagtagaacattgatcaagatccacaaacaatactacagctggagtttgcttaaatgtcatgaaaatcacgaactttggacaggtctagaaacgacttgatggagataaatttgaaagtagaatatactttttctttttcgcattttcatgtggaaaaatgggatagggctagaaaggtgtagggtatgtgtgagcagaaacactgcacaaaacaatgaaatgattccaaactgccaatctcttaaactagttacttccttttttatttgaatatgattaccatcttaactgaagaatttttccactatttttctagatttttacgtgacgagaagtttgatgttcttttctaaaggaaacttagttttcagttgctactagatattattaagaagatttgggcatcagattttctttagactgcatttacaatttgagaagaatcaaaggaagtgttggttcaatttgcttgggatagaacatttgtcactgagcagttatagcttatagagagtacaatctcagagcctgttattctgctgctgtttacatttgcgcctttgtttagtggatatttcagatttggcatgcttgggtaagcatgaactgcttaacctcgttatttgttttgggaacagtcgtctgaacatttttatgcatctttatgcctccagtgagc

SEQ ID NO: 9925 - DNA, 8364 bp, Eucalyptus grandis
  Intron number 3 from transcript Egrandis_v1_0.025401m (loc us Egrandis_v1_0.025401m.g) derived from phytozome v7.0 (c hr-ID scaffold_8; pos 27563144 to 27571507 reverse strand)
tcgcggacaagctcatacaagctgaaaagcgcaaagtaggtgcttcttcaattgattgcttggttctgaatgtggaatgtcttaacagtacggcgtccgaagcctcttatgttttgggtcaatagattatttggtagataatttgattcttggtagagttgctgagaattgtgtcttggagctgtcttattgaggggaaacattgaagtgaagtatctttctgcagtgctgaagaattattccttcgtatgcatggtgacagtatgaatttcttactcaaaaggctggaaatgttagtgttgggaataacggatccccgaaaaaccggattcgacaccgaatcgaacccctaaatcaatgcggaagacgaagcccgggaaaacacgcatcaccgatcgtaaagcacaccacggattcgagtgtaccttgttagccacagattaagcaccaacgccaacaagaggaagagaaacggtcctgttcgatccgatgaagccttgaagggaaggaaagcgcgccgtatgcttactgttcttcctttttgggagagagagcgtgaggagagaaaagacgtacgttgaattgcaaaacgttgtcttctctctctctctcctcccttttataccttccccctccacgggccctattcccgtgggccgggccttttgggcccagcatgggcggacgggccttaagccaatccccaattaaaaccatcatctcccactcgcacatggtgggccgaacaatattctctttacctctcttcaacattcataccagtgaataatccgtgcgaccagcatactttgagagctcgttgttatacatctgttaggaatatatagcagctcattaatgggcgtcacactccgagtagatttagtatgcagtaccctagatcgatcgatcgatcacatttatatctcttctgatctctttaaacatgatacatatcgtattcacgattataattatcacaaaaaaacaatcataattggtcgaccagtgaatacaaaaactacaatgtgattctccaaaatcgatcttcctctttccttcaaactctcaatttcagtccagcttgcttttctagaaatgccccattagatcgaatcatctcatgaccattggcaacaccctaagatagcaaacactaaatagaaatcttgagaataagtaagagtcctgaggggactaaaaattgaggaactcttttcctcaagagtctcacacgtcataaaagttgagatcaaactttttgccactcttattggtcgtctcatgcatacgtagtatgaaatacgtattacggtattaactcctttcccatggagcgtatgtctgcacttttcaataccgtacagatgatagttcagacatacctaatgtctaacttgagttcacatatctactcaatcacaaaattcatcagaactcacatctggcatcatagacagataaagtaaaatatgtggggtattttactttcggacatcgtaagtattatgtcatcatcttaacacttagttaaggcgacatacgtattttaagcttgagctctcgattatcacctagataataagcttaaaatcagtctcatctctatttatcacacagtaaacagaggcgattacccgtgtgagtgggctaatcttttatctgtccgacatacttctcaacttaaaataatacactaagtattaagatgcataaagatcatacaaagattcataggcattaataatgaaacaacactagttcataaatgtgaacaactcagggaaattacaattcagtacatcagactctatgcaatcctagagattttacatgaccacaaaacacatctctaggtattggctttgtcataggatctgctaccattctatgcgtagatatgtactgtaagttcacatcctttcgtgcaaccatatccttgacaaagttatacttggtatctatatgtttggtcttgccatgatactttggatctttggtgtatgatatagctgcttggctatcacagttaaccaataattgatttgcagctttctcaataacacctaaatgatccaagaatctcttaagccaaactgcttcttgtactgctgctgataatgccacgaactcagcttccatcgtggataaggctatgcatgtttgcttcttactactccatgatatggcgccattgctcagtaagaaagcaaatcctgaggtagattttctttcatctaaatctcctccccaatcagcatctgaatagccttcaagtcgcagatcctttccttggtaattcaacttgtaatcagcagttcccttcagatacctcagtattctcttaacggctttccaatgtgctggacctggattggattggtatctactcaccattccaactgcaaaacatatgttgggtcttgtacacatcatagcgtacatcaagctcccaacagcacttgcataaggaacatgtttcatttgttccttctcttgtggagtccttggacacagtctatggctcaatccttcaccttttgcaataggagtgtttatgggtttacaatcttgcatacgaaaccgttttagaactttgtttatataagtttcttgcgaaagagacaacgatctcttcgaacgatctcttgaaatcttaactccaagaatgtatgcagcctcacccatatccttcacctcaaagttggaagacaaccaactcttgacagtcttaacaaactctatattgcttccagcaattagtatatcatcaacatataatgatatgatcacaaattgatccttggatcttttgatatatacacaatgatcctcatcaatcatcgtaaaatcatatgccattatggcattatgaaaacatatataccattgtcttgatgactgcttaagaccatatatcgacctcaaaagtcgacatactttttcttcttggcctttcactatgaaaccaacaggttgttccatatatatctcttcctctaattctccattgaggaaagcagtctttacatccatttgatgtaattcaagattcagactagccactattgccagaataatgcgaattgaggtaaatctcactacaggagaaaaagtatcttcataatcaattccttcctgttgattataccccttcgccacaaggcgagccttatgcctttcaatcgagccatcagcctttcgctttattttgagaatccatttgttcccaatagctctgcgtccttttggcagatcaaccagttcccagacttggtttgatttcattgactccatttcctcttccattgcattaatccatttttccttactagggcaattcagagcctcattaatatttcttggctcatcctcatcttgtggagcaaccataaaagtttccccttcaatgtcaaaatgtcgacggggaatactttgacgacttgttcgccgtatgggagattgtacactttgcacatcatcccccatcatgctcccacttggattaggtaatgatgatgtcgtctcatcatgtggttgcaattgagaatgagttgaatttaattcatcacttctcatattactcccacttggacgaagtccactaaggtcattatcttgatccaaggtttcaaatagggaacaatcttcccctatttcgcccttcttaggaaattcatcctctaggaatgtgacatctcgtgattcaaactcagttatactcccacttttctgctcacctatgaacacataccattttgagtgttctgagtatcttatgaaaatactcttctttcctctgggacccaatttcccaaacttgtgagaggactcatgtgtgtaggcagcacaaccccatggcttaagaaaacttaagtccggttttctacctgtccataactcatatagagtggaagtaactgatttggaaggcacacggttaagtatataggcatcagttaacaaagcatcactccaaaaggtaatgggtaagttagcatgcgccatcatggacctaaccatttccagtagggttctgtttcttctctctgcaacaccattttgttgaggagtatatggaatagacaactgtctttctattcctttttcatcacacaattttctgaactcatcagataaatattctcgacctcgatcggatctcaatgcttttattttcttgtctaattgattctctaccaggttcataaaccttttgaaacaacttattgcttcagatttatgagaaatcaaatagacatatccaaatcgagtgtaatcatctataaaagtgatgaaataaacagccccatgccttcctttcacattcattggaccacagatatcagtatggattaaatgcagaggaaattcagctctttttccttttccaaatggttttcttgtcgttttcccttctagccaatgcttacatatgggcaaatcgactttttcaatattgcccaacaagccctctttggctagtctattcatacgctgttggccaatgtgaccaagtctagcatggcacacattcacatcattatcatatttattaggagacgtgagaagggaataacaaacattagtattaacataatcaatatctaatacaataaaaccattcagaaaataaccacaaccatagtaatttgtatccaaaaacaaattcacacctctattacagaagttcatattaaaacctaatttaaccaacactaatacagacactaaattccgacgaatctccggagcatacagcacatcatgaaggaacaaagtgcgtccaccacgcatattcagttggcatgtgccattcctttcacttcagctctggagttgtttcccacatagatccacttagttccagttggtactcgtcggaattccacgaaggatcctctatccttcgctacatggtccgttgctcctgaatccacaatccacaaaggattagactcagttaagaacacataactcgacacaaaagtaaagttctgaaaagtacaaggggtgcataccttctttggctcacgacagtcgcgagcatagtgacccttcttgtcacagttgtagcatttcacccttgcaagctttttcatgcggagacgcttccctctttcatgttggttaaacttgggtttcttccctgaaggacctgcttcttccttgccttttcccttatcaaaccagttagggcgcttgcgcttggagctcgaagctccatttgagctagaactagcatgataaagttcagcatccggcttagccgccaacaggcggtcctcttccagctcaagatgacgcattgcatcctcaaaggttttgatattttcattgtgagtcagatgcaccttcatgtgctcccaactttgaggcaaggaacgaatcactgcttgcacctgctgctcatctgtgaggacatggccagcatctctcagctcagttatcatgtttgacatctttctaagatgttgcttcatggtctgaccatgaggtttcttataagagtcaaacctgatagtgagctacctcagtctagtcaccgaagtatgaccaaatctagctgccaatgcctcccacatttccttggcattgtcaaaacgccgaaactctcgcatgacgtcattttccatgctgctcagcaacgtgatgcgagctagagagttcattcttttccatgcagaaaaagcttctttgtctcttttgtgctgtgcagtggttccctcttcaggttctaccatggtcatgacaagagcctcaagtgcttcttgctcttccagcacatactggattttcatttgccaaatttcatagttgtctccattgagcttttcacgtttgttcagctcggcaactatgctctttgtggctgaagccattgatctgaacaaatcaggcaaatatgcacgaattattaatgcctatcatttatgcatccctatttacataaacccatcatattaatgaataatttcaagtgaggtttcagaatcaaaaggtcactatgtttccaatcatcctccaaaatcctaacttaaaactatcatcaatataattgtcttatgcaaaatcaattctatgaagctacaaaaacttctaaaactacccacagctaattacccacagcaaccagcaataacagaaagcaatacataatagaacattcaataaaaaatggaggggtgctttcaattaagggggatagaaatgaggaatcattacataatatggacgagagagatcacacttaacacatatcagccaatacaactaacaccaagtcagcacacgaactgggaaaagatcctattttgttcaatttcttgatcttttccctcgaaacaatacaataatattcatttacaaaaatacatcacaattttcttataggaagcagctcccgttgacatcccatatgcgattacaacacatcttgccattcaggtggaagagtgtttatgaaaaatcgcaccatctctgactgtgacataggacgaccatttccatatgatctgttgaatttttcccgttgacatcaaggacatgatcaattaagtcacctctctcccatcgatgatcactcagctcagctatcacttagacagcttatccttttgttcatcggtaactgcgcgaataggtgtgcgcaacctcaggggaggcattgttcctgcaacaaatgcagaacaaataaaggatcacattataatccacatagacttaattgaaaaagaaacacatcttttcctattttttttttttttatttttcgggtcaacggtcaaagtcaacggtcaacggcggtcaacggccgttgggcatcggaccggtcgggccggtcgggccggtgggcccggtacgcgcgaaccgacggcacgtgccgtgcgcgtgcgcgggctgacgtcacgctgacgtcagccggcacgtgccgcgcgcgtgccgggtctcgcgcgggttgggtcgggtcgccggccgggtcgccgtgctgacgtcatcgatgacgtcaccctagcggttattgaccgttgggtgacgtcatgctgacgtcagtacgcgtcagtccgcggaccggtgcgtgccggctcaccggaaccggtgcgtgcgccgcacgcgcggggcgagccagcgcttccgggcgcgtcgcgcccacgcgcagcgccttccggccgcgcgtgtgggcgcgtgcggtgtctcccggcggcgcacaacctgtccccggactcgtctcgacgtcgcctttcttcctatgccattagaatttgattgcgacttatgcaaactcggaaaaaaggacgtacagtgctcgggtgtcaggatttctcgcccgatccgtacggccgaagaacttttgcgaaaaatcaatcagaaagcacgaaacaagatcgggaaaacatgaaagcgggctctgataccaatgttgggaataacggatccccgaaaaaccggattcgacaccgaatcgaacccctaaatcaatgcggaagacgaagcccgggaaaacacgcatcaccgatcgtaaagcacaccacagattcgagcgtaccttgttagccacagattaagcaccaacgccagcaagaggaagagaacggtcctgttcgatccgatgaagccttgaagggaaggaaagcgcgccgtatgcttattgttcttcctttttgggagagagagcgtgaggagagaaaagacgtacgttgaattgcaaaacgttgtcttctctctctctctcctcccttttataccttccccctccacgggccctattcccgtgggccgggccttttgggcccagcatgggcggacgggccttaagcccatccccaattaaaaccatcatttagcttcatatcttaatctagatgatgaactcatttgtgagtaaataatttgacctcaataatctatgatgtacatctgagatgatcgacgcagtgagagagagagaaagagatcctcttgcttacagtcacaggtcaacctggcttcgtggcgcaccaattattggtctgacatggatccattaatttgaacgttttatggatctaaaccccaaattatttaagaggaaacagaaccaaaactctggttcagctgcattcagtgttctactaccaaatgtgttggtatggttgtagttatctcatttaatcataaaattaaacatataatatgcattcgactgcatttccaagactttcattcctatatcatattttatgatgatgactttcaaaattggcttgattcacgtctttaggctctggctgtaaacctataagtgatgtgttgataagttttggctttggcttggtgctaccatttgctttaaactgtttttctccaaacaggaaagtacgaaag

SEQ ID NO: 9926 - DNA, 2588 bp, Eucalyptus grandis
  Intron number 2 from transcript Egrandis_v1_0.029787m (loc us Egrandis_v1_0.029787m.g) derived from phytozome v7.0 (c hr-ID scaffold_8; pos 59278342 to 59280929 reverse strand)
aggccacccctgtcagcctcggcaagaccattcaggtcagctccctccgtcctctctcgcgtctcggtattaactcaccgctaaaatcatgaatctttagaggatttgggtgtctagcagcgatccatgtctgaccacattcagatgtgcccgtgcaaggcaactggctagtaattaatgactggtttgtccggagttgaattggcctgcgagttggcagacgagaatcttgggttaggaagcgtgccgtgtgcaaattgataggcctgttaaagttcatgaattgtgatattatattagcagggattttgtccaaaaggttataaatttattgcattttaatcaatttaattcaaaacattttagttttgccaattgagtcataaactatttatcaatttatcaattgagcacgttcgactacttttagctaaaaattgctgacataaacatccgttttatgcggcaccacttatattaacacggataatttttataacttattaatttcttttttaaaaaagcttctattaattttgctatatttcatttgttatttctcctttccctcttttttgcccttttttctatgtcagcgagtcactttcatcccttgctaggtgtggacgagatggtcctcacttagtttagggagacctttctggccagtgagggctgttagtgacctttgctgacactagaggtgatcgggtccaggatggatagggtttagacccgggctctatacccgaccctatttgcattagactctgtacccgacccaccctgtttttccggtctggttccggggtcaatcccgtttccattggaacttgttttgcaatctcccgatatcctatacgactttgaattttatattaatatgtgagaaaataacgtaatcctcctaatttgtatcgaaatattaagcacttataaaaaataaatacatgaaatttttgactaaatgtaaaattaatgatccacagagctaattataataaataaaatcataaggcaaataattagcaccaaacatagggtctaatattaatcttattcctacaactactacatgaagctactcatttatgcaagcataactcctcctacaaaagagaaattatgcgagccaatctacgtggtacacaagaatttggtggcggcgaacatcgtccgtccgtcggacggtgcgagagggagccgatgagggagagaagcaagtgaggaagatgaatgatgaaagaggagtgccgtgcgtgtttgagagagccaagaggaaaaatgctgtgtgattgcgggagtaaaaatagaatttaaggggaaaaaataggattttggacctatacttacaaaacgagttcccaaaccggttccaaaactgattcaggaactggttccgaggtggataatcaatcggacccgattctgaattttgggaaccagtttcaacgggaaccgattcctgaccccgtttttcgggtgggccggttcggttcctaggtatacccgatctggttgcacacccctaatcggcacccacaaaaataaaaaaaaaataaaaaggcaaagaaaaataaaacaaaaaattacaaaaattgtccacatcacctatttttgaccaaaattgacccgataaacttaattggcaagttatcgaaaattttaagatctaattgataaaattgaaagatttataattgaattagccaaaatgtagtaggcttatgacttttagacaatttccccgtgttagctacgaaaataagctatgatttgtcaaacatgtcttttcaagaccaaattttaagtgcgtgaggatagagaattcccgtaatctatcatgttcattagaattaaagaaaattaagcaaatgattcctaaactttacccccattgtatagtgggaaaattactaagaaggtcctgaaaatattatacttgtgtaaatttagttttaaatcttttaatttagcaaattaagtcctaaacattttgacgatttgctaatgaagcccatccagcctattttggtaaaaaaactactaacgtaaatgtcgaccacgtgatacggctaacgttagtgtggacaatttttacattttttttttaataaattctctgaatttttttctttcccttttcttctttctagtttggccggtggccaaccatctggcaaggatgaggcctagcaagaccgccttggcctaggtaagcccctcccccgccccttccccccaaatagatccagccattgctctgaacacaagttgggggtgttcggacggacgacaaagcgacgtctcgaactaaatcaacaatagctcggagcaaccgatgtcgtactttgccttgatcgattcttttctccgccgttaaaatagacattcttgcacaatgtgcgaacccaatttgatatcgaccactaaatggtgtgatgcacgcattatctaggggccgagaacaagtcggctcgcatgcatcgagtgcatgtaaaaccggttcgtccaagatagtccggtctatcatggctcgaagctgtatcatcatcggtctggtcttgatgaattgtgttggagcaggt

SEQ ID NO: 9927 - DNA, 2712 bp, Eucalyptus grandis
  Intron number 1 from transcript Egrandis_v1_0.019514m (loc us Egrandis_v1_0.019514m.g) derived from phytozome v7.0 (c hr-ID scaffold_4; pos 19157966 to 19160677 reverse strand)
cgcgatacgctcggtctcgctcgtctccatcgagtgttagtatcggattggagttagtagctttcggtagagttggcgttcttcggagcgcttttcttttcgtctgtctttttgctgctgagctattttctgcttcgtcgtagatttgattctcgcgttctcggcttctttttctccgcttcctgttcttctctgctttggtcgagctttttgtcttcggtcgagtgcggaagtatgaattttgcaatgggccgagatttctttacattgattctttgccggtttcgagtagggggctgttttgctactttccagactcactttgaatagcttttgactacgctagagaacctttggcgaccgggtagttttgcgtgtgttcttatggcttagcgtggagtgtattgccgtgatttaacgcggtactttgtttgaatgtggctgctgtgaaggcttgaatgaactttgagggatgctttggaggagagggggtgtgttcctgagtagggaatagttagtctggtgacggcggccggcggccctacataaggcaggttcccagttttcaacagcgccttaatttacggaaaaccacccgcaggtaaagcctttaccaaggcagaaaccgcaatataggcaaatgaaaccacggttactagtgttaaaagtcaccatgggtcactccgggatgatctaatttttgtttctgtattgttagttagggcaaccttgttcacctcggtgcgttgtagaaatcaaagtgaaaagaggtggcgaggatgaaacattgcaattcatacttttgaaaactctcggatattttttccttttgtttttcctctgctttgtccttctctccctctcttatggtgatctgttcttgaaccaagatactgatgctgattttaagttgtgtattatatttaatgagtataaagattcttaagcacttaagaaacaagatgagagatcacattggatatataacaagggatgtaaaattatattgtgcttatatattctgagcttacgtatgtctgtttgtatgcacacaagtaatgtctttaatgttcacttattttaagtggtcaatgtccttttgtttaggcgtgtatctaacttttttatattaatagtcgaactcacatatttggatttatttgtgtgatatgcggaataacttataaattttatggaaagaactatttgtcttcccattttaaatatggattacatgaattttagatatgctctgaagttaatattaggtctcaattctggaaaagcttttgaccagttagtttaaggacacaaactttgtgtagtatgaggacacacgcttaccatattcattgtaatttaagatggtgttaggagaatttgatgctcgatggcttgtctaatgcgagttcagtggttttcttgtggcattgctcttattttgtgctgatattactgatggcgtgatgctaagctatctttttaagaatgcgtgatgatatcgaactctgatatggtaataattaggttagttcagtggcttttttgtgtctgtttggcctcttagccagtaactttccttgttcttggtgggtgaggataaatgatggactgtggcttgcataaggagttgtacttgagattgtgtctccagaaatcacggctgagaattcatgtggagcaatcaatgtatggagatgacacgtgtatatctagatgtgtgatttatcgtaatcagttgatttggttcgatactcattagccttctgtctagatagggaagtattttgttaagatgtacatgctaaatctcaattttggttgaaaactagaaggaatctagtaggttcaatgaaattaatgactaaagctttatttcagggtaccgaaatgaatatctcttgcaacttaggactttgtacatgtgtggattgatgtgaaataatgatcaatgttctaataagtaccttttaaatgagaggattaggtggcaaaattttgatgcagtactatgcagacatgtatttaggctgtggttattttcgatgttggaattttatgtgcctcctccattctagacccttacattagaactcagaaatcctttctcaaagatggttggagtctgttgaaattgttttttgatgtatttatgtcatctatttctcttgctcctggctgtagtaggtactctgtacatctgaagtgaaactttcatttgcgtcatatttgcttcaaagctctatgcattaagtttgtgtgtgtgggaaaaagggagataggaaaaaactgtaagggagaagaagaagagagtgcctcctggaactttctgtttccctgatagtgttagtgtttttgaatgacttcctctgtagaacttcctcttgtcttattggtgacatgcctttatgtgagtgtactagttatcgatgcatagagggtgcgttagttcttctgctgatctccaggtgacgtgatggagatctgtctcatgtgagccaagtttggaatttatttctgaattctgtttgttcaatgttgatgattaaccatgttcttagctgagtctacttctgagtctctctttgttctagtttttggttcaagtactgacactttgacagtgtttcttaccagaagaaattagcaggattttctatgactgcctttgagaacttataagcttggtttttcatcaggtactgttgactg

SEQ ID NO: 9928 - DNA, 2561 bp, Eucalyptus grandis
  Intron number 1 from transcript Egrandis_v1_0.037142m (loc us Egrandis_v1_0.037142m.g) derived from phytozome v7.0 (c hr-ID scaffold_6; pos 48264457 to 48267017 reverse strand)
ttccacctggaaggacggcaaggccgagaagcccggtacttcaacgctcgatctctctcttttctcgtcggttgcgccgctacaatcgttctctggattgctgtagctgttcgccgtttgttgacgattccgatttttgcgaatagggtttcggttgatttgaggtcgcattcagttgtgctcttaaaatttgaactgctgaaatgatagactgctggggatggctcgttggggggtaacgattgtgtagatcttgtctgtccattgtgggtgcttagctttttaattgggtaaaccggttcgaaatctcgcattttttgtatggtatggagacaggcttgtgggtgtaattgaatcaattgaaatccttgatgcttcgccttgtaaatgagtgaaattttgtttctttgagagccttttgcagtgctgtgtagtgcattttcctttacctatataaaaaacgatccttggatgagaaaacgacgcattccctagaccttcacatcaattgaagctcaaaaaactgtcacaaagagctggatcaatctgcttcattttctagagtaataagcttttgatccccttcaatcagcattactaggaccctatgcgtgtgcaatatgctctcactctatatgtgattcatccttaagttttgtcctgggaaatttccttatgtttaattttcctagagggcaatagttgcctgtttattcttggtagtgtcagtatccatttctaaaaggattagaatattttatctttcattgactagataatggtgataggtcagtagagcttgcgatttgcttatgtatgggatatctaattgtacctagttttgtgttctgccatcagtatctagaaatgtgagttccccccttcgtatttactttccccaggagtcgcttctgcgtctgttaggtggtcctcggggtaggattggtactgcatttagattttgagcattgtaagcaaaaactgcctaactagggaaatgggacccctgatattttctgataactctatattttttaatagattattttctttctgctgcttgccccttgcattgctgtgatcattcatcatcaattcatggcgtcattctgtttttgaatattgttgtgtgggaaatgtaaataacatccactctccactcatatttgcttgttcatgttactcattattttcacctgctttatgcttaactttctgaaaattagaggataattattgggcaccccccacctacaacccacagaccaataaaaaatgaaaaaggcttgtgctcaatggacaaatcactagcactgctaatcttctgttgtcccaatgatgctatgcataaactttgtatatcagatgaatgacaacagtgcaactcactttttttagtttaaacaaatattgaaaggtaatttgcatatgtgttcatcagtaaatagggctttgtcatttgatgaaacattttcgttctcaggtttaatgcatgcatgtgatttgggtgtcttgcatgctttgtgttatgacctggttcatgactgggtactttttatgttgtgtccaatggtttgggatgggtagaagtaataacatctatgtccatggtaaagtttgggaaatttgttcccataaattgtcggcctttatcagccttttggatctaccttaatgttgcttgaagaattgggtaccatggtcacgactttaattttctgtgcatgtgaattctgtttgtcatgccaattcctatgcatgaaaacttcaaccatagtatggtacataacttcatctgttgacatcttaatttagtttaattctacaaacactgatattatgaactgccttctgttcatcataagtcagatgtataaatatattttgtggtctttagagttgagaaactgtaccaattgttctcactgattgtttgagtttcaagtgcatgccttttgcctgttgaattatattttttggagacaactttttgattgcctggctatgtcaaagacatgtttggataggaaatgctagcgcagtagtgccatatagtggtgctgactaaacctttttagtgtaactaagcatgtctattgattctttgcatattctcacctggcttggtcagcatgttccataatttgtatcgtttgcaaatggtatctgggattgctgctgccctgtatgagctgatttgtcatctcttatttgaaaatgatgtttgtagtatttggtacttgggttgacctttcctaattatgctttgataatgatggaggtccccttggcttattcttggacagctcagattctacagaactttattacctatacttctggtgctgctttctgtgtttgtttagatgtataatggatgaaatgcttaataggatagctgttgcacttttacttatttaatactggacatgtgtccatgtctgagctaagataaaacagaatttgtatcaagtttgagctgttcttggtaactgacccgatgacatatgtcttctgtttttgcagtaattcgttcagatctggcggaagattgacagcaa

SEQ ID NO: 9929 - DNA, 7495 bp, Eucalyptus grandis
  Intron number 2 from transcript Egrandis_v1_0.025699m (loc us Egrandis_v1_0.025699m.g) derived from phytozome v7.0 (c hr-ID scaffold_6; pos 5337165 to 5344659)
gctaccggcaagctctttgagtactccagctccaggtatgtgatctgtgttactgtcctttcctttcccttttctttgtcgttccttctggtttctctctctattttgacttcttcacttgacattttgaccgtcaaaggttgagtgtttgtgtgtctttcctcgtttgtctaagcgtatcctgtgcgtgtgcttgagagagagagagagagagaggacgctcatgaatcacgatgactatgaaataaaatcaggaggcaaatcatgagagtactaaaaaccgaaagaatcaagagctaagatctcctctcgggctgaagtgtcagcggtgatgcatgcgtctctcccacacctcgtataatataccggctaataaaatatgtacctcaaatatatgtattttaactatttcgcttctcctcaaaggaatgatgccatacgaggatgcgatcttgtctcacttatttgtcttactaatgctgatagatctctagggtgtagattctacagtttttttttccccgaaaatttggcttctctctttctcgctgagtcgtcaaagttacccactttggtattctggtcttctggcctcgtcttcttctttttcttcttcttcatcgacccatacacgcttaattagggttgtgattgatttcagccactcgttgctaaaccagtctttcagtgtataaacccaggaaaccgttgaagagtactttgtctctcactctggaaggatttttccttcgatccggtggcgtgataatgtaacttaaatcctcccatgacgggtgtcactaatacatacattcatacacacgaccatataagcgagtacacacacgtatttgtacactggaaagttttggaggaactttgagttatcatttcatcggaccgaatgatttcatagatcgcttttgagatgtgaggagacggggtcctaggtcttgaaaaatcacaaccacatggtatcttatgtgggggcatacaacacacagtaagaatatacccactgaacaagaaggggaaaaagatctagctccagtcacctagaggtgcgtgtgtatctaaaaaggaaaaaaaaaaaagtgaagcgtttccttcattttctgtctcactttcagagattaacttatttcatccaggaaagctggacaaaggacggagagagaaatcttaccttaatcatggcctaattatggtcctgtagaagagagctcagtattgctgttgctcttgctggcctatataatgaggtcatggatgatcctagggtctgcatgggtggcaatccgtgtgtttattttgggttatcatcatatggtctggagtttacatcaaactcaaatatatgacatgttaagtaatcgtggcacgaccctgatatcataacattacatgtttattaagtgagttacatggcatgtttataatgtttgagacatgaaccctcacatataaacttctaaaaatgttttcaaacatgtataagtgtgtctaaacggatttgaatcgatcatatcaacattaataacatgttagtcaatatagttgaacttgtctaaatatgtcgacctggttaaaaataggtcaacccacatgaggcaagtctaatattcgtttataaatgggttaaaaaggtgcaatccgtttttgtcagaatgtgtttaatcttgatccgaacacacttaagtgcgtgttatgaaaattgatcttgtcgaatattgccaatcctaaagcttaaccatgacctcaccaatgacgcgccactgatgatgggaaagtcccccaggcgccgagggtagtcctttcttaagtgatatcttctggtgtgtaaccttgaaaagatacttgggaagaccctacaataatgctttagcttgtccactttgggcgcattgctgagtacttgaccatcaccacctcgttgtcctttcctttagcttctcaatatccaaagcgtaggtttcaccaaagctaaatcgacttgtgtattaaaatgattattcaaatgtgcaatattgaaagcttaatgttggggatttctaagcatagaaggtccgcctactgagggcttaatacatacctaaaaaggagggaaaaaaacacagaaaactaatgaggttaatgctggaggaatagaaatcgaactctttgggttcacaaagggtgcgtaaagccactgatttccatcactctaaaacttttgaaactgctatcagtactaagaactgcagcccaacttctttctaacctcttatgaatgatacttcaactcttgaggatccatacaaaatccgtctactcgagactataaatgactcggggcctattttcactaaaagtagtgcttggactactaaagttttaatgaaagtatggtaaaactatttaagtagcttgtaaactatagcatccaagacaagttttctgctttttttaattcgccagtcgaagcttgttcataatatactctctcttgtagcaaaagaaatacatgtctgttgcgtgatctagtgccatatattgacacactcgcgcacaaagaactcattcggcttacgtgggatacatatgtcttatcatatgcatacaatcatatggatacaatcatataagaaagagtgcaatgcaatgacatggcgtctgttgcatgcttaactgcaagtattctttcatcatatgcatacaatcatccaagaagaagtgcaatgcaaggacatggtctctgttgcatgtttaactgattgagttttctcttgtgcatacccctttaaatttaattttaccggtcgctgtccttggtcctaacgttttctaaaccatgtcaagacaaacatccgagtatgtctgggcaagttgagtttgtaggttgtctcaagggtctttcattttgtcctcaaactcaatcttctgcagcaagctggtttatgttcaaccaataaatagcttctcagtggcatcttcaaattttttgtcctcattgctgcgcttattttcttgtttcccttgttacctcttgacaacattgacttttgacaaactcagggcgacttctttctctaacacagctttctcttttcgtggacaaaagccaaaacttaatgatatctcacctagtacttgttcggccacttctggtgctaaatctttgttgacccttcccttatgatcttatccgagaatgaagcttgcttttatatcttctggagcaatccagctttgataccctttgttagaaaagtctagcacaattgaagtctagatatcacttcaggagatctaataggcaatggctaaataatatataacttctataacatttatgagaacatagtgatctagataagtcccttactctataaatggccaactgaatacacattaagattggacatagtcactcgagatatgtatgattgttcaccaactaaaatgatctagtgcttgatagaagagttggaaggctttttcattcatgaagaggttaaagcactttctagtactctcaaatccttaagatcattcctctcaattctatcccactcatcctgtagagttttagacttaatctaacttctttggaactcctcctaacctctattggttgaagtatttaagtattaaatcttgtatccatctaactatttgcctcccattatattattaattcatacgcttaagtgatgagtcacatgttcgtctatgctcatgagcacatattagaaagattaaattgcaaaggggaagtgtgtatcggaatgaaaggtgaaactagataggtattagaaaaatggagagattgcacaagaaggagaacggagatgaggaagaaagatgggctcaaatgtcttggtctttattcaatagtttctactctttacatagcagaattctccatggtttgtgtaggatgaggttttgagcatttgtcaagaaggaaaaaagatagtgaaccttgtagagagaaagaaagaacgccaatcttggaccttctgctaaaagtgttaaaaaatgtctagataacacgcagtgccacaaaggtaatatttgcacagtatacgcttttttatgaagataaaatacttctataatttaaactcgaagaaagagcataatttatgttataagaatctttggatgcatagttggactaagaaaagttgacattgtacgaccaaaggacatcaatacagccacagagtttgtgtttaaatgtatttacatctttgaagtgaaacataaaaatgataatctaaattttgcgcatatatagaatggaccttctgctaagacactatagaatatagctgaagatgtcactctttttttttctttgttcttttttccagataaattaaaatagcagtggtctcttgaacatgtaataaatttgagattatgtcctttaaaaatagagaagtttcgcccttttctacttctggaaaactcgccatttgaatttcgaacttgggttcgaacccataaatatctatagttaaaaaataaatttatcagctacattgaggtatccgataacttaaattagtcatgggatatagatgtgccacatgaatcaaaaagtgagaaatacatgtggctacattgactcttatttctttatttttttccttaaaaaaatggtgttcacaattttttttaattttcttaatgcttagaagcacggggaaactttcactacattcatatattgacttataagtctgcttaaaaaaatttcttgatcttttaaagtgtggctgatggtattagaaatactggacatgcattggtccatattaagcaacacctagtaaaccactaaaagaggtacctataaacagcgatctaaacacatatgtaaaggctggtcacttcatattcgtcacagctctgcaagctctctctcctaaaaaaactaacttaagtatcggaaggccataccaagaataaaatccagatgccttaaccgggaatccattgtgcaggtcaattttccggttaatgctctggccaacttcgtgactcccaaatcgggcttcaactgtaataaacaaattgcaaggagaaatgtgttttctcatgcataaattccctgtataataaagactatctttccaaataatgatactgcctaacttcaattcctttcaaatgtgacttcaggatatcatcaatataatgtaagcttcagtgaactcccttgcccattgtaagactggagataacacaagtacgggcaacaatctggaggtgctcattagggtttgtgcgattaaagttaggactagcagaaagaagttgcgtgattcccctttgttgtgaatgaactagctcaaaaaaattgatagaagcatagtcttaagaaagctcaagatagctgtctaagcagcagtctagttgctatgattcattcgtcattgacctcaatggactgtctgaattagctaatcgggttgtcggggataagattcttttttgtggaatcttggagtgttgaactggaggtataagaaaacaaaatgtacatatcaatgcataggtatgggcatggtacagcgaaactcagtgctgtttcattgaggatgcatctaattagtgctatcacgtttcaatcatcataaaacgaggagattataaaaacgttcgttggtggtagaagttgccttgaccgccaactttacggttatagacaaggatcaaaggatagacatacacagatagtgaatttgcataagtatacttgtcctggaaactgacgtttgtttttgtccagcatgggtggaaggaagaaattaaagaatgatcacgggcaaaagcttctcataaaaattataacacctcctcagtggaagattaaagaatgatctaagccatgatattgccaataccaaatctagcaacccttatttgtatatcgccacttgcaagcttcgtcatagttgtgtgatctctatcaaaccaattagatcgaccaacatgaagattggttgcttgtcgtgaatttggagtctatgtgaactacacttatagaaatgctactttgagaagaccttggtgtatgcatatgatcacagttattttgataggctaccaacattagtcaagaggtgtcacactagtagagcaattggtccttgagaattgttctgtatagcgtttcttaagtaggttgatatgattgatcagagttttgtttctcaaatattttgtcattgttagtcctctacaattgttgcattcatgatgttatgcatgcgacagattcatggttgctgatccgtttcaacagcttaagttatgagttaatggccaacagcttaagttatgagttaatggcctacagcttggatcgcctttatattaagtaatcagtttaacaccggatggctccccgctactattttttccaacagcttaactttgtcgaaaggataaatatgagttttttttcatgctgtgatacaaattgtgattgctccgccataattctgattatgctaattctacgtacctttgaatattgaatgtgaattatgctcctggtccacaagcacacgtgtcagaagttttagttgatcctaaaacatgtttcacctccaagtatcgtgctagcgacgatgccctgagttttagtgaataagttccactctgagaattctcacgtagtgtggcagatgattagttgctccttttatttagtttcatttatgctcagtcacagatgaggtctgcacgttagtaaatttacaattgtattctctgtttgagaaagacctctatagagccaatgttgaccaaatcatgcccatcagccacacttggtctccagaagaaccctaagttaattgacctgacacctttttcacaaaggattaaaatcccacagaggatcgatgatactcgttttttagcaatttttttatggaaaagcgcttccatatcatgtatatttgttgttaacttaaacgagacatcagtactatgtccagccatttgttctgatttatgtcctgaactgagcatgtccattttgagtgagtgctcctccaaatagggtagaataacgactgactgggttacaaagtaatgtattgagcgatgtggcaaactttgctcgagtgttgaatttgacccaattaactaaatacaaacttaaaatctaccagattgcatactgtcatagttgtgcagatctgtctcttgcaaacttagcattactcgataggataagtgtgttgaggaggcccttcaaagttcggaataattgttggtttaaatttcatgtagctttgtgactaatcttgcttggttttgaatgtgcgttcttttctgaagtatacttggaggttcaaagaaactagatattaatcttcttagcatgtcatgacatgctattctttctggaaatgttagttacatatgcgtaatcctagtgttgattatgactaaaggagtgatgcctattattcccatttatgtctaaagc

SEQ ID NO: 9930 - DNA, 2760 bp, Eucalyptus grandis
  Intron number 4 from transcript Egrandis_v1_0.005426m (loc us Egrandis_v1_0.005426m.g) derived from phytozome v7.0 (c hr-ID scaffold_7; pos 11378939 to 11381698)
aggttgaacatcatttcatgcttgtttaattaattgaaatgaatgtaagcaagctagatgaaatcatgttccatggaattggggagaactcagaagcacatgttttgacataaacaaatgagacactaccaaaaggaacaaagcagatgcacttggaagattgttgatgcaaaaaggtttttaggttgttaaagaaatgcttacctttggaatctttattctgatattctaatctaacggatgatctcgatttttctgaatgatgtcaaaatccttattggcaatcagttttaggtggtctagggttttcaggaaccgagatcttggcaatatgattaagtgaaaacattaaaataggtgtttaatcatttcagtcttgataagctaccttttgtggcttaactaattagcatatttccaaaccagtgtgtagatgatggacagatgcatgaagaataatcagcttccaattaatttaaactgtgataattggtgaacatggatataaagaccaaaaaaatggtagagcaacttattttgattcttagttcttaattctgcatgccgttgcaagagggatggtcttttttttaatattttaatcttttgattaaaactttcaatcagtggatttaatgtttctaatcaatgctttttgaggaagtagagagtacaccaaatctaccatcacacgaaactcttgttgctgtaaacaaaaaagaaattgtgaacttctacctgtaatataagtggacatatgccatctatatcagttcaatttttctttaatatatccaaaaagaaagaatttagctactaaatgtcatatattgtgttcaaattacaacttctctaggtttggattttaaatcgagtatgaatgtatcagcagtatatttggtctacagtattagttaataatcagtgacatacttgagaaatattggtagaaacttatctatattctttgtatattgtatatataagtaaacagaaaaggaaatatttcgcgttgtggtaattgttgcttaggtgcatctgcttagaaggaaggtgtaaagacttttggccatgggaatatacttctgttgatttggagggggtacttaagttggttcattgtgattattaggactaactaatttacatttaattttccaagtgcttaaaatttacgtagtgtcttttcaaaggccttatggttactggtagaattcaggtctatattatcatatatacgttagatgtcttttgagattgtaagtacagagcatactagttccatcctaaaaaggaaaagaggcatgaagaaagcaaggtgaaaattgagaccataaggtgacagagctggtaactctgatatattgtctattttgctaaatagggaacttgctgaaaatgttatttgtaactaattgaacgggataggaaaagaggagaaatgcatctgatgtctagagcaatagcaaattatccttatggccattaggcaaattctttaacagttataagacagatggtgctacaggtagggcatgtaaggctcttaactatcagcatgcacctaaaatcagattagttgaaagaagaatgcttttgtggatgtgtgatcacttgagaaaaaatatcaatttggaagtgagattattctacaaaagttgatgtggacacaattgaggatcagatgagagaactcaattcgaggttcagacatgtgaaaatatgacaatcagatgtgctagtaagatgatgtgactttttgatgattgtcgggagaaataagatgatgcgacttttcgatgagatttggaagtgagtttattttacgaaagttgttgtttcgtagtgttgtccatgatcaaagtttcccttctaaaacctctttctgaagtattgtacatagtaattttgagcttggatagaccagatttgtttctggacaagggaaacaagtaggataaacaaatggataaatgatgggaagatttgaccggccattatcagaggttgattatgtataagatatgaatctactaagcaggagggagaaaaaaagaaaatgaataatctattaatggaaaaaacaagaaggagaaggaatggattggaaaaataggttcagttaactggaactaactagcgtacttgaactttccagtgtggtcagtatgaggaactctcattatactgcataatcaactggtccttggcatgattaccttctcaacttcaagtataaaattaatcatatcaatgattgccctcagggcttttatttagaatacttaacaagttaagttccaatttctgaagcagtggttttaggcatcacaaaaaaagtaagtgccttggaggtgcaaacctttcctcatttggttattcacaagttccctaagggcactttttgacaaaatccatgtaagatattgggtgttaaaatatgtgagaaaactcctagggaaatagaatagtaggtttgtggctaattaacaattggtatgtcacatttattggaagcaaaccaaacttgaccacccatatttggtgtgtattaggtctggcttatttgttcttttgatcatttgtgcattcagtcgactggttgattttctttcttttgcaaagtaatcaaaataagtgtcatgtgggttggcttaaatttaatacccaggcctattgttttccatgacaatcttttgtttatgtgtaatttttctgcatgcagactaataggatttcaaagaacaatctaattggtta

SEQ ID NO: 9931 - DNA, 2587 bp, Eucalyptus grandis
  Intron number 4 from transcript Egrandis_v1_0.028232m (loc us Egrandis_v1_0.028232m.g) derived from phytozome v7.0 (c hr-ID scaffold_9; pos 14711015 to 14713601 reverse strand)
tgggagcgatactgtcgtgctgtttctgctattgtgtatggaaattctacctctttcctgcttctcttgatttgaaaagctcttgttgtcgacttttctgacatctttggctctttttcctgcatgtgtatggctatgcttatagaagtcattgaatttagtagtgtctaggatttgcattttgcactacaatttttcacatacataaaaagggtcaagattcatgcaaatgcaaatggaatacagtgactctcttgaaattaggttttagaggtaagatgttgattctgtacaattggtattgcaagatgtcacaacaaaacatattgtgagtcctgacatggacatagtttaagttttaagggcaatgaggttccgtgtgttatccttacttaagaaatgctgattggctgtggactttctgaatgaggtaaagctcactacgatgtgagtatttatcatccaagcaatttgttgacatttcacctttaagaagcttggagaattaatttcaagtttgggaaatgaaccagattgtaaaaactagaatgccccttccatttcctcttgttgactgtcatcattctggatgactaagctggtttcttcagtgaaaataggattatcctgacaaatggtgtgattttgtatcagtttatgtatctgtctagtctcagcaggatgttgtatcttgctcaaagtagcgttgatgttgtggttaatatacaatgtttgatgctgagtccttttcttcgtggaaatgaaacctgctgacagttttaatcttgtcatatcaaaactggtctccataatcaaggagaagtcactcaagtgggaacaattgccccaggcttataggtgtattgttcttatcaatgttcggaactagttgtcctggcaacttaaactagctttccatgatagactgatacagcaaccatagaggggcattgctcatgtgggaacaggtgcccttgatatcagtaaagttttgatcagcgataaatatgatcatttggtcatttcactaaatattgaatctctaattgatcaacgtactacaattaggtacccttggattacgtgcgacgtaagtcatgttttccttgtaaaccatggtcctggtatttgtttagctttaggtgaaagcatcataatgaagtactcaatattcatgtatatagaccatagtagaaattagggattattttgtagcatttgaaaaaaattaagtattatccagaatcctgagataaactaggaggcagcagatgaagtccttgaacagtagcccttactccctttgaaaagagcatttttcaaatacatcatccctagactcacatgtcaagttgcagaagaatatagccaagaggattatcaaacttccatctacttattctgccacatgtaggcagcttgtttcagatctcggagagcaatccaactgatcaaaagttatattgttccttcaaagttattattaaaatattttttgcatggtgaatggaacaattttctctgtgttcatttttctgaatgtgccttgggtggggcatttgaaacagataggtctaactaaataaaattttgtctatgaagttttaagagaaagagcgctaaattttgataaaaactgaccattagatgccctgtgtaatgcctttaggtcacgatatttacataaataagtttgcttccttttccttgaagctgtttgaaatacagaggttgatggaggaggctgggtggaagaagagagccaaattagaggggagcgagacattagatgggagaagttcacatgttcttgtttacttttgagaatgcgaactttgaacatttcgaaaataggattcatgacacagagagaagcattcaaacaatccactaagatgtttatatttcttggactatttttggaaaaaaaggaatagaaaagcatttcaaggagttcaatctttctggcatattttagagatggccggtttcatacccttcacttttgtattgtaggaggcacaattaacacataccttttgttcaataataaatggatatatgtggatgacagatgagcatttcggtgtagtttgcacagagagttcacagagatggagtttcttttctccttctgccttcaataagattttggtggtggagactagaaatatttctgttgcagatcttttggtcaaaaacttcagaaactaatgagagttataagatgggttagacaatggcaatgccttgattatggatgcattttggtaactggaccttcaagtggttaggagtcctctgcaactgctgttggttctctgctggtggcacaatattatgccagttgttttgttgtcatacagacacctatattatgccatgatatacaagcacattcacatttattgttttggctttatcaaggccattaggttgtaggaaattgcttttggttgtgctctaaagcactttgacagagcttcctatatttatttattatcaaaactagtgtttccttaccgaaggttagtaaagtaatttgagtctaatgaatttagtaaccctggatgtgtatcctgcagtt

SEQ ID NO: 9932 - DNA, 1348 bp, Eucalyptus grandis
  Intron number 7 from transcript Egrandis_v1_0.002307m (loc us Egrandis_v1_0.002307m.g) derived from phytozome v7.0 (c hr-ID scaffold_5; pos 17630116 to 17631463 reverse strand)
caagttcttctggttggtaaatctcttttacccagcctttagtttctcattcctttatttggatgcaagcagattttgatagcatgttttgaagtgtcaacattctcttaatcttgcacctgttggagcatttgcattgaagtgtcaacattctcttaatcttgcacctgttggagcttttgcattgaagtgtcaatattctcttaatgattagtgtgtcttccatagaatctagagaaacgttcacttacaatgtctgctgagcacactggctgttaatgcttgtcaaggtggctcctggtgctataaatggtaaaagaggacatggtatactttcttttttcgttttttctcttttgtgttggagatacttgagtgtcttctgtttagatggtaaaattggggatctgtcatgtacatatcacctccaagaaaaatgttttttggtcggaacctccaagaaattgaggtttaagacattttcctctttcaaagcttacttctgctcaagtgtcttgggttggagttaacatgagttaataatttacttttagttgcgtgtcttggatttaggtttgtgtttaaggaattcataaaggacagggaagtgttaatgaaatttggttcgtctaacttttgcgtgattccatatctgtccctgcattgtgaaatttcaccattttcttgctgcactttgttggttatctagttttgattctttggaaatctagatttaagagttagctcaattaagaggaccaaagatggaacactaacagtgcttcaaggattgaaagcagtgctaaaatacttgatagaccaaagtatacaagattatgctcgagttactggaatgaaataacccacttgccttttgtgtggctgttgatacatgacctcagaaaggactagtcggaattctaggtaattaatatgacaagatttgtggtgggaaacaaacaatgaggagtgatgaaaaggaatctcatgtacataccgagagagctaggtttttcccggctgtatcatgttagtaagtttcgcatgtacctattaatcatagttttcaactctctgtgatttacgttattagttcagacctacaccttctgttattcttcttgtaaaagtgatctagaaaaatcatctaagaaaaaataataataataataatctagtaactatgagaagacatcagtgactctgttcacactttgtatccagacgtcatttttgtttttttttagtctctttctgttattgagatttagatattgtagttgttagtggtaacaccaacgcttttcttgtaggaacactcttggcctggagaaattaaagggtctgg

SEQ ID NO: 9933 - DNA, 967 bp, Eucalyptus grandis
  Intron number 7 from transcript Egrandis_v1_0.000241m (loc us Egrandis_v1_0.000241m.g) derived from phytozome v7.0 (c hr-ID scaffold_2; pos 5204381 to 5205347 reverse strand)
ttgagggtatgttctatgtcactgaatgtccgatcttgagttacttatttctacgtcatgggttagttttgttgttgattatttacttggatcttgttagagagagttctaacagtacttgttaagcaaatgatatagtaagtttaaattttcattgaaggcatgaaaatgagtgaattgcagtaagttaccgtatcataagaaaatgaggcatgcaaaagctatctttttatattttgaaaggacaagttataatttaaggaagtgccccttaaaaaattctttttttatttattgaaggaagctattgctggaatgaatgggctgatgtcctaatcattggcaacgatgttttaagaaaatgatccaaatcttaaaaattgcaaaaagattaacagagcttgtgtcacatcaggtatgattctttagaattaagagtcctttccatctcttccctcaacaaccaccctgctcgttcaaaacgaagagaataggaagggaaaccagagacaactcattaattggtcgaattactttcgttactaacatcattctagagcaagtacttacctctagcttttatcgtttggcctaaaaatgtttagcagctccagaagtggggattgagtatgctagaactctttgtagttaccctttttcggaatactcttttaattgcctgtttggtgtttgcttcaagttcacgattcaccaaaggcttaatagcctataagtattctccaattcaatattggcacatcatacggtgcaccagagcagaagaacatatgagcgttgacttttaggcaacttagctctttagagccattttagtagcttgtttaaatttcttgttacagattttagggaaagtgcatctctttcatgttttggattttaaatctggttgttatggtgaaaatcaactttaggaggacatcagacaaagacattgagacaattacag

SEQ ID NO: 9934 - DNA, 1357 bp, Eucalyptus grandis
  Intron number 1 from transcript Egrandis_v1_0.030685m (loc us Egrandis_v1_0.030685m.g) derived from phytozome v7.0 (c hr-ID scaffold_10; pos 30251155 to 30252511 reverse strand )
cgactgcagctccgccaagcgcggcggcgatctcggttggttccatctgacctcgcgctcgttattctttcccactctcagctcctattatgattgccttttgtgaagctttaccgtcgctgtttcgtctaattgctcgcatctgctcgttcgatggagtctacttgctatactgcttccgtcttagaaatctacgggactttagccgaattcgtgaagctggaatatagataaatctaactctattcctgtgcctgaaacattttgtttttgatttgatttggaagaaaagttatgttgctggaattggataaatgaacggatatgaaacattcggttgttagtgtaatctgtcgtgcagttttacccttgtgaagacggagcttggagctttagtgtctctacctttgatgtcagattgtaatttctatcactatctagctcttttgttttttcaaatgcatgttttgtggagttatccgtggttgctaggagttaaattaccggagaatagtccatgccactccattaaaaagatatcatgatttgagtgagagtggcagatccaaacttatgatcgcagttttgcccggatagcaagtgcaactaatccttcctgactattgtttatgatatcatggtttgtccttgcttcgttgtgattatgcttgcattactttaagtttatgatttcttcactgtatggctgctaagtgagtggcctcagtattgctctggcgcaacatgttgtggtgcaatctatggtaattatcacagaggttcgacgtgcccatatgggataggaattagatttttgaattgcttaatttgtcgtagtagttatctgaaggggcttttgatatcaggccgctcgaatgctttgatatgactttcttgatgctgatttgatgccgtttctatcttgtatttgtgactgaaacttccagtcttcatcatatctgccggttggtctagttatgcgactattgtggctcattttgtttacatgtctttcacgaccacaattatgcaaagataagttaattgatctggttctctgaaatgtaaagttgggttgacatgatatgtgcacacgaattccggtgtgctcttgctccggtgggtacattggcaacagaactaacgaaactacaatgtacttgctggttcatattttgatatactgcaacatatccaccagtgcgccaaactgagtttgctacaattttgagctgtgtgaaagtgaactgatgtcttatgttacttaagaatcaagcttccatccggatcaaagaaaattgtgccaagtggctgctgagcaatgatcgggcaggttgctggtggaggaagaactgag

SEQ ID NO: 9935 - DNA, 7374 bp, Eucalyptus grandis
  Intron number 6 from transcript Egrandis_v1_0.013860m (loc us Egrandis_v1_0.013860m.g) derived from phytozome v7.0 (c hr-ID scaffold_9; pos 3968958 to 3976331 reverse strand)
caggatttgacaagctccattgcaagggtaatatctctctctctctctctctctctctcaagtgctgcataataatcttcaaaagatctctgaggaaaactctctgtcgcagaaacttggtgtcaaagccccgccagtgaggatagatagccaggccaaatacggggctctttccagaggtgatggagcaatatacatgcgattccctcacaaagggtaccgtgagaaaatttgggatcatgctgcggggtgcatcgttgtaactggtacaggaatttctctctagtgctttctctttttaggatgattagtcagctttgaaagtgtcataaggcaggaagatgcatatgcaccatctctctctctctctctctctctacatatatatatacctaatttacggaacttacaaaactcatgggttgggtagccctattgtatggatattggctactctgtcaatcaacatacatacaccttccaacccgatcacttaattttgctcaactagacatctgatgcatcctaacgcgatttttgcagcaaggcactttttgcttgctcgctgatgaaagtactagaaagcttttgttttgtcccttcaagactaagaggagatttatgtcttagttcttgcgttgaatgagaccatctgttattgatcgcagaggctggaggagtggcaacggatgcagcagggcaacctctggatttctccaaagggagataccttgatttggacaccgggattatagttaccaatcaaaagttgatgccatcactcttgaaggcagtaagagaatccttggaggagaaatcctcctcattgtgatgccatcactccccagcccatcaatgcaacccgggcaatgcggcaggaaggatgcggtcctttctattttctgtcaacaatcaaatttaacttaatttcaagggagcaactgaagtgtaataagaaaaatggagataaaagaatcattcatccgacatcatagtttgataatcatcatacaagttagggttgtgaatgaattcattccatctgccgaaactctgactggcaataacggcaaaagttgctctgaaatttacttcagctgagaatagttcacctgtttgatcttcacctttgttgtagaagtgaaaggcacaaatctttcctgtccttgtgtaacaactacttcagaagagttgttcggccttcttacgtttcctggcagagacagagcagtggatcatgaactttgacgaatgcatagttgctaatgaatatagacgtagttcataatggaacccacgcctagacctttgactaccatacgtggaaaacgcagttccggaataagtatgattggtttttttttttattacataagtaatattaaggccaaagcgcactaaaaaggaacatgaggtgaatgaaaagctggtctggattctacttgactgctaaattgagttgactaagcatgtttgccgcttctctttggaggtcagctttttcattgaatttcgttgtccacattagcatatcccattggtattggtcaaggaaaattagtttgtcctaaatttgatacgagggagaatattacaaggaccatggttataaagagtaaaagtacagggactttaaaatatatggggattagacacaagccttgggatgctccggtctatgcatcaagggcttagattcgatcggcggtgtttcaagttccatcatcggtgaccaaaaatttaggtgtcggaatctccgatccgagggccaggaacttgggtttgagggcatggggaccttatccagtgtcgtggcctgaacctaacacatgctccctagaccatggcccggtgcaggaggtctcaataatccgatggatgacgctgcaaccagacaaagtcctcgagggcctcaggaccctaaaacccgaacccacaattttggagattattatgtgatccagcccaaatctgtctaggcaaagccaatagtcaagattatattatcgaatgccaaatacctaagtgccaaaacttgatatgagaaatatttaagtgtcaagttacaaaagtaatacttaaatatcacttcttttttttaagaatggaatacttaaatgctaaatccgacaaaggtggtcggaaatcttacatgacaattttttaataatataactcacttatgtagcatgtcggagagctaagtcagcaatgaagaaccgaaacgacgtcgtttgtcctttttttaattttaatataaattttaataaaaatattttaaaatatttatttttaaaaaaagagagaaaaatgaggaggaggcagaagacgagggttgagtcctcgctgttgccttcctactgttgtcagccctcacctagccgggccaagagcgatgcccactaggattgagaagtcgactggggttgcgagccctagctaggggccggaaacactaggcgacttacagcaagggcctgcgagccctcgccaaatctggggtgagggtcacagccctcccccaaatccgacgagggtcgttggccctcgcctggtagagctaagggccatcactcgcccatcgccaccagttggccaggcttattggccattgcctagggcccagcgatccttactaaccctcccccaccatcgtcgaccctttcgacgacgagggctgagtcctcagcccttgcaatcttcatcctctctctctctctctctctctctctctctctctctctctctctctctctctctctctctctctctctctttaataatacatgagtacatttatttttaaatttaatttaattaatttctatattaattatctacctacatcagcaacaaaaatgatatcgttttatacttgtatcgccggaaaatcatcatgtcagcattttggacacattttctggccattgacacttaactgatttattttgctccaattttgacatgtaaatgtcgctttcgtaatttttggcacctaagtgttcccattccaagtaaaacttggcatggacatgggacctggagccttgaacttcaccatcttgactcaggtagatccttggtgctcatttcaggacctcaaagctcggactaggacttggcacaaacacaagatgccaagactcatgccctgaaaccttggacctcgattatttgacttgaaacctcgactgccccaagaccttgaaaactaaacccacgacctcgaatgctggactgaaggacttggcacccaagacctagacaaccttcaaaagtcgaacttgagaccttgcagcacaataggaacttggcataatgaatacagagagactcgaatggcgtacttaggcctgggacttcgacatcctgaactgaatctaactccacgatggctggtctcgctttaatttagatacattacaatcgatctataagaatggtctgcaaaataattgcgcatacgttttgtactgggcgttgaatgtaaatctcatttaactagatcctcagttgcagagcattactgaccggttctagtacagttcaacattactcgctttaaatttgctgtaccttgaaaccgagaggaggagcattttaccagcacgaggtgctgtaagcgctttatcactacgttgcattatgatgtgcgatcttgtaagcatcggaacgcccatctcgtcgaccgttttaaggagcatgactcgctttcgccatcatcgagaatggggggcataggaaactcttcgagaaccagaacggcgacagtgcgagggtctgtttctcacgctcggacctgttcgttcatgaaactcagagacatttcaatttcttgagggacgtggagatgccgaccgcaaagtcctgagtcaagaagcaggtggacacggaagcaggtggaccgcagctactacaagacaacgactttggccgtgtcagttcgccgttggagagaagactatccaagacccaagttcgtcaaccccacatctccactctcctctccgtcaactttggtcttcgatcgtctcctcctcctcctcctcctcctccatgtcgtacgataaggagctcgccaccgccaagaaggccgcctctctcgccgctactctctgccaggtctcgtctctctcggaagtgcttacgagtgggcactgaacccacgagagcggtcggggcattcgtgctctcgatcgctcatgctcctgctctccttcattcgaatgaacccggaagttattctctctttcaaagaattttatatggataatcactcgttcttatcatggcttttctgctgatgaaaagggttacttttgttttcgaaattcattactattgcttcttgtttctgtagcattcctcaacttcattactattagctctcatttttttcttcctattatgggatgacgcttctctttcaaaatggtcacatgaagttggtaggatgttctgttttggagagctgcttactgggttcgccggtatttactcactgttctatgtattgtagaaagtgcaaaaagcattattgcaatcagatgttcagtggaaatcagacaaaactcctgtcacagtggcggattacggttggtcttgagtaccatattttgtttgctccttgctggttatttcaatcaatagaagttgctccattttatatttacatgaatatcttcttgaaggcgactatatggacataggtgtttctggaatgagttatgtataagtcaggttgtgctgtggaatcatagaaaacctcagttaattatatctattgtatacatagagaactcatgtggttgagagtacttgacatttcggtggaccaacattttggtaaaatggaacactcgacagttattaagcgaaatcccagtgggttgcatattgtaactggataaccagccagttagttcatgattaaaccttgtgcttctacattttataggctgcttggggtagtgcatctggtcatttggacagtgaatgtttttttgatggtttaatctctttacttaatacacattgaatcaatcattcagtcgaggaagcatgttcatacctgagtttccaagtcgtgtacttatttggaggaaggcacacctaatagtaggacgcatggacctttctcagtatcacatgacataaaccaaggattcatcagttatccatgttttgttatgtctgaagagagtaaatacccattctccttcacccttttggcctaaatggagtgatcgttcatttgctggatgacaggttcacaagctatagttagttttgtgctggaaagagagctttcagatgaaccactctgtttagtggctgaagaggttagtatgtagtgaagaagaaagcttaatggttaattgtggtattctgttttgttatatctgataacatggacaattcatcttcaggttctctcacctttttcaggattcaggagatctttgcaaggatagtggaaaagacaccctccagcgcataacaaagcttgtaaatgaaactattacaattgatggttcatatagtgcttgttctttatcaccagaagatgtagttagggcaattgaccatgggaagtcggaaggcggctcttttggtcgacactgggtcctggatcctatagatggtactaaagggtgagtgacctattctgaaagcgtgggctcatcttttatttacaactttcctctatcgtttacttcaggacattgcagtatctgagagtaatagtatctgagagtaatatagacccttggtgggaaaaaactgttaagacaatttttatttgtttctaaatgtaaaactctctgcataaggtaattaaagcatgaaggatatgttcatcaatttttttaaaagagaagatgctataaaatggcctagcccttggaaccttttgttatagactcaagcataagcgaattttttcttgattcttggatacaagtctggcatttctcggtgattttggtaagaattgtgggcacaagaagtgatttacatattgccaatcagtcttcacatcaattttattcaagattttgatgtttcctttatctcaaattttcttattcataaaggaatctacttcttgaaatccttgtttctccgcagctgttcgtagcagagaagttgaaaatttctttgtttcaactactgatggctatttaatatcttcattctcctttcctcaacatgtggtggcattcttctctgtctctatctgctgttgtttctccgtgccaaggtctttcaacttgatattcatcggtgcatgcaagatggatgttttctatatttactggacaaatgcttcaaaagaattgatcttacttattgatgacaagtttggtacaaagaatcttttgccctacagcaacttttttgcgatgactgggcataattagcacttttgctgaccggattcggccaacactcatgagataaatagttaatagttcttggcactacaggaagtctctttgaaagatacacaggccattgcacaattttacaattacctacctgaattatcattcgtatccttcatccttgtagaggcctcatcacatggtcaatttacttttgtgctcttttgtaactgctatgatgaagttcattacttccttttgccagctcattaagtatcaactggtatgggaggatttatgcaatgagatttaccttgcaggtttgtaaggggggatcagtatgcagtagcattagctttactagataatgggaaagtagttttgggtgtactcgcttgcccaaatcttccattagcatctatcgccgggaatgtgccgtcggaaaatgctattggttgtcttttctatgcacaagttggttcagggactttcatgcagtcgttagatggatcatcaccagtgaaggtcgttataatttcttctattcaatttctttccacctttatcgtgcatgaatatcggattgcatggtcgagacaaaataaaaaataagtaacaggttcacttggactgggtgcgcaaggccctgttcttgggtcctgcaatgtctccctcatccactggcatgttctgagttgtaactgctattgaacttcgagaggaacatcacatgttgagtataagtccaggttcatgtcagtgatattggaaattcggaagacgcatcattctttgaaccatttgagaaagcacactccatgcaggagttgacaagctccattgcaagggtaatatatatatcttcttctctctctccccctctctccctccaacatcaagtgcagcataataatcttcaataaatctctgaggaaaactctctgttgcagaaacttggtgtcaaagccccgccggtgaggataga

SEQ ID NO: 9936 - DNA, 612 bp, Eucalyptus grandis
  Intron number 8 from transcript Egrandis_v1_0.012723m (loc us Egrandis_v1_0.012723m.g) derived from phytozome v7.0 (c hr-ID scaffold_8; pos 13995425 to 13996036)
gccttcaatcttggtcgcatattcatccacttttggtattacttctctgcgatcttcaaatgtcaaagtagatgagactatagtcactgggtggaaaatcttgttcatttctctctcataagttgtatttcaggttcatgcttagcagcttaatgaacagatcattttgcaagtgaaaacatctggtataatagtgctggaaccctgctattgagctgccaaagaagtagtttagtgttgtcatgtaacacactctgtttgactatgaaaaatatatggcacccattgatgactttttatactggatttagtagatgtattctggatttgttattctatggcctgttttccgctttgagatatgttgcacattgtaagtcaacttagtgcatgctagggtgaaagaatcttttgaaaccaaatttcaatgcccattcgaaacgtaatgacaatgagattacactatgttagttgaaaatcaattgtggcaccatccttttttacaagttgcttggatttaacttgtacatagaggattgctgaatattagttgaaaatcaactttatttaccttcaggtctgttaacttcaagtttgttcctgagccagttt

SEQ ID NO: 9937 - DNA, 1242 bp, Eucalyptus grandis
  Intron number 6 from transcript Egrandis_v1_0.022399m (loc us Egrandis_v1_0.022399m.g) derived from phytozome v7.0 (c hr-ID scaffold_9; pos 23176049 to 23177290)
actcaaacttttgggggtgaggacaaattcaagtggtaattttcgctccatgcattgatttttttcagcaccctccacttaatcagctacaaaagaaccagtatttcctgtttccgtagcatgcatataactttctatcatgtatgtcattctaggactataactgatatttctctgatctttaaaaatactctattttttatctttgtacttccactacttttctattaaattcttatacttttaattttcctaatcaagtcattctacttacaaaaaatgtctaatcaactctctctggctttgacctgacttggctgttggaggacattggaacatgatgtggactagatactgcttgtgtagacacccaccacggggtgtggatagcgaatggattaatttttttaatctgttcttttattctcttgctaattcactgtccatgatgggtttccacgtagacaatatttaatccttgtcacactccagtggcctccaacagccaaatgaactgaattgggtcagattttctgccagagggatttgattagatattttgtgtgagtagaacttgattagaaaaaaattgaaagtataggatcttgattagaaaaatggtgaaagttcatggacgaaaagtagtatttttccttttcaagaaaaaaaaatggttttccagaataattcaaaagctgtctgatgagataattcggaatcaatcttcagattctttatgttttaaagtactcgtgtgtcataaaagtttcttttaagtgttgccaaacaattcgtttctggctgtcttttatttctgaatatcataaaatgtcaaagagacggtcacaggttatgcttatatgttatctttttaggtcatttcaagcagcattgccagacatcttagtcaccttatatattcatattctgatcattaatcaactggacttagagtgtacttttgttgtactgaacgagttggaagatttcaacagcactcctgaaattttcatgattggtatcaaatggcaaaatcgtttgttgcattagattttgctaattaagcccaactgtagtagctctttttgaggtctagaatacctctttcaatacaacctgtagttggttcaatttgagtaagtttgaactaggaaatatagatgctgatgatgattcgtttgtggcaatggcttcggcctttgggcaggtcacggaggcgactggatcatcccatattcttgg

SEQ ID NO: 9938 - DNA, 1141 bp, Eucalyptus grandis
  Intron number 9 from transcript Egrandis_v1_0.003818m (loc us Egrandis_v1_0.003818m.g) derived from phytozome v7.0 (c hr-ID scaffold_1; pos 22614477 to 22615617 reverse strand)
gcttcactcgtcccaaggtatactgacaaatgccacttctgctttgcctgttccagatctagttgagtaatttctagatcaaaaagttggtaatccagtcaccaaacgtgtacatttcattttagttgggtgtggtttttttgtatatgacctttagtcactttgactgtctttagtgatagctcctagtagtaatgctatgtattgtgaatttactactaaggacttctacttaggcttttgcaagagagcacttcaaaactgatgttttattgtgggtttgggtcttgagactagttttgaaggttcattgtactaaggaggcaatttaggatttttttaattatcttgggataagcaaatgagttggacacaagtgctgttggggaattaactattgggtgttcctgcacctcttgctacaagttgctcataaccccttaattgtaccaccctacttgtatttgaatttctgcatctatgtctgtctctctggctttctttcactgtgtgcagcgtccagctaatgtaatgcaagttcttatgaattttgatgatttctggaattattgtcgaaatgtaccttctattttttctcacttttcatggtgatgcttaaaatgagttggtagtaatataatattctgtttcatttgagatagtgcagtttataggtacttgctatattttatgactgtccttgctgcttacaatggcttgagcaaaataactgtttcattaaataagaatcttttccccaaaccattcaaaatatctttgatatgcatttccagatccaccaaactactatatccaacccgaatcttgagtttgtagctgaaaattctgtccttaatcttggaagctcgtgagagagaaatcacacatgttgcattgtgcatagctaattatgcgtgtttctttgccctttgaataaatgattagtttgttcgtttcctttctgtcttggttttgatgacctgatgaatccagttctgttttctttgcctttaagaaaagaaaactttgttgtccatctcacatttactttgtccttatgttaggtttctaacttggttgatttgctttttcttaatgcttttcaggttttgattcttttgccacttcgtaacattgcatt

SEQ ID NO: 9939 - DNA, 1759 bp, Eucalyptus grandis
  Intron number 2 from transcript Egrandis_v1_0.018793m (loc us Egrandis_v1_0.018793m.g) derived from phytozome v7.0 (c hr-ID scaffold_9; pos 5842456 to 5844214)
gcgacatacggtttcagatttggtacgtccttagtatgattatgagatgagcatcatcatggttgcatcaaatcaataatttatataagcttgggattaacttttattgaagatcaacctttatcttatctctgattatgcaatactctcgatgattgttgatttggagagtatccatcttgacaaccttctattctgttagagtggtcatatgggtttctggctttcaagagtttctgtctcatattttcatttcccgttttacatatttttacctgccttctcacctaaataagtgagaggtcatcccacaaggttgatctaatgtcacttgctattcaaccttgtctgcttgaataattttctgcaagactaaggctacaaggtttagctatttctgaaatcaaatcggtgtacgatattgtcttgctcagctagatccttgtatgggtcatcaccatatcctctttttgtttgaatgcaagtttgaggatttggttttccttcatgattagcagattatggggactaactcttggttaactcacatcaaatagtttatgttgcatatcattgaaggaaacttgaaagatgatggtcaagccctgtgtttgactttgagattcttctgatttagtcctttcccttgaaggaagtttcctgtgattgaatttttatattttgtgctattaggttgcagatctgttgacttggagttctagctctaattgcccaaaaagttcttgactagtcatcgcaatgataactcttgtggagcttaaatgttactacatttatcttcgaactgcaatttattctgattggtccaaacaatttcaaggtcaatttttatcttgcaccagttaccttttgtagcagtcagatcattgtttctgatcatgttacctaacttaatgggcatcccaggatgaactttttcattacctcaatggctgttataaaacctgaggattcaattggtagatggctaaatttagcaatctggaaatggactttttcttctcctcgctttagcagtcagtggtggaaatttctcacatctttcatgataaacagaaagaacatggattctaaaggctattgtcaggccaaaggttgtgatgaattagttgaagttctctttgcaccttttggaaaaggttctgcacctcgtttgttttttcaagtttaccttgtgagggcaaggttgcagggctagtttccccattttttgtctgtttcttccaactaaatgtgtatgctctcaagttctcatggcattgtttcatgacacacgaatggttaaaaccatctctatatgcacattttagtagaagactttactagtgaacaaatctctttaatttttcgtggcaactcagtttttagatagacaaatgaatgttccttttccacagaaagcatagaatgaactaattgtcgggaaaatttttcctcacacttgtatcttcttttctaatcaagtatactgatgagatagatatttgctatatttatgatgttattttcaatcaattgaaatcacttgctctgtattcttaagtttgagattccccttaatgaaggaagaactgaaaaacaaagagcagtgagaagcaagaaaaatgattcatgcttaatttataggagtaatctactgcaatttctttgacaactctacacatggtatgctaacagtcttgttactgattggtatcttgcagccacaactttaaccggtcttcattttgccacaaca

SEQ ID NO: 9940 - DNA, 1143 bp, Eucalyptus grandis
  Intron number 2 from transcript Egrandis_v1_0.038112m (loc us Egrandis_v1_0.038112m.g) derived from phytozome v7.0 (c hr-ID scaffold_1; pos 29538694 to 29539836)
ggcttctctcgtttgcgtggagtcgtcgatccccaagaagcgaagatacctctcgaaccgtcgtcgtggccgccctacgatcgtcttcactgcccacgtaagtctcttctgatttctgccttcaaattttttcccaaaaaaaaaaaaaaaattattcacgttttcttattatataaaactacgattatcctgatacatctgaattaatatgatcgtctttaatttcttgtcttgtcttaattgaagtgcgccttcaccgcactacacgaaatttgcctattctaggaagatcggaaaaagatagccccttacattttgggtcaatgatttgacaacatttttcctgatcttttttcctcttgtagtttcgaggattcggtacttatactttccagaaatactgtggcaaaccacatgtgtagacatattgaacatggaggaaggggaatttttagatataccctgatattttttctaatcgaatttctattagtttttctctaaagagaaatatatgaagcaaaatttcgctagtgggacccgttgagtcatggcgacattattgcatataacatatctaaagttctatcatttagtttgccaaaaaaaaaaaaaaaaagagctgatctaggaaaagaaaataatatgggacaatgaacgccaatattgcaaaggagatgcttacttaataccgagttatttcttcaattctaaacttgcggagctagattgattaacaaagaatgtcaaattttggatacaaagccatgttttcaattgatattctagcagaagaaataaacaataccaaatgtgtcttgtcaactgataaattttggacacttcaataaggattctaaaaaagtaggaatatttttttatgcacatcaaaacacttttaattgttcaaatcaaatccttttttaagcatgttgctacaaaacacaatttcaaaacctacgcaataacccttcatcaagtgtattgatggcattttttgacaagatctaaccaaatatatatcaaagctaaagatggtaaacataagcatgtgaaatggtgaagttgaccaactggactcttttcgggtgcattgaagtgatgtgtgcgcttgacttttggatgacattgattaggattaca

SEQ ID NO: 9941 - DNA, 8167 bp, Eucalyptus grandis
  Intron number 1 from transcript Egrandis_v1_0.042826m (loc us Egrandis_v1_0.042826m.g) derived from phytozome v7.0 (c hr-ID scaffold_3; pos 16180244 to 16188410 reverse strand)
tgaggaagaaggtgagttgtttttgtataaaattattctcataaacaattaatctttttagaacaaacagatccatacatgattataaaacatcaagatcaataaatacagtggaattaaagcgtacatgtttaagccattgcttcactttaagaaaactagatcactctgataatcagggatctatcggaataccagatcttcctctctatgacctatttcggtatagcggtttttaatgagattaaagcaactgataggtataacctaccattttataagctagagaggggacctagcaaaccctaatcaacagcgtgtcaactgggcccttcccattatgggcttcagtcaaacacaattgcctatactttgctgctcaactaggcttgttaacaatagatgacaatacccaattcaatcagatcactttagggtttaacaaatattggaatatccattaacccgattatttaaaatagaaaatcaattaattaatgtaagcccatattataggaaatttccaacattctcccacttgggctacattaattaacttattttattttgaaaaagattttatatcgaaaacgacactatcggattaataactaaaattttgttttatgtggccacaacttttaaaaataatattccaataatgacatctcaataccgatccaatcctatataacctcaatataggactatggagatcaatgtgttaagaaaataccacaacacaagaccttccataatcacatataataagtattatattttcatggatcatgggcctagtagtgtagtaaaaaatagtgccaacatgtgatcaagatatacactatttcttatcggtcctcaatgcaatttctcaacgacatgaaactgcattagcgcaatttctaaacaacatgaaacataatcacaatccaacatgagatctcataatcagtgacatccagtcatctttaaactaaaatttgtttaaagatactgttttatacttgcatttctcagtcaacaggagaaaagataacaatagaatcaataacaacaatcattgaaaataaatgctttaatagacatcataaaagcattatcagtatgcacgtaactataatatccagaaatacaaactatataactcccactaacaaaagaaatcaaaagattctaaaacacccatattctttacatgttttttaaacaaaatgagtcgcaagtcttttgttagaggatcagccaacatgaactcagttctaatattttcaattacaacgtctccatttttgaccaagtccttaacagtataatatttgatctccatgtatttggacgcattactaatcttgtcatgcttggaataaaacacagctgcagtgttgtcacagtagatcaccataggtctagcaatagagtccacaacacgcaattctgagatcaaatttctgagccaaactgcttgaaccgacgcaccgtagcacgctacaaactcagcatacattgtagagttcgtaatcaaggtttgctttgtgctcttccaagaaatagcacctccagccatcataaaaatatatccagaagttgattttctatcatctgaacaactagcaaaatcagcatctgaatatccaatcacttttaggtcatcaactctgctatacacgagcatgaagtcctttgttcgttgtagatatctcatcaccttcttagctgcaacccaatgttcttgacctggattcgacagatatcttccaagagtatttatagcaaaagcaatatcaggtccggtacatacttgtgcatacataagactgccaactgcactagcatatggaacattttttatgacttccttttcaacatcattattggggcattgttctatacttaatttatctcctttcacaataggagcttcacctgacttacaggtctgtatattaattcttttcaaaacacgatctatataacttttctgatataaccctagaactttcttagatctgtcacgatgaatctcaatgcctagaacaaaagaggcttccccaagatctttcatatcaaactttgaagatagaaattttttggtgtcattcaatagatcaacatcactgctagcaagtaaaatgtcctctacataaagtactaagaaaatatatttattcccatttactttcatgtagatgcattgatcaaacttattttcttcaaagccaaatgatctcacaactttgtgaaattttaagtaccactgacgtgatgcttgtttgagaccatagatggacctttgaagtttgcacaccctatgttcctttccggcttctttaaacctttcaggttgctgcatatatacttcttcatccaaatctccatttagaaaagctattttgatatccatctggtgaagctctaaatcaaaatgagtcaccaaagccatgattatccgaaaagagtctttagtagatactggggaaaggacttcattataatcaatacattctctttgtgtgtacccttttgcaactaacattgccttgaatctctcgatgttgcccttattgtctttcttggttttgaatacccatttgcagccgattggtttatgcccatcgggtaaatcaacaagtttccatacttgattagttgacatggacatcatctcgtcattcatcgctcctaaccatttatctgactgatcactattaagagcttctttgaaggtcgtcggatcaactatacttccaatgtcaaaatcaacttctccaagatagacatgataatcatttaaaagtgttggtcttctttgtcgctgtgatcttcgcacaggcatttttggagccgcatcattcatctggggaatttcatttgtaatgggatgatctatcgccatattttcagtatttacttcttgctgaatttccacactgttaggatctcgcatagaatcatcatgtaagatgggcaatggaatagagaccgttttatttggttcttccatttcaaaagattgagaagaactcttttctgcaacatctaattccaggaatttagcagtttgagattcaacgattctagtgccacgagaaggacaatagaacctataccctttagaatgattaggatatccaataaaataacatctagtagtcctagattcagtcttcttctaagaaggatcataaattttcacctctgcaggacaaccccaaactcgaaaatgattcaagctaggtttcctcccagtccacaattcaaaaggtgttttcggcaccgatttactaggtacacgattcgatatataagttgccgttttaatcgcatcaccccataagtattcaggcaaattagaactgcccatcatacttcgtttcatctccatgagtgtacgatttcgccgttcaactacaccattctgctcaggactcctaggcattgtatattgagcaacaataccacagtcctgcaaatattttgcaaacggtcccttttactgtccaacctcaatatatcgtccataatactcaccaccgcgatcagatctaacaatcttgataatttttcccaattgtttctcaacttcagtacgaaatactttaaacatttcaagagcatctgtcttctccctaattagataaagataacaataacgggagaaatcatcaatgaacgtgatgaagtatttatttccacacaaggtggttgagtatggcccactaatatcagtatgaattatctccaatagattttgactacgagtagcgcctttcttctttgttttagttaattttcccctcacacaatcaatacaagtctcaatatcatctaagtcaagaggagggagaatatcagccacgataagtcgttttacccgttctttggagatatgccccaatcgcttatgccatagcaatgaagatctatctttaatcaaagatctcttagcaacaacattcttgacattgaaagagcaatatggtctatcgggagataaggataatcgatataatccatcaaacaaaacacaattcccaataattctggaatcataactcaaatccactattttattcgcaaaatgaagacaatatccagctttgtcaagcgaagaaagagatactaagtttctcctaaaattaggaacataaaagacattgttcaagacaagctgaaaaccagaatctaaattcaaaacaactgtccctatgcgctcctcatcaactccagtattgtttccaactttaagctttgactcccttagacttggactccttagatttgtgagaccctgtaaggtagtagtcaaatgaacagtagcaccagaatcaaggcattaacactccatgtctcattctgagcactataagcagtcttaatctggctaaattcagctgacaaaacatttaaggcgtgatgcacaataaaattttcagaaagaacaatttcgtgggccttaagtttggactgaatgtggaccatcttcagtataaattctctaacacccatagcagcatcatacctcatgttcgttaactcactcggcaagttcccagcttcggccttatctgagactctatatctttctcccactgcttcaaggaactgtctggcattcgtatcttccggcaaaccactaatcagatgctcagcaatagacctcttcatagcaatgaggctcagtcgattagatttttcccatctagcataatgggccttttgatctgcagtactttgatcattgggcctggcgggttcatcctcacatagatccaagtccatatcaacgatgcccaaagcaagctctatatcttgcttccatctcttaaagtttgatccagttaacatttccaccgtggcattgttgttatttacatcaaaggtaactatttaacacacacaatgcaatatgatcaattatgggcaataagcaactcaacaaaaataatcagtacatcataaactcccctttgggcagagtgtataatgcaccattatttttcccagcatgaaatttataaaacaacaaggagaattacatataattttcaaggatccatccccttcgggcagacaaatcctttaaatcatacatctccatagggagaattaccaaaaaagtcctaaatctattgtaattgtgcaaattcaatcctaaactttttttttagccaatttagtcctaaaccttttacgattgtgccaattcagtccatcccgccaaaattggccggccggcgctgacgtggacaccagtcgtcaggcgaacgctgacgtggaatttttttttaacttttttcgaattttttaattctttttttctttccatcatcttcttcgcctcctggccggccggcgagggcgaggccccgccagatccggcgagctcggccctcgccagatccgacagggcgtcgcccgccgtccacaatgcggcgccgatcgaaagccgcgagctcgcttgcactccggaggcgcaatcgcaaggcacggattgaggcggagagagagaacggttccgagcgagcggcgaggcgacctcctcaaccagcgaatcttcgggtgactatccctctctctctctctctctcgtttgacgtgaccgagcggcggcgacgtagcggacgacgacgggtcatgcggcgcggttgcagtaagcacggagtacgctcggccaattgtggcagctgatagggtttcgagggaagacaacggcgacgacgcgtcaggcggcagcttgtcacctgttcgtagcgagggtacggcacggcggcgtttctggtccgcgagatggcgtcagctgctgcgatggcgacagacagcagggatttgtctccaggacagcgtcagggctacactgaagtagatgctggcaaacgacagcgacgcggcggagatccggtgcagcgacggcgtcgggggtttcgggcagcgtcgacggcgcctccttcctgctcggatctggcccccttctctagtttctcttcctctctccggcccctcttcgcagatctggaactcccttgcccagaactcctcccctccggccagatctgagatctccggcggggcctcgtcctcgccagtggccggcgaggttggccagcgaggctgacctcgccagatctggcggggcctcgccctcgcgagtctcgccagccctcgcctccggccggccaggaggcgaagaagatgatggaaaaaaaaagaattcaaaaattaaaaaaaatattaaaagttcgtaaaaaaaattaaaaaattccacgtcagcgttcaccggacaaccggcgtccatgtcagcgctggtcggtcaattttggccggatggactgaattagcacaattataaaaggtttagaactaaattggccaaaaaaaaaaagcttaggactgaattggcacaattgcaataggtttaggacttttttggtaattatccccatctccataatatcaacatagaggggaattacatataattttcaaaacatttatcccttttgggcagataaatatttttcaattatacatccccatcttttaaatatgagaataaacttcatgttattttccaaattaatatacacaataaccccctctgggcgagtaattgtatatactaatttttatcaatatggaatttcaaaaaatttatgcccaaaattcatcaaactataagaaacactttacaacatgtgtttccaattatcatattgcacttttgaaacaacaacttttgccacaactttttttgtaattataatattattataatattatttaaatatttcagactcccgcgggcccaggacccgcgagcaaccctaatcagaccacgggccagatttgcaagtcctaaacccttacgcggcccattgtttttaaattgtaaatagcccatgtaatagagaagcccatctccccttttaaaattggcccatgaaatgggctacgaatttagcctacgaaattaaaagaaaaaaaaaagtgcaaaagcccatatttaggcccaggcccggctagaggtcttcttcaacctccagctgagtcacgaatttgcagcaaatcgggtcgtacgacccggtttcgacccgaagctccgaaggcacaaattaacatggtttttgatgaaatttcctcatgggttttgcttataacatcaatttaattaactatatttaattaaacggagaaaaactaactaaatccaccacatacaagcttgaagattttggatccaagcctcccatggccgaaaattaggttttcttaaatttaagccctaaaactcaatttaatacaacaaaaggatactaaaacaaatatataacaatacccatacatctatttgcatcgaacatcaatcaattgcaagtaattcggaaattctagaactttttcatgcacaaaccctagaatttcaaattcaaaattctctcttaattctcaacaaaattatgcaaattatatatggttggaaacatctcaacatgtaaaacaaaagccctatggttaaaggattaatcaagcaaaaaatctacacgaaaaaataatgcccatattcggctcaaagaggaggatttcaaatttgtccataaaaaaaaaaaaattgggttttacaatcatatacgatcggctttgataccacatgtataaaattattctcataaacaattaatcttttcagaacaaacggatccatacatgattgtaaaacaccaagatcaataaatacaacggaattaaagcgtacatgtttgagccattacttcactttaagaaaactagatcactttgataattagggatctatcggaataccagattttcctctctatgacctatttcgatatagtagcttttaacgggattaaagcaactgataggtataacctacccttttataggctagagaagggacctagcaaaccctaatcaacagcgtgtcaattgggccattcccattacgggtttcagttaaacacaattgcctacactttgctgctcaactaggcccgttaacaatagataccaatacccaattcaatcagatcactttagggtttaacaaatattggaatatccattaagccgattatttaaaatagaaaatcaattaattaatgtaagcccgtattgtaggaaattttcaacagttttctgacag

SEQ ID NO: 9942 - DNA, 2155 bp, Eucalyptus grandis
  Intron number 3 from transcript Egrandis_v1_0.022184m (loc us Egrandis_v1_0.022184m.g) derived from phytozome v7.0 (c hr-ID scaffold_6; pos 22002169 to 22004323)
gcgcgtgagcttacggtgtacgcgagcgaggggagctggaaaggcacagtcaaacggtgggaaaaagaaggagagagaaagtagtagagagagagagggaggcgaggggaggtgggtggcgctgtcctagccactaggaaggggacacgtggaattgcgtcgtgggatggatgtccttggtcggggcccgcagatgcagatgtcggcctcttggcagaggataatggcgcaaggtcggcgtgggggcccacggagcgatgtgcgggcccacatggctagttaattgcttttctgtctcttcaattgcccatgacgtgcgcttctaagactttcgaacggaagggtttattttttcttttctggtcgataaaagaaaattataggttagggattatattaggggtgatgatttgtgacgcgacatcataattgagcatgatgttaatagggttatattcaggttaggctggtaaaaattccatgtcaattcactagatataattaatagtcgtgtcacattcatattcaactcataatacacaaaattaacttgtatgacccgttgaattaattaattagtgtcgacgcgatctgtatgtgtctgactttccatattattcactatcaagatatgttaattggtgatacttcgttgatcctaaacatattaataatttgacatataatattttgtgtattgcattttgtaaacaaattttataagaattagaaatatttcatgccaggtttataccggtgaatttattctgtgtcaatgagtatatttcaagtcatagtaagctatgcaaacatgttgatccagtaacctgttatataattgtattacatgagttatatcatggcatcccattaattttgagatcatatttgtgtcaataactaataatattatgttcaagatgacattttttgtaatatactcttatgttgacacaacacgaacacagcatgtgaacatgaagtgccatttccaatttgtaaccattgaaactaaatgtcattaatcttaaccattcatcaaatttaaaaatgactttatacgtaaaaactatgagaaaatgtaagttatgtcgacaaattattagggcaaaccatagttttgtttgatttcatgaatcaaattgaactaaagtaaaattatcgattacattggaatagggaggtgattttaaaattttgatttataaacataaccaaactaccaaaccgaatagtattataatataccataaatgtatatccaatctttacctcaagttgagttttgggcatgaagcgtgcgaggtcaagtcgacctcaagtccagcatcgtatcaatgaaactcaatttttcaaatcatattatctcaacttcgattcaattttccattcaagtccaaccaaaccatatcctgctcatctctacgaatcacaataagatgggttgttgcatcgagaggccatggaagtactggattcacagcgcatcagaagactcaacaaatccagaaacaagacaactcgaagataaatcaatttctgcaaaaatcaaatacaaaaaagaaaattaaaaaaaaaaatgggttgggattgatctgggggctaccgacttggctgaggcagaggggagcttcgagacctgcgactggtagttgccctgtcaagttgtggccctcccatcgatgaaaatgtccacccagcaccgggcttgggatgccgacgtactcgtttgtttgtttattcccctccccctctttctcaaatgattcgtatcctcaagtgtatccttccgaatttcattccaatcaaattattgcagccgtcaatatatctcgcgataacaaaaatatattattctaaagtacatcaatatttagtctctgattcatattctcccctcttataatatcaaattaaagccttattgtaagtagaatttcaaatgcattagatcacatcatgagagagaagagcgcccctaaaattacccaacaatgtgaattgatcaagtcacattgcgtgaaactagttagaacacctccaaattattattaaaaatgatcctcttggatatttctcttttttgccatgtcaaatttgagattgttgctttttaaaagatacgttacttaaggtaggctcaatcgacaacgaa

SEQ ID NO: 9943 - DNA, 1616 bp, Eucalyptus grandis
  Intron number 3 from transcript Egrandis_v1_0.009580m (loc us Egrandis_v1_0.009580m.g) derived from phytozome v7.0 (c hr-ID scaffold_5; pos 58106823 to 58108438)
atttaactctgctgggaatagcagtgaggactcgggtacgacttaagttcctgttatttgaaaccattgatgtagaaattagaatttgtgttgtcatccacatttatatttgtagatatgtatatttctttaaacaagtactttcattaatgtgcttgcacttttttttttatacattgtttttggggacatatagagcatttgagtcctaaaactactttcattttgtgcacttaagtcctaaaatttgacattcatccactttagtacttccgttagctccttagtgcttttaggttttagagaatggaaaatctacgtggcattttttttttcttattagcggccacgtatgattaaaagaaaatgaaaaattcatgcggcatcttccttccacttaaaatttatggagttaattgaatgtctcaagtgcattcgattgcaactagtatgacttaaatgcacgaaattaaagttttaggactcaagtgcattagcgtgacaaattttaggacttgccccggaattgtccttttttaggctttacatagtacacacttatgtacccactatgagcggtgctgcttattgacagggtaaatgttccatgggcacatgatttttttgggggattttttgttttagtattacggagttaaattcttttgccaatcttactcatctgtaaccccaaatgcaaatttattccatgggcagtggcacatttgaatttcttcatttcatttgtaacctattgatttaaaaaccaaaagatctcggttttttccttttcagaatcagatatgcatttgtgaagaacaagttttcaaagagtggaagcaagcttcagtctaactagaaagggccaaacgcttgcatcttttgtaacttcctcccacttctttgcctcaattttcatttttttggttaaaagtgagtctctcttatggggtcagaagatgcatgcttgcaaaagatgattcgcatttctcttttatgtttttgttttcttataagatttgaagatcaattcaagtacatgaacttcacaaagtgagtcattgtttgcctgtttttgtgtatccattatccatctagtttcacttgctcaaagagtttaagttggagtaatcacatagtgctctaaaggtggtattcgtggggcatctatccctcatccctttcatctttttgtgctatatgcagttagtgctgctatgcatgcattgatccagtttcttgattaacttgtatatattgtatgtcatctcaagttatgcatccacaaattcaaagccaaagccaaccaggctcaagcaaatcaacagtagttggttcagaatactcagaataattgttccttctggagttaaggctgcagcctggtttggcccgcctattaattgaataaccttcacaagctctctcgattcactctttgatatttttatttatttatttatttttttaagaaaagccagaagacttcttagtgtttagctatttcccttttgtgctgatcagattttatatagtcttgtcacgtttcttgacaacctttattttcatcattgtcagcagtcaaacgtgcacgattactttcttccaatcaagat

SEQ ID NO: 9944 - DNA, 2405 bp, Eucalyptus grandis
  Intron number 1 from transcript Egrandis_v1_0.022937m (loc us Egrandis_v1_0.022937m.g) derived from phytozome v7.0 (c hr-ID scaffold_5; pos 10292232 to 10294636)
cgtcagtgccggtgcccgctcacagggccgttctggtgagcttcttcttttgctgagttcaaattgccgggttttctttgatttggactttgggtttttcttttttctttttctctgatctccgattaaatttgggaattttggaagggatgagagggtttagtccgcagtggttaagattggatttgtgtgtacttaatttgcaggtgggttcaaatgttctactgtggtgataaattgtgtcttgattgtaaataattgatcaattatgtcatggagaaattttgcaataattcttctcgaaggggtggattagatacgggaactcttcctttatgggttttatttcagtcattggaatgaaggtgcggagacccactacgctgaacctttgttcggtagtcttgatttatggaaagtagaggcccttgactgtgaaatgatgctgaatgaatcgagaattggaagggaagatactcttttgggagagcttatgttggatatagatggtgtagaaatggggtcgttatgaaaatcatttgtctgggtcgagctattaaggtttctcggatttttcattttagtcgaggcagagagaagttaaaagagagtgaaagagtaatgctaatagaggatttcattagaagttctatctttgtttgttactgagaaatttgtgcagatagacctccagagaatttgcagttggacttttaagatgaatttgatgtgtttatgagaattcggtaaactcgacattgacatgggtgtgctagcacagtggtacctgtggcttactagttgatagcgatcactgtttgcccttgccacttgacgtccgtgatagggtggtagtttcagtctggaaacaaagactgcccccaaaagtgatactacctgaggataatgagttagggcttgattgatcaaatgcttctgatgccttggaggaggcctatacgacacctttaactagctcgccatctcaaactttcatgctgtcattacttatgttatttatagctgattaaagtcctctagctatctcctgctcgtgagactgagtcaattatctaatcatcaaaagccagccttcataatttcttgtgcatgaggatatcaagtagaaggcagccactctagacacgacaaccatgtaatgtgacaaacttcctgtagtaaatgactacgctttgccacaaaatactcttcagagatgcctggattgagtgggggatcaaataaatgattcgaataatgacaatcctaattttcgtatactggagaaaagttgaccaaacgagttctcttagatcgcttccttcctcctcagacaattcctgactaagtcgccatgagtttattaaacatatgcattcaacaaatcgtatctgtgatctgaccttgaaaaagcatgttgggccgctttattcttttgtttttggtctcaatgattgcttggattggtcttggtcttctctcttctcgagcctcagcttaaccttcttaagtttactctggttttcaagatgtaatgcaaagtttatgcagattaaatagttgttgagcatatataatcagaaatgtcaaattaatagaatttctgtcactctttatttagagacttgctgtaaaattctgccactctacatgcttcggactgggttatatatggtgataatggggttgcatttacttttggaaccacatgctggtaaggatgcacctacataacacatttctactaatagattatttctttaacttcctagtctgttattaaactctcttaggttaatcttgaagtttttcaattagctaacatctaatcaggcattagaactaccatatttgtttggttggaccagatatataagtcagagaggttctcaattttcttatacagatcatgattgattccttttatttgcttggaatgaggcttagttgagttgagtggaataattggtaattgagtcgctggatacttcagtgattatggatttctttgacaatatttgatttaatcatttcttgaccaaccagatatgcattttgcctgctgcaatgtaatttcattggagttatcaacttggaatttacataaacttgagttttgaggttttttcgcttggcataggggacttatgatcacaacatagttttcataggttttgcaattgataatgtaagcaaggacattgctaagaagctttgcttacaagctccataaaattcatatcagatgtttcttcgatttagaaaactctttactgatattgatcagatgcacaaaaatctcctatgaaaccgttgagatttctcacattgcaaaaattgtgtttttgactcctcttcgattttgtgtttacaatcaggctaaccggtccccagtgtttgaagct

SEQ ID NO: 9945 - DNA, 1501 bp, Eucalyptus grandis
  Intron number 2 from transcript Egrandis_v1_0.025871m (loc us Egrandis_v1_0.025871m.g) derived from phytozome v7.0 (c hr-ID scaffold_5; pos 3582589 to 3584089)
gtttgggctcgggattttccattcgggtattgaaggtgagttctttttattgttcaagctagatatgccattttctttggttgaagctgtggcatttgatgcgtcgttgataacatgttgtagttggaactaaaaagaatttgcactttatagttctatgaatgatgatggtagtttggctgaggctattgcagggattgttggttatcatgctgctttttaattctgatgcttagttgaatcacagtgatttcccttgatggaaatatatctttagtggagccaagaaatttttcttcctgatgtacagacgcttggcttgactgatgagtaaatctgtctattgatttatttgggacggctttgctttgaatctttttccccctctgatagttaatatggtgtcctaatatgtttcttgcaacttgctgtctgcttaaagctttttattgttattgagttttacacaccagcattagtccagataagcagtctgtcttaaagggcgttggatgtacttttatggtcttaagagttaagtgactgattgttcttaagtgaaagctgttttatctgtatcttgctgcatcaggcattatcgaccatatcaagggtgatatgtcaaggattaggttgaagtggttgccggaagtttagtatctgaaggtaaaaagacaaaaagaggcataaaataaaattggactggaagagatcaatgtctacattaggcataaccattcactgaagatcttagaaataatcaaccaaatcaatcagattctgtggggatgttcttttcttttctttttttcttctttagttgcatcattaaaaaatgtgagtgtactagttactatgctggagagatcaatgtctacattagggataacttgttcacttgcatttgttgggttttgactgtcgtatgaagatgcaatgctaggtagaattgtgtatattggcacgttattttgactttctcctcctgcattttcccttgttacgattcacttaactgtatccatgtgtctaaggatgcatttttactttctatggagctgggctgagatagtctggaacatattctgctttagaagaaatagacagaaatctgcatttctcagatttagtcagtactcggcttattgttctggaaacttagagatggagctgaaactcgtaaagcttcgcaagtttaaggactacatgactggtgctttcatcatgttgccgtgagttgtttgatttgctatttgctccattgggttacatcaagatgtctctttatggttggagctaggttaaattgttaagaatccttcattttaagtctcctttcgtggatgttgtataaaaaatggaaattcaatggaagcacttgactaacatcattagtgtgctcagtttagctcaattatgatgaccatttatccattctttttctttagctttctctaagagaacatgctgacacattttcttggttttgtttggttagccc

SEQ ID NO: 9946 - DNA, 4056 bp, Eucalyptus grandis
  Intron number 2 from transcript Egrandis_v1_0.028881m (loc us Egrandis_v1_0.026427m.g) derived from phytozome v7.0 (c hr-ID scaffold_5; pos 17200356 to 17204411)
tcccttctcgattttttctccttgaacgaaaccaggtcaatctctctctctctctctctctctctctctctctctttccagccgttcttcaggcgaacggaatcgattgttttgccggaatcgagctgccggcgcattagatggtaaaaatccatgagagtggcgagtgcgagcggttggagagagccgaagttgtcttgttgatagaccgtcgattgagagcgagcacttggttccggcaaatgaaccgaggaaatgcggctccatttccgttgtgtgtgcacggctaacgctggaaccccgcgtagaagagctattgcaaattaagaatctaggaacaatgcgattgcgcaatctgtctcggcgcttggataacgaacgccaccgcgcttgtgagtgttttgtgttttttgtggtcagaaagggccaaaggcaggattactaagcttgcgagtatatcttcttgtggagagaggctatttctgttgtcgattaaagccatgcacattttcttcagcagtagcgactactgtgactcatagcatcccatgagttatatctggaagaaattggattgaaaccatggagcaacgatttgtggcatgcttgtggttatctatttcagtttggttactttgggcattgttgtgaatatatagggtgtatctatatgagcttctacttttcacattttgctatctgaatcttgtgacagacacatatggaccttttacttagctcgtaatacccaaaactttcacaaatacaaattgacactgaattcatagatttttttttttttttcacatttttttgtaatttggataatcttttaaaatcaggcaggaaagcaaaaagcctttgttgaagcatagacaaacatgcccttaatctgacatggagtatagcttcataatatttgtcttttcattgagaaattgtcgttactacattttgaaaatgttggtttttgctgtcgcgatgctggatttgattggtatgctatgcaacgaagttgtttgaaggtctggattgatcttggtactaatgtccatggtaactacgaggcttactcatctagatcagttaaaatgaatggaatgatgttcttatgatgcagatgattggatcatacgagtcatttatggccaaaatactaatgctattgttgtttttttttggtgaaacctatttgcatacatccccaaatatagtagaagtcccaacagaattaggattttttttttctagttgaattattagtttgattttgtctattgggatttgagctccattagagtttgaataagtttcatctttccatgtggagtagaatgtgatttttttaattctaattagaataagaatttacgcgtctcactagcctttctaactcaattaagagatgttaagtgtgttgcgtggaaagtttagatgtgaagaataaaggaatttactcttcttgtgttaatcttctaagtaagctcctctactgcttggcatctcaagcttcctaaatttcttatctagaatttttaagccttacctgtaagaaaagaactgtacaacacaatgccaagtaaagatttggtaaggcttttcttgaaaggagaggggaacgggggtgacatgaagtgggtgtggaaaatgaaggaaattcaaaattaatgttaggaagtgaggaacaaaaatttgaaaagtttcttccctcctcatcttcaccccccctccctacccccttccttctccttttctcttcctaacatagcctaaaagtgaataaacttatttaacttaataatctatgttcctcctaattccaaaacatgtatatgtagactactaaactcacatctagttcagataggaaggctaaatgggaaacataaaaccggttacagtggaaataggaaattaatcaatgctatgatgaattagttgatgatcatctacaataggaaaagtgatgtgggcaaagtccaacattaatcaatcaaggagatattttggggcttataaagagttgggttcccttgtaatgcatcaaagatagtatcaaagccactccttggacgcccatcttctggcactttatccttgggactacggtcccttggtggtagcccgaggctgcctcctcgaggccattctatgaggttgtagaatcctgaagagggggaggatgatgcggccaaaaacccacatcagacaactaaggagatatcaaggggcttataatgggttgtgttccttcttttgagaagctagctttttgagatgagttcttccattttcttataatggatcactttaggccttgatggtgaactttttctatcctaaagtcctttacccttaactggtggtgttctcttaggccttggtggggaacttcatccatctattgatctttatccttggccagtagcgtgttctttatgccttagtggtgatcattatctatcaagaatccattgtcactcaaaacacatccccacatgcataaaaaaagtgaattttattataaatttaaagaaaaaacttatttttatcataatagaactcaagttttattagataagaatgcaaatcctacttaggagaagaatatgaatcctattaggactcttgtttgacttatggattgatgacatggcccatcttctccaaatgagggccatggcattagttttctgcccttgaatgtggttttgtagattgcctttcctttctgaggaatatattatgttgaacttcatttcttggttttagctcatttctgtgtcaactccctactttgtatcagggtatgatactgtttttctagtattttgatgctgaccagtggccatacatggaaaatgaaactcaaatggatgtaatgacaattttttctttgtttttgttgttcataaaatgcttatttgatgcgtctcaaagtgcaaggtcctagctttcgggaaattgatgcgattttggaggcaggacttatggttgtttactaaattttcttcgttgtatcttcttctattataagtacttttttcccctgttattagctatgagtccatgccattttggatcctctaatctaccaggggggatatgtttgatttcttcattgggcttgcagaatgttattttctcttgcctgaggccagtcaatgatcttatattcttgaatttatctattcatcctatatgaaggaaggaaatatgcggttagtttacaggaaccaatgcactcaagtgcctggttatatcttttggttggggctattgtgttatacagtttctgtagctagcttcagatgaagattggtaacatttatcatcttctattctcttgaagatcgatgtagatttttaagcaatgtaagccacatgttccacagagtcatgttagttttcagctgcttcgcattaagctatacaccaattggcaactcctatctaaatgagcatgggaatgtgtgatatgttgagtaaccagaggtccttctatcagatggcgaaagggagacgacgagactttctgcgtgattcaatgccaatcaatctatatcctggcaaattaagatatctcattgaaagacatggtactagagttattgcaggcttctacgaacacatgctttttggtactactgtggctgctatttcctcttatctcactgaggcctttcttattttggttacaagtttacttttttgaaagtatgcttacttggattaggtatcaaactgttgtcttttgagcctctttagatcattttgattcccttgtttttgcttaaagtggctgtcaaactgaaaagtggcttaagtatgcttacttggcgtcactatactttttacttataaatttgtattaaggactgaaaagtggctactgtggccactcttctcattggtatgattttggatctccaatgagctgttgtttcctgattaatctgaaagagcccaagacatttaacattcagagtaagaaccttttttaatcacaatttgaatgagttctttgattcatttccttgcaggcgttgcagtact

SEQ ID NO: 9947 - DNA, 1284 bp, Eucalyptus grandis
  Intron number 7 from transcript Egrandis_v1_0.012099m (loc us Egrandis_v1_0.012078m.g) derived from phytozome v7.0 (c hr-ID scaffold_11; pos 20459465 to 20460748)
ggacgtggcgcaaggtcattcaattttctgatagttcttttatctcctttagttcatcaactacttttttttcacaattatattgagtatatgctcatttttgcaatcatacctttaaattgtttatctggttgtttgttttcatttgattttgtaatggcacctcccctattttgtttctagggctcctagttcctagtctacttttccagtgattatgctaaactaatagtttagtcttttgccaaaatttaattctttcctgttgcactatttgttgcactattgcacttatcatccatctatgatgggtttggcccgtggtcattatgcatctgctgtactaattttgtaagtcttagccttaaataattaaattgtagtcattctgattaaatgaagcttcagtcacacttaattgtcgtatgcataaaaagaagcacctgtcagaaattaactcctggttgctgatactgaaattaacttcctgtgagggcagcaaatataaccatagttcatagaggtaatatgataagactgggagtggtataactcacggagtccaagctttaaggtgctgtttgaatggtaaacttgaaactagttgtgttgcaattctattttaaatgcacttgtcattaattggtagttttaatagaatgaattttattaatgttgactttatgtacacaaacattgaaaggcacacttttggagcttgatccatgtgactttaatactggaatctaggatcttttctaaaattcctgcatgccgaaaaagaaaatgttctgatgagaatctttgttgatttatgtgcatgcaaaaagataggaacatattttttaaattttgaaaatgatgactgtggaggtggttctgaaatttttgacggttacaatgagtgaatttgtgggtcaaaaacacttaaagtaatagaattttaaacaattgctatttagttcaagtatggttctcgaatgtgaaaattttgaagttaatgacaaaatataatggataataattgttgcctattcttttaatcaatagatatatgaaaacacacatgtgcatgtgcttgcacacacttttggaacttgattgatatgattttggtactggaacttggtgtttctggacttcattatatccttcctcccattcatctttggatcatgctgttgatacagtagtaagtttccctccctaaagcattgcttccttagtaataagtgttgtttatttgcaggtgttgggacacctattcgacgtggattaggggcc

SEQ ID NO: 9948 - DNA, 7692 bp, Eucalyptus grandis
  Intron number 1 from transcript Egrandis_v1_0.011398m (loc us Egrandis_v1_0.008296m.g) derived from phytozome v7.0 (c hr-ID scaffold_5; pos 67858268 to 67865959)
tgcctcataaaagcggccacccatacagagtcgttagtaatagcatcattaaatttgatcttctttggaccatctgctaacatcaaactttacattttttagtatctatagacattagcgggaagagagacaggacgttctctaattctcatgagtgctcacgtgtcaattattgtttccaaacagtaggcatgtttttctagcatcaatctcaagaaatctactgcgatgtaatttctcatctgtcacctttctggacttctggacgtagtgtgaaactgatcaagttgttatctagaaactaggatcatccttctttgaactacagtactctctaatgatgcttccagaatgtctgaaatctgctgttatgcaatggtgacaatgcaaaaggtttgatttttttattcatgcaatgtaattttgttatggtcttctcatttcaacaggacaacttgtcatttcctctgatctgccctgactggaatgcaggtgatgagatattgcttcttgaggttgtctctgcctatttcgaatcctcgatttattttgtttttgtctttttccttgttttggtatgtatattttggtatgggaagcagatggttattgtggaatgcatttcagggaattgaaatgtatgggttagggaactgggctgaagttgctgagcatgttgagacaaagagcaaagaactgtgcattgatcattactatgaagtgtatatgaactctccagtctttcctcttcctgtaagagatcctaattgaaatgaattctgtttctgttttttgcattaacgtggcatgagattttaacattatatcttggataggatatgtctcatgtcgttgggaaaaatcgcaaagaacttcttgcaatggctaaaggacatggcgaggacaagaaaggtgcttgatgatgttttgttctttccctgtgaatttttgtaaaagcttatgtgacaatattggaaacaacaatctatcatgaaccctaactaatgacctcaaagatggaaagatgtcactattgactgatgtgcctgtactagttactattgtatataccaaaaagataaaaccaaactttttagtgagaagctcatgcattaatgattttgtttggatagaactcttcattggtctgtcttatgtattggtattcttatcatttgaattgagcaaaatttataagtgacaaatactctttttgcgattctgtttgaataaatctctttcttctggttcatatcaagtattgatcttcacattcatttgttaagcaactgcttcattatggtcctcaaatttgaagttcttggtttatgcttattgggtgggtttattttcacataaggtatgtttgtgattagtgcaggaccttccgttggtgatcgtaatcatgttcagtcaatttcaaaagaaccttctcaaggaaaatttgcatgaaatcatgcaggatgcggatcagatacataatgatcattccctccccagtccccaccactcatttttctgggcatttcttcaaagaagacaacaaagactgttttccattgacctacatgtgcatgccggcgttaggtttgcatgtagttatgtatgtctgactgtgctctatacaaaactggataagggtacgttcctacattcatttgttctgagagagagacagagagagagagagagagcattacatgtttgttttctttttccattcagagccagacagaagctgatttagtcaaagaaatatctccaccagcatgcttgggttgtatgaattggtgagcaaagttaaagagagccgccaaaggcagggacgtgccggcgttgccactcatgactcatgatcggcgtctgtcctgtgttattcaatttgctgtaccacccgctccttagcctccttttctgcagcactttctattcatttttattgtacgacgatatctccaaattaagtttcggaagactaactctagtgaaggtaaaggtagttttggaacaatgagaggtaaaaccaaaaaactaaaaaatttatgataatagttttgaaaaagaaaaaaagtagtttcagcatttaactaaatgttgaaagcccaaagctagtccttatcgacattgaactttcagctttctcaagaccagaattcgattgccaaacaccccagtatttcctcaaagggctttgaaggctaaaagcccattgggaaagttgaatcaaacgtaccaatcttttaccatatctatttccataaagtcaatcattacaatttaagaatgaggcttcgcccttagagaggctcatggcccatggttgtcccgttgtcgatgttggacgcctcatctccgatgaatggtagagtcaatggtttgaccatcctcacacgaaatctatctcggcatcattatgtctctatagatatatatgtacctcttactctttgtacgtgcgtttttgtatttatacctatatatttgtgtatatactattaattaaacaatttaacatggctgctttaatctcaaaattgcaaaaaagaaaaagaaaaaaaaagaaccatggaaagccgatacacatatttaaagtattatatgaccgcacataaccataaacataactatcatgatcaagattattgacaagtaattaatgaattgccttttgaatttgaattccaaatcattgtcagagattccataagtctctcgtatttccttttacggtaatttaaattatattcatggaaatgaacaatttaagtagctgagctcttatagctaaatttatttaaatgttgatctttggaacactccaattatatattaaaacacaaggtagacttcattgcatatcagttatgtgttttttatgtgtatattcacatattaaaggaaacaggcgtccttatcatgataagatttgcatttaccttatgcttgacatctcacttcattaaccaaagtttcacacatcaattcatcgtgcatcaaccatgtttgttaaagtgtctactcaaaagggtgttgaaacatcatatgctgcttgtttgcaaagcttatatgagcatgaatgtggttttaagagaaattgttcaattagtcctaagcatattgtgtggttgttaattcaatcctaatttttttttttaattttgccaattcaattctagacctttatgtgaaactcaatataatctttttaaccaattttagtagaaaattattcacatgactatgtacccataggacagtcaacaaaccaccacgtcaatgatttcaaaagaaaagttgatcaaaagtactatattgaaattttgtgcaaaattttataactaaattgacaaaattgaaaagtttgggactaaattaatatcggcacaataagtttaggactgattgaaatttttttccaaaattttcacgttgaactttttaacaatacattttaatgaattcccttcttcttttttttaatataggcatcgcccttaacctagtaatctagaaatctttacctatgctaatataaaaataatgctgttattacttgcggtgctgaatattcctatatacccttcccaccagtcctatcagtatggtataaaataagactagtgtatcaaatctccaagagccactcttcataggcaacttacttataaggtcagtgcagtccatgatctattaaagttcaagagaatccatgtatttgacccttctatagtaacatggtaatcgaatttagaaaacgcaaccatcgaatagtattggtagagttaaaatctttggtgggataagtgaatgcaaatgtgtggacaaattaccagattttattatctaaatctgcacaagttatttcgacaatcaaaatctgaaatttaatgttatgcattttcgtaaattgagtgatggccccatcaacgcctattaattggtgcgacttcaatgatcaaatccacacatttcgatttatccttctcaaatgtccctctctcttttctttagatacgagtccattctaattcttctgagtttagtgtattttattgaagctcaaggcaagcttgtcaaaccctagcttcatcatcttttggcttaccacaacaaattcaatcatcaaaactacagttcgaaggtatgaaatctcaaaaaacttctctactatagcttccttatttttttttctttcagggttcatcatatgtgtccatggcttaattactccataccaagccaattatttatttcaaaatatctttttattatctttttttccctttacaatcggtcttaatattttcttttttccagattaatggctaaggaggaacgtgtcaactcaaaaaggttttttgaattcccacccaaaaatgaacaaatatatatttacacacgcacgcatgcacatatattagtgaatttatggggacttgaaatattgtttttgatatgcttttaaagattcgaggtccacagttttacataaaaatcatgtaagaatttgaaatcgattatttatttaatactgtgcgcctcaaatctttaagaaattatgaaaaccaacgctttgggaaactccaaataccttgatattgcttgaaattcgaaaatgatttttacggaaaaatttaaaattgactttgggtttggtttattctatccatctaaggttcttcctttaagaggtgcgtctgctctatgtaaaatggtccgaacagtatttctagattagttcaagctacattattaacataacataatgaatattcaagtgagttatattggtttgatattcatttgaaaccttacaatatgtattcctcaatcttgaaatatcagaaacttaaagacagcaatgaatttcgggtatagaagagataaacaccttaaataatgaaaatagtgatattttactaccatactcccagatttttgcataagcattttattatatttgatgggaaattgttgcaactcgctaataattactggtttttgccctaaattcgttaataactaagggaaaatggaaaaacaaaatcgatgccaaaaatctgataatttagtatattaaaatactgttgtttcggttctatttaaaattttctttattaacaaacaaatgtatgacttttgtaaagcgaagcaatttttcatttccatacacaaaaataatttgatcctaattttttctatattgattttcagtttcctattgttcccaaaagagatagatccatgatcaaattttgcagagaagaaggttacacaagctgcatactcaatgtttatctctttttttagccaaactaattttttttttattgctaataattaatccaataatcttgtagcacttaattttgttcttcttcaatcatttattctttttttttccctttctatgtttctactttttgggtcaaattccttttgatctttgaaaaaattaaactttgcaatttcgtgttgggccatcaattgaagtcagccctaatctctcaagcccacctccaggcaactcgtgctgagaacccaaatcccatttccatacaaagcaaacccaaatccaatctcacctgcaatttcttgctgacatttcgtgtgtgaattcatgcacaaatcagtgctgtactaaccaaaaaaaaaaaatccaattttgcggaaatcccagtctcaatccatgaaaaaaaaagtagagagggaagaatccaagttgcccaagaaattgcagtaattcccagtatctggaatcgaaattcctgcccagttcttgattttcttggcgccactagggttttgggtcccgctgtcagcgttccgggttcttgctggtttcttgaaatcgcgcgctctgcacggaagggaaggcggggaaggcgaattcctttgctgggcaggcggtttcgcgagctcattcagcttcggactgacatgggtcgctctcgtggcaacttccactcgaatgacgaggacccgactcagaggtttgagctcgttgtcttaaatttcgttgctcgagttcttttcttgcttgcggtggtttcttgaggattaatcttagctacattgaaggttttgggagtgttttgaggctgggattgctgttgctcgtgctttcggagcgtttaatgttggcttaggctggtgaatagcctgaaaatttctcactttaagaccagaaagttctcgtacttagtttattctcttctcaagacgctatgagttagtaagttagcgctgctaatccttttgtctagttgggaacttacgagaggatcaagttatggtcacgggaccatggagcattgtctcgttctttggggattggggtggggtggctctatcacttctccaagtaaaatgtgcacttgcttgctttgcaactttatgagcttttctttactttcgtttgatagtaagagattagccagaattgtagggttgaaacgtggtggaactcatgggagtttttaatttcttctctctactttcagtgaattcgaatcgaaagtaaaaactagctagccctctgcattttcatgagtttgttgattgtagttagttcggtagtcttgcttctgttactggttcaactgaaaattgatatttcatgttagatgtgattcattaaggatacttgtcatcagcttgtaggttcaactttctttgagctattgagtcatctaacttcatactttctttgaactttctcaaatagttgattccgcacaattcagtgtcctcatttcttgtgacaatcaatacttttggaaaaacattactttttttttaatgatcttggtatgtctcaccaaaaaagggtcttcaataattgcctgtttttggccttgcagatcgaggagaaagaagaatgcttcaactggagagaacttggattcttcttctgcaggtactataagtaataatttaattcagtctttttaaggtgctaactgtttaaacttctccgttgtatcttatattttatcttttcatccttatttcattgtcttctggcctaaatttgtctgcattgtcaactgataattcaggtcaaggatcaagtgatgggaaaaaggctgcgtatcactgtaattattgcaacaaagacattacggggagaatccgtatcaagtgtgctatgtgccctgattttgacctgtgtattgaatgcttctcggttggggctgaggtggtgcctcataaaagcggccacccatacagagtcatggttagtaatagcatcattaaatttgatcttctttggaccaactgctaacatcaaactttacattttttagtatctatagacattagcgggaagagagacaggacgttctctaattctcatgagtgctcacgtgtcaattattgtttccaaacagtaggcatgtttttctagcatcaatctcaagaaatctactgcaatgtaatttctcatctgtcacctttctggacttctggacgtagtgtgaaactgatcaagtcgttatctagaaactaggatcatccttctttgaactacagtactttctaataatgcttccagaatgtctgaaatctgctgttatgcaatggtgacaatgcaaaaggtttgatttttttattcatgcaatgtaattttgttatggtcttctcatttcaacaggacaacttgtcatttcctctgatctgtcctgactg

SEQ ID NO: 9949 - DNA, 1427 bp, Eucalyptus grandis
  Intron number 7 from transcript Egrandis_v1_0.038321m (loc us Egrandis_v1_0.038321m.g) derived from phytozome v7.0 (c hr-ID scaffold_2; pos 33081187 to 33082613 reverse strand)
aggtaaagcgtgttaatctatatatgtatacacacactatctccatcagttggctttcttccaacatgctagaacgattaaatgaataggtttcatatggatcacaagtgaagataacagtattgaatcactagaacatgttaaaaattttgaatgtgcatgtgcatgcggaagcatggttttggtattagttatagttttttgttagtgatgttgtgtgtaagtatatgatataatttgtagtggatggacaagggataaactatgataattgaaggacaaagaacatgggatatgggaaatagtttcattagttggataaaataattttacaatagttgaaggaagtgttggtggaagagcttcatgatatgagtatattctcatactcctctcactctcttacatttgttgttttgctacgctccccctctttcctatttatagagactaaatacaacattctagaataatgtggaatgttgtccacttaggcttattctaggaaattctagattgtagtttttctagagacttctcttacatgattttcctctttcttccagaaacttcatctagggaattctagaagtttagcaactctaggaaattctagaaaatggatcaccatttccaacactcccccttgatccatttttaggataattcggacattgtatcataaagttgctgacataccttgaaatctctcttctaatttgtcccatgccttttgtgttgtctttgttccacgatccctttatccttttgtcaaaccacttgcacttgccttcgaatgtgcatgtcttttctttaatgatatcccatatgtctcgaggcatcatagttgtagttgttagatcgggctctagctctggccctcgttggctttggctccgctccgactttggttctggctctagctccggctctggctctgttggctctcactcgggctctagcctttttagttgaggatggtgaggacaaacgcccataaccatccgatatggctggctttgataccatgttaaaaaatttgaatgtgcgtgtgcgtgcagaagcatggttttggtaatagttatagttttttgttagtgatgttgtgcgcaagtgtacgatataatttgtagtttagaagtttagcaactctaagaaattctagaaaatggatcagcatttccaacagaacagaatcttattttaatttcattaaataatggtagctcttaaatcactatgagcagaatcgtatttttatttcattttgattgaagaaaatctttaaaaaaagccacatcttagccggtaatttcttgtgtaaaagattttagtacttctggttagctattggaaggcctaatctctctctctctctctctttctgagcagttggttttattaaaaactggtggacggctgattta

SEQ ID NO: 9950 - DNA, 1302 bp, Eucalyptus grandis
  Intron number 1 from transcript Egrandis_v1_0.025355m (loc us Egrandis_v1_0.020214m.g) derived from phytozome v7.0 (c hr-ID scaffold_6; pos 33954139 to 33955440 reverse strand)
aggaagctgaggatttgaacaaaaggttagatctgctcttcttgtctttttttccctctccctgtttgttgatgatgttttgtgtttcatttggcggaatgggtcgttgtggcaatttggtttttctccgccgtttcagctatttgtccgcattcttcatgttctgcactgctttggattttctatcttcagaaattatggttggattgtatggtataggttcagtgtggatgtgtagtgatcgatctgctggaaatgagggcagaaacttcatttccaacgtaataatctttatcacctccattttaaattacataaaaaagggtaattttttggggtggctgttgatggagtaatcttggtcaattgggtggatcttagagcctcagatgcctctgtaggtcgaggttgatcattttccttggccttaggagtctggttggtttcttgaacttgattctgttgcaagctctcgtgtctaattgagctagttcagtcattccccttccataattagtagtagttagatggaaagagtaagttcgttaaatgtcaagattcaggaagtaaatatctctttggcgactgtcatggggctccttcaatgtttaccgagcttctgcgatcatgaaaatgccaatctgatcatcccattgacaatctacccatctccaatctagatacaatcgtaataggtgcctaactaatgttaacttctttttgatgtcttttcaatttccgctttgtgaaatattttattgacatgtaaaagctctagtccatctaaaactagattgttcttagtcaatgcatggaaaggagagggcattttgctcaggattggtaagtcacacatgatgcattgtcgacacccttccgaagtgctgtgatagaaacaactatatgttgttaaattaggaaaagctgaaatccatgtataacatgtacatacagaaaagtcattatatatacaatttcaaatgcatgcacccacaaacatgtccgtctaaaaagccagttacttggctatctatctatctatttttgtagacaaactgaatgaggatggatatttgacacaaatgcacatgcacccacgcaaacacacacgagcttgcgtatttgctcgcaggcacacactcatacacatgtgacctttgatatcctccttatcaagagagtttcataagctttcataatgcctttgcgctttggtactgcttattgtggctttttcctcatcttctcctccatagaatagtgcttttgtaatcttccaggaaaccttgttctggctacaag

SEQ ID NO: 9951 - DNA, 959 bp, Eucalyptus grandis
  Intron number 7 from transcript Egrandis_v1_0.004767m (loc us Egrandis_v1_0.004731m.g) derived from phytozome v7.0 (c hr-ID scaffold_2; pos 8822997 to 8823955 reverse strand)
cccaaacacggcttcttagtcttgaaagggaaaaggtgctcttccatgcctgagcacaatcagtttccttacttatgggtgatttctttggatatttctctgtgttttgttgtctagtaggatttgattaaatgaggtctttttgcctagttaaattatacatcgactcttatgtttcttcacagcgatgtttattggcctcttgttcttctggatattctgtagacttttagtagattgtccacatgtcgatactatcataattatctttttctgtctcaataagtaattttatgaattcacaagaggttgtttgtaaactttatgcactcttttggaaaggagaggaggggggaataaaaatgaatgtttgaaatgggggaagttcaaaactcttaaacgggaggaattcaaaattttgtatcccctccttcccacgaaaattttagattctcctccattttctacacactttcacccctcccctttttttcttttttctcttcccccctcttccctttcttcttttcccaagcacaaagtcatctgataaggcaaggaagtatgggacctagctttcagttgtagttgtctgacagttaagatcatacatctagctgctttttccttgctactcatttaattgcagtacacacatacatgtttgttagaataggagcaaaacgaggtttatgatgttgaagttgttccatagtgcgtttaacatggcatgcattcttgtacagttgaaatgttattaaattttgcaaggtgatgcatggtttctacattattctatattcttgttgcacagttgaagtcttcagttgtttgtaatatttcctgtgaatatgcaacatacaaactttgaagaaaattaaattaaattgcatactgattcgcttgggtacatatttgatcattgcaggaacttttacgatctcaagttcaatcagcac

SEQ ID NO: 9952 - DNA, 1278 bp, Eucalyptus grandis
  Intron number 2 from transcript Egrandis_v1_0.014087m (loc us Egrandis_v1_0.014087m.g) derived from phytozome v7.0 (c hr-ID scaffold_7; pos 15371035 to 15372312)
tgattttgacatacaggtgaaccagtgtttgatgtttttgtgctgcttattggtagtggcaatttaaatgctgttgctaagagtcctgatcacactaggctgcactgtttcatgtgtttaccaataccatttagttggaatttgataaggaatcgataaaatcaaatgggttccttatgtaaaacagttttctagatagtatgaaagttgtcttctcagctgattcccactccgagcatatggagtgtgcacatagggggaattatttactggaaaaatgaaatacttgcttgtcatgggtgagatgcctgaacacctgaaaggactgaattctttctggtgaacttgtctactccatgagctagcatataaaaagaagatggaaagaaatagtcaggtcatctgaaaactgaaagtatctagcgcaatcagtttcaaatgcctttatctttttcgcaacaatggaagacaaagttggttaactccactcgacaaacactcaatttatgattgcctaaatccaaggtcaccacaatagcctatgaggcaagttccttcagcatttcttgggtctgcaaatgggaatttaggccagcaagtgtttggaagttttctgaggaacatgagcaaagatcttccaatgtttgcttcttgttctctttgcaaaggtgcatagggagtttctatttattactcagtagtctttcatgtatgtgatagataaaagagcacggaccgaataatatcatgtctgggatttatatatatggtcctaactgtatatatatttgtttaaaagcaataactgcaaatgcctggtcgagatgccctttagcaatattgagagcttatcactacggaggtcttgaagagcattgtcctggaaataagctcttctgtaatctgttttagcacggatttttggttctgagtttttccatgagatggaaggtgtgagaatagtcttgtaccatggtgggattctgtggagttggtgaaccaacagaatagagaaacgtgcaaagtctgaggtagtcaaattattctggttaattaaacttgctatcatggaagctaagaaatactcgtacatatgcttgtggcagtcgctatttggtagttgctaacttatattgaaagccattgccttgcctcctgcatttcttgaggatcctttgattttcattcattccaaccagttttgtggactctttcttatcaatttattctgaatttctttcaggcatttcgctttacagcagacaaggaagtattaag

SEQ ID NO: 9953 - DNA, 2782 bp, Eucalyptus grandis
  Intron number 1 from transcript Egrandis_v1_0.004354m (loc us Egrandis_v1_0.004354m.g) derived from phytozome v7.0 (c hr-ID scaffold_3; pos 57227496 to 57230277)
ttgaggtttttatctacaggtgactttgtaaagatcctatagcttcaccactttgtctgctttataaaactgttcattaacagactttttttccttcaatctcgcatctgcctaagcaatagtgacagattcgagtcttgtaatctgatgatagctcagcgaaatcatgagcttctgctgcttgaggcgtgactcatttttagggtttgtaacagctgctagggctttgagcgacgtatctgagtacagtagcataatatttactcatgcagatctcttctcacgaagatggtttttgggcggagtgttgactggtgtagctcgtctttttggctttgatagcattttcattttataaattacagtttccttcatatagtttaatagtattctataatctatccttatggaaaacatttttggaagtaaaatccaaacagcggaaaattactttcctctagttttcatgctctccaccaaacaagggaaaatcaatcactttcctctaacgtaaagttttccattaacccaacgcattctaagtctaataagcccaattcatatcctcgctatgattacatacataggatttttctttgtacatttgattcatttccaattatctatgcgatagattaagaccccgtttgttttgtagaaatttttttatccaaaaatagtctcattttctagcgtttggatagcttaggtaatgaataaatagaaaatattttcataatcaacggaaaacctatgtttaattttaggaatgcgatttgcacttttaaaagtcagaaatcattttctgaaatatgactagacattgatgtttgaacaagagatctcggcccttgggtacacggcaagatgctggtgcttgagttcttagtagccttggtcccttgaggctgagcccaagaccttgatgcacatgcctaggtctttgcttgttgtgcccaagtccctaggacttcgattgtggaactcggctctatggctgggttgaggaccccgatagttgagctaaagtacccaaggctaggcccggggcctaagcacccgaggctgaattccatgagagaaaaaaaaatatcggttcatgattatagaagtatctatgtatgaaaatttcattcaataaaattttatttgagatgagtgcattgaaagtcttaaaacttattacaaaagtgcaatcaagtcctaaaactttctaaaaaatacaactaagtcataaaacttgtcacaaacatgcaatcgaatcctaaaattcaaaaaaaaaaaaataaatagctaaaggatttgattggactaattcgaaaagttttaggttatgattgcactttttttaaagttttaagactcgattgcactttcatgacactttttagaacttccaatgtattttttgaaagatttaagactcgattgcacttttgtgacaaattttaggattttcaatgtacttatcccaattgataatatagcacatgcaactcttatgtcacacaaatagtgcatatcttttcagaaaaataaaggcaagtgtttttctctaaaagacggcaaatattttccaatttatattcaaattttagccaaacattgagaaatattattattttccaaaaaaatcttattcggacacaatttttagaaatgtcaaattatctatgaaacaaacggtgcctaggtaaatttctttcttccatttgttttttgtttgttacaggaagcttggtttatgcaactattgacacaacataaagttaattaaaattaggatagaaatttttttctatgtaattgtttttagtagaagcatattatattgaaaaggtgaattgctgaggatgtacaaccttcaatttttaatgtatttcttcactttgtcagttaatgttttaaaagaatttatcatcacacgttgtgatttggcgtagaacatttctcattttcgtgagaatctcattcttgatttgtcatacttgtgacaaaacacttactctataatattagttaagaatacataggtaacgaacctatttctctaacgttatcttttgtgttaaattcttgcttctcctaactgaagtccttatacgtgataatgtttcatgcctattacttatcactctgatttgaataatctttcgaactagagcattatcagttctatagtagttcacccttctcttctagttctaacatataggttcaattctaactctagttctgatgtttttccatattctcggtctaatttttggttcttacctactgttttttgcaggtcataatacgtttctagtttcttgtttgtttgtaatgctttaattttgaagtaatgtttagatgtgtttacaacaatattttgggtctgggacgttgtagttaattctttgtatttcattaagtactttgcagaactgggtactttctgtcatcccttttcccatcttgtcctactcattatgtttttgtcacttccgccggtttttttgacacttacacttgtcaaatgtgaattgtaatagacaccgtatcatcttttaagttactcttttggaggcgctgtaggttaggctttcttgtttcttggcgcttggttgaacaaaactaggcaacagaatgaagtaactggatttaactgaattataccttctttcgtcacacaaaagtagaatgttaagaatcagattgtcgctttgtttgcttgataaagactcagagagactaagttgttgtttgtgattgaacagctgtgaaagcttttctgttc

SEQ ID NO: 9954 - DNA, 3241 bp, Eucalyptus grandis
  Intron number 1 from transcript Egrandis_v1_0.009683m (loc us Egrandis_v1_0.009683m.g) derived from phytozome v7.0 (c hr-ID scaffold_4; pos 21667157 to 21670397)
atcttaccacggacaatatcaaaggcgtcatcttggtacgttacagaactatctcttataattacatctctagttctgagtaaaaattcgactaggcagatcctctttgatttggtcatatcaagttgtgaatcgtaattttctttcttcatattcaacttccaatagacaatccttatgcaaaaatagaaagacatgcattaacaataaggaaaaaaaatttactccgatgtaggaataagaatatggctcgaacataatcaaaagaacgaatctacagaacctagaatataactgacgtatgacatgatatcagtcaatgcaaaaggtcaacaaaaaatagggtttgttcttactagattttttgcagttagcatcgcgcaactatttggagagatattataaactcacgtttcttaaaagctccttccacgactcttcttcctgacttgcaactaccatcactgacttcttgtcaaatcttattataaagacaaattatgattttgtacaccttcagaaaaaaacgttctgtgaaggaacataaaagttaaagtcgttaatggatgacacattacgtatttcccaaaatatgtagcccataatgtaaaaaatatatacttgcactatattacaaattatcatttgtacggtattatttgatgttagaagctcatgcacagaataaccaatgttgtgatgctcgagggaaactatattttttgaaataatagctttcgaacaatattcccatccaacttttatgagaataaaaaagtcaaatactaagggcatgtttgttttcacttcttttttctgtttaaaaacagttttttttttgttttttttcctgggaataaaaaaggaacagaaacgcgtttgtttgcgtttttgttccaaatctatttttttgttcccagaaacacatctgaaacaaaaacaagaaacaaaaaaaaaaaaattgtttcttgtttgtggaacaaaatttagaaacactttttatctctcttccattttcttctctcttttttctttcttttttctttggccggtcaccggcctcgaccatggccggtgactggccgtcgagggccggtgacctcgccggagcgtcgccgaccctcggcgaggccgacatcacaccaggttgggcgagctcgatctcgcccagattcggtgaggctgaactcgcccagagcctcgccgaccgctgggcaagttcggcctcaccagatctgggcaagctcgagcttgcctagtcaaggcgaggccaagcctcgcccaactacagtgaggctcggcctcgccgagggtcggcgagcctcgccatggctgggtgaggccgccggcccttgtcggtcgatcaccagccatggtcgaggccggcgaccagccaaaagaagaaaaaaggaaaaaggaaaaataaataagaaaaataagaaagaaaatagaaaaaataaaataaaaatgttaaaaaattaaaagaaatagaaaaattatacaaatttaccaaacatgtttctattctttttatatttttggaacagatttaccaaacgcatttttttgttcaaaaattatttcctgaagcagaaatacttttttctatttctgttcccagaaataatttttaaatagaaatgttatcaaacgcaccctaaataatttatactaacatattgttttaatatttgtaagctactgccttttaaatttatatgcttatggtggaattgaacacctttttcgcaattatttttatcttattgatacctcatattaattaaagatgaaacaaattttgaccttacttccgcgcaacaactgctcaagtaccataagaagcaatagattaattataaataagttttattaaaactaaacataacatgttagtagagaaacttgtcaacctcatgagccaatgcattgtaattttttattctttttggtcggtcgccaatgcattgtaatttacacttaccaaagtcgagtttttattaagtgtttccaatctcttacgatattctatgaagcatattgaagaataagacaaacggcaacttaacaatgaacgaatttcacatcaaattgatatggctttagtaactatagaattgaaattttattatgatatttacattaatttgattatggttcagtattccaattttatgtgtatttgtagctgtccagttaaaaacatgaagaaacataaagattgaaaatctgcttttaaaataagatatctccatttaatctccctattaataagtccattaaattatctttgctatttttattttacaaaaatatgggaatttttgttcaaacttgtttgccataaatttttgtctttgattgaaccatgtcaagagtgcaaattcaccttgcctagaaatcacctccttctacaactacctcattatagattcaatcactattaggctcctctcgctagaatatttaaataataagaccggtcattaaataaagatgtgttttattatttaaatatcctaacacttccaatagttgttctcacaccttgtccacgtgacatagtacactcgctcccaagaccataaactacacctctgaagtgcatacaaagtgtttcccgcacactttttctcacttaggcgaatgtcttctctctatgtactaccaccacttaccttgtatgtttacaaagggggtggacactcttgctagcttttcagatgattacttaatcgactgcaatgcagcaagggagagacaaactcaagaattctctaaaaatgcttcaaatgtgaacccttttaatcaacaaatgtcttcgctctaagtaataccacatatctcgtttggtcttcttataggcatcaaatttgaacgttaagcatggatctagtagccattatgtccatctgtctacgggtaaaagagctaagagaaattccctcaaaaatttaagtgtagaaccttcaatcaatttggccagtcagacaaattttccaaatacggcaggttttatgcacgtcaatatatcaaactctttatcagaatagtcccgggttcgttttatatcaaattcatataatgtagctgcatacttgatcaattccattaaagactcgaatgagctttactatcgtcaaatcatttccaagatgctcgcaaaaaattatatatagtggggtatatatgcatgactctcacaggatataatcgctgcgggaagcgagacatcatcaac

SEQ ID NO: 9955 - DNA, 2098 bp, Eucalyptus grandis
  Intron number 2 from transcript Egrandis_v1_0.015004m (loc us Egrandis_v1_0.015004m.g) derived from phytozome v7.0 (c hr-ID scaffold_3; pos 29837350 to 29839447)
tgattcgggttgcccctagcaaggccatagaggtaaagttgtttttatttactttttgaaagttaaattgacttcttgggacttttttgcgtctaatcggttgaaattaagcatgctgtcctgctttgttcattagttccctcaatattctctgtttaggagatctttgggcaaatcttctgacgttcgttcgtttgtttgtcatccattttgtccattgctctcctttctggccatggtagacacatgtaccataaatggcgctattgcttcgtgtggttgtttatttttggtagaggtcatgcattgtctgctttgctattttcgatattcctgcaaagccactcagcaatctctgtctgtttgtagtctctcgatttgacagcactgtttcttaaatggaatattgtgcctttgtagagctgagaattgtccatctgtgtttaaccaggccaacaggacatagtaaaccataagacatgctttgcttaggattttctgtcaacttaagctagacgaatctaatgtattgttgattgcatgtttgtgaaaaattttatgaattaattggtcgattgaaaagactttgactgagttggattttgcacttacttgatgactcacgatgcttttatccttatgttggtcagttaaataacctttgcatcatctggggcttgtgacatggctgtagcattgataatttaggcccatgctttgctcatcatggttgagtacatgtccaatatcacaattagtttctagctttgtgctttataggatattctgtcaacctttttttttgcatataagcattgtgttccttgtgagacaagttgaaatgtttgtctttaatgggaatttataaaatttcttcacactcacatgaaaagtgaggagggatggtcctagtatcctttacactgaaaatactctggtgacagtaaaagcttgtaaccttactgatttggttacgtttcttgaactaatgaatgaatcacttttttcttaagatttaagttagaaaatttattctgcataattatattggtttttaattttcacatttatcacacaaatgtagctggagtaatcatattatctttattccatatgaaatgaaagatatgatatccttcatttccttggcaattaatcttccactcaagggatgatgcattgtattgttagcatcatcaggtattgattagtttcttgaaagccaaggatgataatgttcctctttggaaaacactctattttgccagctcgcacagttgatggtgctattatgttaattagagattagggtggaaccaatgcttttctttctgtttttctgttctcattcatttagagtggaaccagtgttttctttcagatatagttgatcaattgtcaaatatcacactaaattataattgacagcagaatctctctttgatagacctgagcactagtacctgttgctctatgattaattacataacctcctaggttggtcttttgtgttgagtgttcaaatgctaccaaatgtcttgaggtctcttaaacttgtgttggtcatgggtacatagaatggttgagaagctgcttgctatttaagtgtatcgttggtggataatcttgttataaatccattcctaatcccattctgtccctaagaggggaaataaggaggaaaatgaccaagaagagggggaaaaacaacttcaagagttactaaccacgattcactgagctccttatttttaagttgactaggctttttcctttatctatgcaatcaaacgtttcaaaggcatgggtagagctacttcctcactaggcatatcctcactagtacctgttgcacatcatctttgacagcagaggcaagtcttgaaaaaaaattaatatcattgcttccctatctgcccatcattagtgcagagctttattaatttgactagcctctcatttaataagccaaggttcccttttatcttcatgcattaagacaaattgtgtcagggagttccttttgtaccccactagggatgttctttggttacatgtacttagaaggtttctattcttccggtgcagctatttgcat

SEQ ID NO: 9956 - DNA, 1339 bp, Eucalyptus grandis
  Intron number 4 from transcript Egrandis_v1_0.037873m (loc us Egrandis_v1_0.037873m.g) derived from phytozome v7.0 (c hr-ID scaffold_8; pos 62619842 to 62621180)
cttttatcagcagtatgagatattctaaaatcaaccagtcgactgcatacaggagttccacaattatctcctttctgtagttaaatttggaatccttggttagtgcattcacatattttctctggaggagatccaataatgctaaattggatgatttgtctggaggataatgatgtcacccatgtcagtttgaagtttgaacatacagcaattctaaatgtgtcatttctttttttcttattttaggaaaaatactaagtctagccactgcaattctccttttgatttatttatgcatgtttattactcccatctggtcctatacagatatagaactaccaacaggcgggaagaaccatctatatggattatataacaagtcaatgcttgcatggaaactgactagtgttattttccctatatagttttccagttgatttttttttttttgggagggggggtggggcggtgggaaatcttttggagataccaggtagactttgtttaagtgtctatatttgtgcttgatcttaaaattctacattcatcatccttctgacctcgacaaacgtataatatgacaacttataggataaggtcttttttctgttgagggtggtggatgggaccgatggaaatggagtccaatcactctgctacatttcgaagctttgattgagctagtaatagtaggaggcgcttcaacagatctgactgggatgggttttctagaatacttttaatgactgatatggtgttgtcaaaatggagtctttttatcctgtttccggatggttttatcgggcttatctctctgttattttgtctgccttttgggtcatacccagtttatcagagcaggccggggattcatgctgaaaatatatgtttggagagtttgttatttgtgaacttgttggtgccatgttgacaacctgtgtgaatggaattgaagctcttttatataaataaaattgaccttgtagagaatgttgtgatgggacatgctaaagtttgatcaacctagtgccggttgtttgtatctttcatgatttgttgtggcaatatgttttgttaaggtgggatgacaggatagagctaaggttttacagaatgtctggaagaatatgactctttatttcacgtgaaatgttggcaatcctacctcaggtttgcctttaagaatgaatttggacagtcgtgctccctccaataattgccacattttcttaatttggatgcaaaagtttgaggaagtcttaaataaaatagtgattcaagtgtccagaaatgtcattatgtgcaaatatgtggttgttgctcggctttcctaacagat

SEQ ID NO: 9957 - DNA, 1131 bp, Eucalyptus grandis
  Intron number 4 from transcript Egrandis_v1_0.018161m (loc us Egrandis_v1_0.014827m.g) derived from phytozome v7.0 (c hr-ID scaffold_9; pos 22493971 to 22495101 reverse strand)
ggaaccagcaagactccgtcactgatcagctgaatgtcggtaatttcgatctctctttttacatcgggaaaaaagcttcttttttttttttcctaggaaaatggcagaaattaaaatccatttacccacccaattgagctttattaagtcgaggtagtttgacggtgaagcaaatcaaagtgttatgcatctgcgagtttgattgaagggagtttgatgctcaaatgtgaagcactgatttcggcgaataatttatgcaaagacaaatagtaaagctgcaaccttggcatgaaagtctggaaatggaatcttggtctctttcttgagaaaaagcgttctgtgttataatacgtttttctggtactggtggtgggtgagcgtgggacacggtgcatgtggagattatctttcttaagttttataataatccagaacaacttggttttccaccaaagtgctaatatttaaaggatgtcgtcacgggatgcgattattagaggattgacctgggttggcggtttaattctaggtcctttatgatataattataattgatttatcatattcttgtatgctagtcctttttcaattcatttttcttcacgtttgatgaagcttccaaaaccgaaaaacaaaaagaaagaagaaaactctgttctctgcttatccacttgcatgttgagttcctctcatgcgattaagatatgcagaattgggcaaattgcaagcagcttcagaaagaaattttttaagaaagataattataattacttggtagttgatcaataaatgatgaccaaattgacagcctttaatcctgattaattgcggttaccctttcactatttgaaggatcattctaaacgtgatcataacttggaagttcaagtgggtcaaatttaatgggcggtagcgttacagcctttctacatcatgacttcactgctgtacttcttgagtccttacaatttgtatggacatcatcagcatttatgagatgatcatttgataatgatatttcattctttagctggaatatgttacctattaggcttatactggtgtgaattgctaaaacttccgattgttcatgcactaaaatctctgcctttgttattttaactttgcaga

SEQ ID NO: 9958 - DNA, 1218 bp, Eucalyptus grandis
  Intron number 6 from transcript Egrandis_v1_0.001955m (loc us Egrandis_v1_0.001955m.g) derived from phytozome v7.0 (c hr-ID scaffold_3; pos 49324919 to 49326136)
cacgcaaggcagataaagtgcaactggtaattttatgttctgataactctatgttcttggcttcagattttggggccctattccagtttgaaactcaatcttggtttcgaccccaaaaaaaaaaaaaaaaaaaaaaaaaaaaactgaatcttggtattttacagccccttattggcatatgtgatccaagggagcaaaattcagtgactgctcattggtcaatattgcatttaccacgttggacacaacgaaaaattggcaaatacattggaagtcgcatttagtgataatgcatatatctgactgtatgcagttacatgttacttgttataagcctgcctgttggatacccaaatatacaccaaaacttgtctactctaatggtttcagtagtttaacttttcatgtgggtatttagcttatgctagaaacaaaatggcttgtattggcagttttatgaatgagtgcttgtgtagttaaagcctgtgattgttagttcattttctttacccctcttggcactactagagagtactgcaaccacccctatcacagctaataaaaagccatctcttactatgtagaatggcaatttgggttttgtgtttatgcatcttttccagtattatgtttttaattgaagaaatagcaaatttgattttgttctatccatgggctcatttgcatgaccacctgcaagcaaaatctgttgtcattcatggcaaaagattttctaccacaagattagggtaggaaatatttggtactttgctttaaacttcttatagtaaatccatataaatgactcattctgagaatttttgccacctatcaatgcttttcttcaatggtgttattattcttgaggtttactgtggcatagtttgcatattgttggagcaaagtcagttggtgaatgtactgttttccttttctatagttgggcttaattttaatgtaaatggtttgtcttattatgtctgttgattataaagagtgaagctatgacacaaatttttgaagataatgtatgaactttcgaactccaggtttaataaatgacaatttagtttggaggtggaatatggactgtcaagttaggtcataaacatttcttctactcattttgttccatgatgttttattgtcattatatttgcatttagctgattggtgtttgcagattgaccacaggcgagcatacaactgtgagattat

SEQ ID NO: 9959 - DNA, 7525 bp, Eucalyptus grandis
  Intron number 6 from transcript Egrandis_v1_0.049233m (loc us Egrandis_v1_0.049233m.g) derived from phytozome v7.0 (c hr-ID scaffold_7; pos 11318828 to 11326352)
cccttagaggagggtcatgtttgccgctcattggcatgcgaatctataatactttagctggtatgtccatgataggatgcgattggaacgcaccgtttagtcttgatgcattacgatggaaagacactaatggaggggtacgaagggagacgtataaaagtctcccgaacacaaccgttggacctgttggcaaaacatacgcaccagatttctctcaatttccatcaaggaagaaaaatgcattccatttcagttttgcaagaacaattagcatttacgccgtggaaatcgggtgtttttcttatgattgcatccagactaacgtgagatagtgttgttcgtaatttcatcggcaattcaacgttcgttccgcggctatttgctgtttgcgcatcggaatcaggtaagtcatcttccgccgacttgaattccaacattagcataagagctcaatcgtgatttctcccttatttttcaccgagttttctcatttaccatttgatattgagatcaaaagattgtattctacactatttttgatatatattggtcaaaattgcaatctgaaaactcgaattcaaaccgaagcgaagaacgggtttggggtcgcatgcatccgtgaggttttggccgtttttttaaatattttcttcgccaaaatcaacttttgaatatacaggatgaaagtactcattgagacgactccgacggtggttcgagcgtgaccggaggaggccggacgcacctacatgcgtggccagaagccgctacgcgtgggcctcacgcgcctgaagcgttggggacgccagcgcgtgcgcaacacgcgccggtcggcgaactgacgagtgcgcgtcacgcgcgcgttgcatggacagacgcgacgcttgatgacatcacggatgacatcatcgatgacgtcattgtcggcagcagttggtcggccgttcaccggtcgacaacccaacccgacccgagatccgacctggttgaccccacccgacccgaccgttgaccggtcaaaggtcggaccggtcaaccggtccggtggtcaaactagtcagactggtcactcggtcggaccggtcggaccggccaggagccgtttggctcactggcacatgcgccacacgcgccacgcactcaagcgaagcgtgggggcacgtgcaagctccgattggagcgtggtttgaggcgttgggttcgtatggatgtactctacactgtggtataattatttttcaattttgaattttataaatgtatgaaaatgtgtaggaaaccctatgtacgcgtattttttggggtttaatgcataatttattcatttgtagcttatattttcttatggtttaggaaatacaatagctagcttgtatgcaaatgatgttatatatgctgtgtagagcttggtttaatgatatgatgtatatattttaatatactggtaattttctagttgctagaaaattagaacaatggtaggaaatccattacatgttgaattgcaattttttattatagttgaagcatgattgttgtttatacgttggttattatcatgctatgttttttgtgttaaggaaaaatgtagaaattacataaggtcatgtaattatttttcctagtgggagttcgtaggttggtagaattgaaaagagttcacctcgaacttaaaatttgcgcaaattaaattaattaatgataatagaacaattgtacaaagaagttgattgagaacatagtgaacttttgcttttgtgtcttttgttgaattattattaatttagtttgtctttgctgcaaataaaatatgtgtgttactctgtaaagtttactagtattgattctgtgtttattatgtcaatgtgttagaacatttgattatggcttcggcatccaagaccattgtggctgacctcaataagggtgagaaactgaacggtcacaattatgatatttggcaccgaaaagtttagtacatccttgaggagcaagaggttttggaaaccctcgaccataccatggatgaacttgagcatgtaacttcagctcaacacagaagagatctggaagcttatcaagcttggaaaaagaaaaatagcattgctcgcatcacgttgctgaactatatgcaagatgatctcatgtgtgagtttgagagttatgacaaagctcaagctatgtgggttgccttgaaagataagtttgggggtacatctgccactaagctgaggagactcaccatcaagtttgacacattccgaaagcgcccaaatgtaacgatgaggtagcatcttcgggagatgtcaaacatgatccgtgagctgaagtcggcaggtcactcccttactgatgaacatcaagttcaagctattataagatctcttcctaacaattgggagcatatgaagatcaatatgacgcataatgagaatattgtcacttttgatgatattgcacgtcatttggaattagaggatgagcgcctagaggctgcgagatcctctacccatgcttatattgctgaatcgagttcgcgcaaagttttgggcttcaagcacaagaggaatcttcagttcaacaacaaagggaagaggactgatcaggcacctaagagggctaagaccttccgatgcaagaagcgtggtgggaagaaggataagaccaagatgaagtgccataattgtggcaagatgggtcactttgctcgtgaatgcactgaaccgaaaaaggtaccctattactccattactttgagtaatgcttttgtttttagtactgtaatgcttgctgaatctcatccaatgtggattgtagactcaggaacagcagaccatgtagctagagaccgagaagcatttgtggagtatcgtcggataccgcctagaagaatgttgatatatgttgggaataacttaagagttgaagttaagggaatcggcatatgtgaattaatcttatgttgtggtcgaaacatattattacattatgtcatttatgctccagatattcgacgaaacttggtctctatagttgttcttcttagcttaggttatatattgaatttccatggtgattgtgttgacattttgtatggaacaatttattatggtttaggtcatatattgaatagttttatggtgttagacattgactatgatcagtacaatgttaatgttgatggttgtttttctttaattacatcttctaataacgttgagattgatgtaagtacttggcatgctaaattaggtcacattggattgcaaagaatgcaaagattagctagagaaggccttttagggtcactcactaatgttagtatatccgtatgtgaacattgtctagcgggaaaaacaactagaaaaccattcagtaaagggactagagctgaatttccattgcatctcatagattctgacatttgtggtcctttgaatgtgaggacgaggcatggagcctcatatttcatcactttcatagatgacttcacacgtttcggttatgtctttctgatctccaataagtcagaagcatttgattactttagatgatatatagcgatggtagagaatcagttgaacaaaacaataaaggcattgataaccgattgtggacgtgagtatctatcgaagcaactcaaggctttttgtgatgaaaagggaattgtacgacaattgactattcctaatactctacaacaaaatggggtagttgagagaatgaatagaaccctattggaaatggttaggtctatgatggcgcaagcaaatttacctatctcctattagggagatgcgttattgactgctgcctatatacttaaccgcgtgccctcaaaatcggtcacttccaccccttataaattatggattgatgggaaaccaaacttgagtagtctacgtccatggagatgtgcaacttatgttcatgattcttccaataaatatggtaaattaggtcatagagggaataaatgtatctttataagatattctgaacactccaaagggtacgtgttcataggtgaacgagttgatggaagtgtgaccgaaatggagtcacaagatgtcacgttcttggagaacgactttcctagtagaaatgagattgataaggacttccaattatatgagatggaagatcctgataacacacacactgatgttgtagagggaaatgaagatttacctcaacacacaagacctagggggagtgttgcatcgcctgatgaattaaattcaagagaaattcaattgtgtaaaagtaatcgtaaaaatattcaccgtcgtcgttttgagattgaaggagaagcatttatgattgctcaaaataatgatgccgagcctaaaactgttcaagatgctctatcatcctcttataaggaagaatggaaaaaagctttggaagacgagatggagtcaatgagggcaaaccatgtctgggacttggttgatctaccacccgatcgtaaggccattggaaacaaatgggtctttaagattaagcgaagggcggatggatccattgaaaagtataagactcgccttgtggcaaaaggttatactcaacaagagggtataaattatgaggaaactttttcaccagttgtaaggtttgcctcaatacaccttattctagccatcgttgcacatttggaccttgaattacatcaaatagatgtaaagacaacatttctcaatggagaattagatgaggaaatctatatgaaacaacaaataggtttcatagctaaatgtcaagagtataaagtttacaagcttcatcgctcaatatatgactttaagcaatcatctagacagtggtatcttcgttttcattgagcaataataacttttgattttacgatgatcgaaaaagatcactatgtatatgtcaagcggtccaaagataaatttgtgattttatcactttatgtgaatgatattctattggctggaaatgacaatgttttggttatcatcataaaagaatggttgtcctccaattttgagatgaaggacatgggagaagctgcttatatattaggagttaagatcgaaagagatcaatcgatgaaactccttaccttatcacaagagtcttatattatgaagattcttgagcgtttcaatatgcagcattgtaatcccattgatacccctgtcatgcaaggtaaaagcctaagtactgaaatgtgtcctaagactccaaaagaaatcaaagtgatggaaattgttccttacgttagtgcggtcggaagtttgatgtatgatatgatgtgtactcgaccataatatgttatgatgtgggattggtgagccaatatcaatcaaatcctggtcaagcacattggaaagcagtgaagaggatcctgagatacttgaagggcaccatggactatcaactttgttaccaagggaatgatttacgcctattaagctattcagatgccaattggggtggagacctagataagcgtaaatcgacttatggatatgcgttcttgctcaatggaggtgcgatttcttggaatagcaagaaatagacatgcacagccttgtttacgatggaggcaaaatttattgcatgttctggctcaatgcaagaaacaatatggctaaaacatttattggaaaatttaaccactgtcactgaagttccaaaaccggtgacagtttattgcgatagtcaatcagccattacctatgtaaaagatcccaagtatcatggaaggacaaagcaaattgacataaagaataacttcatcagagatattatagcgcataaagaagtgatcctgcaatacatttcaaccaataaaatggttgatgatccatttacgaaggctattcctagagacatattcttgacccataggatgtcactaggatttcgtagaatgtgatatctgttattatagaagatcattggtttatgtatttgtggacagatgtactatacttgtttatttattagtgatttgatgttttatcaataagtacaaatccactatgagactagcacaaacacacatgtattattgaaaagtatatcagcaggcaatgattggctcactcacataaacaatcgcctcaagtgctttagatagcacgttgagatgagacgttatgtacaaataaatgctgaagagcaagtctggtacataaaatatgtcgccttgattggagtcaagatgaggtctgtgatttgtttataataagaccgaacatgatattcccacaatcatgtatgcctgaaagatgccggatgcgaatacttaattaggcgttatagaaagcgagctgatatagcactcgggctaaacatgagtacatgaaacatgagtacgtgagaagcacgtgactatgtttaggttaaaatctgtatggtggatatatttgataaatgacatacgctcttatagaaagagtaatccactataacatgtaattcatactacatgtgcattatatgaccaataaggaaagatgagtaaaattatccctatttactcatcgtgtgagcccttgaggtaatttataatttacttcaattttgtgccctatgttacttctgactatattctcgaagtgaaagatcaatgttgctactttagtatgttacaggcgatcatgaatagatatggcctatgggacatgtctaagaaagcaattgttatgaaattgaaagacatgagtacgaaggaagactattgttgttttacatctaccacatgtatttactggtcgaccaattatatcgccctatgtggttgcggatgtaattataaatacatggtgttttttagaatagtcaagtataacctttaagggataggtatacttggattgatgtaacaaaatatgtctggagcactgtaagacatcgattgtttatttcttttagggtggtagccattatttcatccctaacatgtgcataatttgagctcccacgtgtaggtgtactcactagtcgcacgacttatttgctagtatgaattgttttgtaaagttgatgaatgtttaatgccttatattcttgatagagcgctatcaagcccatcatgtccgagtgggatatgtagtactttagctggtacgtccatgatggggtgcgattggaacgcaccgtttcgtcttgatgtgttacgatggaaagacactaatggagcggtatgaagggagacgtataaaagtctcccgaacacaaccgttggacatgttggcaaaacatatgcaccggatttctctccatttccatcaaggaagaagaaggcattccatttcagttttgcaagaacaattggcatttacgccgtggaaatcgggtgttttccttgtgattgcatccagactaacgtgaggtagtgttgttcgtgatttcatcggcaattcaacgttcgttccggggctatttgctttttgcgcattggaatcaggtaagtcgacttccgccgacttgaattccaacaaaatcattggaagccatcggcaaaacgtgctcaaatctggccttagac

SEQ ID NO: 9960 - DNA, 587 bp, Eucalyptus grandis
  Intron number 6 from transcript Egrandis_v1_0.011408m (loc us Egrandis_v1_0.011408m.g) derived from phytozome v7.0 (c hr-ID scaffold_5; pos 9865575 to 9866161 reverse strand)
cgactaccattaaatctgctgtaaaaggtaccctgtaatagagttcaatttgatttgctagctggcgttctataaatagctgttttttttcctgttgattctttttttggaggtaatttgccttacctcctctcctaaagtcttgaactgtcaattgattgtcaacattttctccctgattgtttatattcccatcaatcctatcattcagctgctctgcaaatttatgtaactaggggatgcttcatactcaccaaactgatactttaacacaatgtgattcggagctttaaggacacaaattcatgggatgtttacggtcatggaacgatttccacaaattctggaacttgcagatgcaatagtcagttcgttgtttttatatgtagctaacactttcttcattgaccaaatatagacagatcacaattgaaaatcatctctgttatttatatcatcttctccttttctgttaaggagtgagattcccttctcttcatgttttgcatgatctacgataattacctgattctgcaattgtgatgcactgaaacatgtattcattagtactctttcagaagaaaaaa

SEQ ID NO: 9961 - DNA, 792 bp, Eucalyptus grandis
  Intron number 2 from transcript Egrandis_v1_0.029446m (loc us Egrandis_v1_0.029446m.g) derived from phytozome v7.0 (c hr-ID scaffold_8; pos 16979637 to 16980428)
actgctattgtctctgcttctggatcatcagacaggtaaatatgttgtattgcattgtattttagtgtctgttggagtgtctttttgcttcttcttttttccctttaaggcgatcggtcgcataatttgacttttcttcaataggaaagaccttaaatctaaaagaacattttttatatttatattttttagtttaaacacacaaaaccttgaatagaagaggttaaggtctacatgtgttggcaattcttccttttggtagttaagagatcacatttgtgtaatttagcaagtttttgatttttaaattgtttgattctatgaattactatctgtcgagcctaaagaaatttactcttcatgagttgctggtcattgtaatcgtgctctgaaactaatctgcatctagactagctgttctacatcatctatcgttggacccacagccggtgtagtgtctgttacatgcatcagttgctcatgctttgtaattattcagaggcatcgacaaactagggcaaatacctatgtatcctatatttttggtcaaaataggacttttatattactgttacttttttaatacgttaacatgcatctatttgcacaatccactgaagtaacatcagaacatttcttaatggtttctgaaaagctgtttcatggattctcataatttgactcatgcattcagggatcgctgagtcatcttaagttctgctctaaggtacttaatctgctttggcctcatgctctcactctgtttttaggaatttgtctacctcagccatt

SEQ ID NO: 9962 - DNA, 2657 bp, Eucalyptus grandis
  Intron number 1 from transcript Egrandis_v1_0.033247m (loc us Egrandis_v1_0.033247m.g) derived from phytozome v7.0 (c hr-ID scaffold_9; pos 22021861 to 22024517)
tggacacgcttgatttggcagtcctcagtatatttatgggctttttgtgttgtttcttgatggtgggtttgatttcttcttttggatattagtaggttttgggaggagtttttaatttgtgtctctagcttctgtagctgatgatcgtgtggttctgccgactatagctttaagcatcttgaaaattgttctttgtcgagcgataatttgcactgacctttgtcttgtaaacttcattgcctcgtgagtctcaattgtaaatcaaagtttgttaacttcaataatttcttttgtggccaagaaattagaagctttattgaaaaggcaaaagtcttgttaatcagagtagagcagtttttatacagtggagaaagacattgaagttaattaaagttgatttaagggtctctgttcttacttttcatatcctgagctttcccattagttttggttccatctttgctgttcatttgtgttaaatcctcatcttcattgaggtatcactatgtcatgctctgtcttgtaaaattctgatgatcattggtttctccttcttttggtcctgctttgcttggttgatgttccgagggataataatatcacagttttgtccctcagttgagtttcttgcagcatgctgatcacttatctgttatgcatgctaagttatccaaaaacatggtcttgacttagtcttgacatgctttttctacgaagttatgaaatatttggaatgacaagattacatcaatacatcttattgggctaactgctttaagagtgcttggcactggatacttagggggtgtttgtttgtattctttttcttttttttttaatgaacaaaaatcctgtttttttgttccggggaataaaaaaagaacagaaatgcgtttgtttgcgtttttgttccaaatctattttttgtttccgggaacaaatttggaacagaaacaagaaaaaaaaaacttgtttcttgtttctgaaacactttcaagaaacaaattttctttcttctatttttcttctctttcttttttcttttattcttcttttttctttggccaatcgccggcctcggccatggctggtgaccggccgtcgagggccggcaacctcaccggagcgtcgctggccctcggcgagctcggccatggccgaggccggcgaccagccacaaggaagaaaaaaagaaaaaagaaaaagaaagaaaaaaatgaaaaataaaataaaaatattaaaaaattacaagaaataaaaaaagaacacaaatttaccaaacatgtttctgttctttttttatttcaggaacaaatttactaaacgcgttcttctggtcaaaatttttttttttattttttttgtaaaaactggtcaaaaattgttcctcggaacagaaatagttttttctatttctgttccctggaacaatttttgaacagaaacgcaaacaaacacacccttaggtagcagattttatcttaatttatgcgacatctgagctagataacaattaactgaaattgtattgggtcttaacaataaccaatggtttttgcgtcatttgtcatctattgctctgctgatagtttgcatggttgcagcattcagcctacatttgatacgacttgtgattaaaacatagtgatattgtccaaccaattctgtgagaatgatagactacttcctgcagctgaagtaatggagtcttttacatattcccaagggcgtgagaagggtgttgttcagaaccctaaatactgacaggtaaacttctgttcctaggcatccttttttgggtcatggtcagctgaactaatttgatgttgtcacattgttgtaaaccgcattacccattcatgtgctattggagcacttatcagagtatcttaatataatctggtcttactaagtgtgattatcagaaggacaaagcttgatctgtgctctgtttcattctcaaatggcttatgtacaaaaaagagttcaacacaaactatgtgggattcatgagagatggagcaaaatggtggtagagaacacagacattaaacttgcaggtaggattcgtccctctttactaaagtactattctaatgcaaattttagtgagaagattaattttctttttatggttttttgcttcattatcatcttatcttcacctttttacagagactcactgctttacagtgtatttcatgatgtttcctaatcatcaccccgaaacaatgctgggatctatttctctgttgggcagctaccttttctatcaccaccaatcttcacttgcagcttcactacaagcaaatgttatttctcttgggcatgacaagaaatgcctactctttcatcttattgattttctctctgacgacacaagttgcagtatggtgctgtaatatccatcaacatgaatacgtgatattctgttgacttttatatgcttgagcgtatgtttctataaggctgttgagctttactgcaggttcttttattttctgaacctacctcttgaacagtagtgcatcttgaccatctattttctttcttgttctgcaacttgtagattattgcttctgagattgagatgcactcttgcatgacgcagtctgtgctataaaatgcaggaattgattacctgtccgttgctgcat

SEQ ID NO: 9963 - DNA, 1926 bp, Eucalyptus grandis
  Intron number 5 from transcript Egrandis_v1_0.019360m (loc us Egrandis_v1_0.019360m.g) derived from phytozome v7.0 (c hr-ID scaffold_11; pos 1457968 to 1459893)
tgggataggttcgtttcttatgctaaatgaatatgattgtttgaccagtgtgtgggtgctgcatgtttttacactatggtgatattgccgtcgatcttttcttgacatccttgttaagttgcttgactcgcagaacctgacctgttagccttgtgcattatgcttgtaatcagcaaatcaaaatctagactagtctggttggtatatctagttgaaccaggaactagactttagtctgctgctccttttctttggcttttctagatgaaagatgggatgaattgggtttgatctgactgagccaatagtgcaatcgcctccggccggcatagggaagctgtggtggcttattaattttggagtattacatttcaattgcagcgtctttcttgaagtactaatttttccagttttctctttattcctctacgatttgcacctgattgagccaattgtgtgatcgtgtccggctgctataggtttctgtaaaatgatggaccatacaaaaaggatgtcaacttatatcccctttactaatgtgtttgtgcatggcaacctgtgttctttgttctaaaggtactaatgacagatactagtttttaaagctaacaagtatggacaaccaataggaatagaaaagaatccctcctagattcgagctagagtaatgtgcaaactctgccaggcctttctttgtttgttaatatgtggatgtcaataattttgtatttaacacaaaataccagtatttaatatggattaagatattctgaccaccaaaaataaaaaaagcattaggatatattgaactgatggcttccttcactggtttataggggtttagtgttataagctctgcttttaacttgatagctaatacagcacacattatcacctattacaacttatatcatatttttaggacatggtcaatgtggtataaagatatcagctacctgtgcttttttgtatggtagatgttagcttcatttgctggaagttaaaccttcgaggaccctcctctcaatttaatgtgagactaggcaattgccaaatgatgatgtggagaaagaaatgtgcgcgagaattgacaagggagaaggagaatcaaatattaagaatggtacttaaatatgtttgagaaggctggaaaaaatgggcaggccatgcaggcacattctgcagtcagtcctaatattgttgtctgagctcacccactaataaaagaagaaaattacacgctattctgcaaggctggtgaggcctggctagggccagtgaggttgggctcggattttccttaggtctgctgattggacctttgactctggcaagccactagacctgtgattgatattaagactgctcaacatcagttaataaaaagaactttctttttttcaaaaaggttggttttatttttgttatacatgatctatagcagaagcggtcttcacaactgtcatccacaagtttgttataacttgttttgaatgtatgtctgatgatttaggcggatgtttttagaatgacttttacattttattctttttttccttaaaatcttgcaaggcaagcactttggacttttttaaacgcgaaacccttgaaacctctcaaaacatatatattttttacatgtagattcagatattatttttttttttttcactttctttatgaattttgtgcttctatttccctctctagaaaatgtgatgtgatgcgtcaacacttgcttgtaaggaacatagcaatgggacatgagaagaccaatggaaagggattagcccatagattttgcgtggcactaaatcatgtttggctattgtcatgaaccatgacattcctttgagttctgtgcttttatgaagctctctattgcattcttacccttatgtaggttggagcttaaagggaataagt

SEQ ID NO: 9964 - DNA, 1254 bp, Eucalyptus grandis
  Intron number 3 from transcript Egrandis_v1_0.000757m (loc us Egrandis_v1_0.000757m.g) derived from phytozome v7.0 (c hr-ID scaffold_2; pos 43412564 to 43413817)
caacggtttgaactttggacttttctcaagcatattaatgtggattttgacattttacatatttttatttttaaatactaggaacttacaagtttgatagcctaatgcgtagaaaattacaaaggaggatcatctaggatattgagggtgacctcggtattatatatacttaaaagaactcttatttcgctaatatgaagctgttaaggaatgatctgaaattgagtcttttgaaatgatattggtgcttaaactcatgctaaatggtgtacataaggtattcaaaagctgaagaaaaggttccctttacaagagctggcgttttttgcctggaagtttggtggggataaactctgtaaattagcagtttttttttccttgtgtataacatagtcagggttaccagaaactgctagtgaggctatggtctgtgatctggaatgtatattctgtaatctgggtggctcaagatggtgttctggtgactgagaaaaggcacaggtgcaattgacggggtggtagaaatgcttgaaatcctagactgaggaaaacgtcctcacgtgctgggtcttctttccaataaaaaaaagaaaaggttcagggataatgtgtgctgcattggttacaaagaatatgctgagctttttttttttttttaataaatgggcctttgcttttactttgacaatgaatcgtattgtttatcttaccgataaagcaataagataacttgagcctttaagtttacttgatttaaataggaaaagtgttggcctagataacacttactatgtatgtttaaatgtattttggccaaaactttacttgtttcctatccccccgaaattgtattgtttggaccccaaagattttgttctgctgcaatgttccgtagaagtctagccacaagtcccatgtaccgagtgaagtggcattctgggttcccctttttatttggtgtattcgttttgggtaaccttggttttaattgattctttaatttaaaacctgttctctttttaggagaggatgcgagtttttacaatataatgatgcactttggtctttcacaatatgtatcttttttgctaatatcggtagatttcagatcggcggttcttttttgtttattcaattttaatcatgcatatttctcttggattatttgatagtattattcctatcagttttccttcttgataatggatctggtagggtgtttctgattcataatacatattgaacagggtgata

SEQ ID NO: 9965 - DNA, 1317 bp, Eucalyptus grandis
  Intron number 1 from transcript Egrandis_v1_0.031497m (loc us Egrandis_v1_0.028983m.g) derived from phytozome v7.0 (c hr-ID scaffold_4; pos 25220660 to 25221976)
gccagcgttgaggtatattcacctatttgcttttagcttcttgagtttggctcatcttcaatggatgaaattccaaaggaaataagggttgatctgctcttttattgattcgttgccgacgatggtcgacccgatccttgattccattgaccttttttgcattttcagcaacttttttggcccttgagtgattgttatttagtttccagtatcgtattctttgcatttgagtagcttgatcgcgtccatttgtccatagagtaagttgtaaagatatatggcctatatatatatatatatatatatatatatgcgctcatagctgagtgttcgaccagatcgatcaaaaagtgttttgggtgatccgtcgtgcgaggtgtatactcagcgcacacgataatgacttgagctttagatctcataaatcagaaccgatcaaaccgcagggatgttcatgccatgagattttcaattgatttgtcatcagtctagatagaaaaacaaaataaaggaaaataaagtggcttgcttatattgaatcctttttcttagatgttttgtgggacactagaactaaatatcatgcataaagagtagcacaagatcaaaacatcctagtgtcctttaactgagatgatatttgatctgttcttcattttctttatcactgtttgtaataagtagatcaagggccttggcaatcgataagttttcagctaagtgtactcagcgtatacaatatcgacttgatctttggatctcatgaatcagaacccatcaaaccatagggatgctcatgccatgaaattttttattaatttgtcatcagtctacagagaaaaacaaaggaaaataaactggcttgcttcttggatcctttttcttacatgttttctggtacattaaatttacatatgatgcataaagaatagaacaagatcaaaccatcctagtgcactttgactaagatgatacttgatctgttcttcattttctttatcactgtttgtaataagtagatcaagagccttggcaatcaaaacaactgaaaacgtagtacatccaatagttaaattgcagtgcatatttgacggtaagaaaatggaagagttacactatttaattacggtcatctacttcataaaagtaaatgttagcttttcagagcaaatttaataaggtttaacaagtgcctaagagcactcttttacatctttcattattttttatatctgtaggagtttagatttggcaatctgattgatgatcatttgacttgcaggttgcacaagctacaacattgcctgaggagaaggc

SEQ ID NO: 9966 - DNA, 4857 bp, Eucalyptus grandis
  Intron number 5 from transcript Egrandis_v1_0.011703m (loc us Egrandis_v1_0.011107m.g) derived from phytozome v7.0 (c hr-ID scaffold_8; pos 58885316 to 58890172)
gagggtgttacttgcgggccgagtcacgggatcaggtaccccttcttttttatcacaatcattcccctccaaacaagtaaaatcgtctgaggtctactaaagaaatgtgaagaagtaaaattaactttaacttgatttctatgatcctgagttaagccaaacatagctactcattcgcattatctgatgacagcatcgggagcttgggagtgcataactcgcaggcgtgcgtctcgaacataacagtccgaaacgtgatgatcagggagtccgacaatgggctccgcatcaagacatggcagggcgggagcgggtcggtcacgggcatctccttcgagaacatccagatggaggacgtgcgcaactgcatcatcgtggaccagtactactgcctctccaaggcctgccggaatgaaacctcggccgtgtatgtgaacgatctctcctaccgcaacatcaagggcacctacaacgtgatcagcccgccgatccacttcgcgtgcagcgacaccgtgccatgcaccaacatcaccatgtcggaggttgagctgctgccacacgagggcgagctggtcgacgacccattctgctggaacgcttacggggtccaggagaccgtgaccatccctcccatcgactgcctgcgagatgggatgcctcagaccgtggcagagagccctgcttatagctgctagggaaggactgataaggcaatacagcactatgaatttcactggcgacagatgaaatttgccacatttgtatagagggacatcagcaactaatcatctggatttggctattgattggatctttcctttccccattaggctccatccccactagggttgatccctttttgtgtgatgaggtgtggtagtgttcctgggcctctttccttttgcaccttttgaaattgggggggtttttgtctctttttcccacattgtaatatgctggatttctgctttgctatacatatctttatagaggtgtgacgattgataacatcaccagattcagaccttttaattccgttgtccgtagtagccccaatttaccctgcgtcacatgcccacgcaacgaatagagaccaggtgtgcatagaacaatgcatgattgctaaaatcatattcatgtgcctatttttaatagggttaacttggaataaggacagaatcattttttcaaaagatgaccccaagtgaattttatctctagtaagtgtctaaagttactaaattagtctcagatgataaggttctttgtctgaagtgactgaatttatctccttgccacatccatcaaatctccaccaaccaaagttccatgcatattcttctcaagttttcatcccgtttctctccctctctttttgtctgctattgccggctccctttttcttcgttcttttccctcgccgctatcctcgctcggtggattccctctgtttttcttttcttaactcggctctgttttctttcgctgtcaggcaacggccttccatgtgggatcgcagttataagctggaattgcacactggtctcgtagaactgggaaagaaatgaaggaattttggtgtctgtggcgaatctctgacaaaatgggggaagaaggatcttatgtgctatgcatcaccagcaaagaaaactatgccaaatcctctggtcaagctatctttctctgttttctttttgttcaccagtcacgaacatccgtcgagttgtgcaacaccgtcctgtcgttctaaaatttggaaaaagaaaatcgtctagactcaatttatcagatcatatcgtcaaccacaggttggaaaaccatgacatcttgacgaatttccatgaagggtgcagtgtagatatccccacgtgcctgagaagcctttctgtagtacaagaaaattcccaagaagacaagaatctggtttccctgcaagccttttgagaaaacgagggcctcaaatcagctcacaggtttggaaccgtttgagatgcacctctccaaatcttatcagaacaagaagcaagtgcaatagaggtggaaaaaagcagaatattgtgacaaacggagaggtcgttggaccacagtacatagaataaagcagaggaaaatgttattatgaccagcatcattactctaataaaaagccaagaccaaaagagagagagacacgcactcaaagtaagatgatgcctccactcaagaatatcagacacaatgcctaaaatttgccacagaaaaaccaacttccaagagaaaaaagctcctccaaaagaccaccaacaccaactccttttccttagagatggcgatgctcggatcaaccagaactcgacacctgtcagcgtctccccagagatccattgtctccccaggaagatttccggtgagtatatatattcagaggccatgatgcctcagaatggtcctctgccaagcaacttctcttgaggcccctgattcatatactccctctcattcattttgctgcttctctttgtcgtccattatttgttcaaagcaagcactttgatctcttgaaattttgcatcttcaggaggggctaaaaaaaaaaaaccactcctagaattgaatcctgaggatgtgacattcattatcacagagcaaagatcattttcttctggtcaatttgattaaattcctctggagatattcacttaccatggagaaagttcaagaattggtgctcatttggattttcctggctttgttcctccaaaacgccagcaatgtggaaggaagacatcactgccacaagggccataagaagaatcctcacaagggctcgagttcaaacccacaaatgcctccccctctatcccccatctacttgcctgtgccgaccgtgcctagccctgagccgtgcaactccagctccagcggcatctttgacgtgaccacattcggggcagttggaaatgggttggctgatgacacccccgccttcaaggcagcctggaaggcagcatgcgcagtggagtcgggtgtcgtccttgctccctcaggctacacattcgcaatcacttccacgaacttctcgggcccatgcaaaccggggctcgtgttccaagtaaggattggcttcgtctccatttatacccgcaaagatcgctactatgactccagtacattttcctgaagcactcgttagtactcttccttttttgaaccaacacttgttaaaccatttggaacgtgacaaatttattctgtcgagaacgaatgcaagtcattgtacagcatagtgatttcacaaattattagataacttacagccagaaaaaagtatcacacttttcccttttcaaagttcttggcatgtttctttaagacgcacattttatgaacatttccgttgctgatgtaagctttcaaatgtctgaacaggtagatggggtcttgctgcagccaaatggaccggatcgttggccgaaagcagatagcaagaagcaatggctcaggttctaccagctcaacaacatgactctgacggggaagggaactattgaaggcaacggcgagccgtggtgggatcttccttgcaagccccacagggtgattgaactcaacatgtcaaattattgtatcagcatctgtataaccaaacttttctgcaacccaatattttcacctttcaagtcgggtaaaagcaaaaacttgtctctaaatctatacattcttgtgatcgaaatttcagggtccaaatgggacaacgttgccaggaccgtgcgacagccctgttgtaagtaaactaatccatgactccaactattcagatgcagcaatactattgtcttttctatttagagtgctgaccagcatttatatggttcattttcagatgatagtattcttcatgagcgcaaatttggcagtcaacagattacgaatccagaacagccctcaattccacatgaagttcgacgtctgcctaggagtgttggtcgaaaagctgtccatatattccccaaaacttagccccaacacagacggcatccacatagggtacacaagatctgtggggatatacaacagcatgatctcaaatggtactcaaatcaaatgtaactgtctcgttttatctcaagattacacttgtccattgctttatttatcggctccttgcggtggatgatataaacaggtgatgattgcatctccattggaaccggatcttcgaatgtccacatcgagggtgttacttgcgggccgagtcacgggatcaggtaccctttcttttactcccctccaaacaagctagatcatctgatgtctaccaactaaatgtgaagaaaaataacttgctttaagaaccggacctgattttcacagcaaaggaactagtacgtgtcttccttaacaactaacaagcaacgagtcatatcaggaagaaggtttaaggtcaggaactttagattgagagcttcacaagtaactttaacttgattgggttcttttggtttgcaaccccacaatgccctattttttctcagggagacacagataaaagtagcttgacacagtaaaagtagctttcttttgtaacaatcactttgcgtggatgatataaataattaggacattgaacaaggaagatggatagctttttataggagcttcttggaaacactctagctttacacttcttaaggccgcctttacacttcttaaggccacaatcatagaaaggacaacaagaaatgtagagaaaagaactggagacatgctcctaaattaacaaattttccacgataccaagctaagccgaactgagttactcattcgcgttatttggtgacagcatcgggagcttgggagcgaataactcgcaggcgt

SEQ ID NO: 9967 - DNA, 2502 bp, Eucalyptus grandis
  Intron number 5 from transcript Egrandis_v1_0.007265m (loc us Egrandis_v1_0.007265m.g) derived from phytozome v7.0 (c hr-ID scaffold_1; pos 26698119 to 26700620)
cactttcaaaaggtgagatttcaacctcttaagtcacagaatttctcagcttttcatttgttgacttactgttctaggaagctctctctctctttatttgttgacttactgttccaggaagctctctctctctttatttgttgacttactgttccaggaagctctctctctctttatttgttgacttactgttccaggaagctctctctctctctctctctctccccccaaagttacctactacaagttccttgtcctgctttcattttgaaattcaaggtctttggagccgtgtgatactgttactagacctataaggagataattatcacttcaattaccgtcaagctggagatagtggcatggcaagggataaggagttaggcactaagatggaaaagaaaatactttttacttaatctcttattcgaatttttctaaccatgtgttggcagcccttgtttgcccttaaatgaaaattgccctttaacctataaaaaacctaccaaacaaaatcctttcatgtgtaaaaagcaggagtatgcctttttaattaggctaactgtcccaagcctctccataggtcatgcatgggaacagctttatgtcatcttgtttctgttctacttatcgaagaagcttaaaaatcttttatcacttatttaactacttctttctatgttgtcatatcttcttcagaagatttttcatgtgcccgtgtgggtttgtgtttgtctatatatctgtgcatgcatatgtttgtgtgtattctgtgacatccaataaacataaagttgtctagcttcctggatcttgtgggcagtagttgagcttatagtaacttcttccccctgctggattgtggtggtaaggtttatcatgtgttgatataagacgcatatgagctgatactcaatgcaatggtcatgaggctgcttacattgacgactgcagcacaggcagcttaaagttttaatgcttgtcaatttttcatattcatttctgccatcgcttcctttgtttcaagtatatatgttgcttgaattagtatatcgtgatcggattgcaatgcacaaatcattaaaatggtgatcacctatggactctagcatatggcgtttttggtataacttattcttgctagatgagggcagaagtgtctagacttatctagggtataactgctttgcttgaattcacaccattaattttgctgaaaattcttcctgttcagtcacattttttctattgaattaatgattttttcattgtttcacaaggaaagtaaaatcatttcaagggcattgaggggacaaaatccatgaaaaatgggtcattgcctagaaattagaaggctatcttgagatccatctttaacccctgcaacaacaaggtcttgaaattttctacttcttgaatcgggctcccagaggaagataattgtaggaaaccttcttagtcttcaaacaagaacctgggtgtgggttcaccaagttcactatttataaggtgagggacttctctttctgaaagtagaacagacatgagcaggaattccaaatcaaaaagatgactgtggtatcagtcatctctttatgctgagcgcattattagtcaaatgcctctatgtggcattttatgactcttctggtggaggatccgtgttttcagtgaagcactaaagattatatgtttcaccatgccaaaacagtactccaaatgcactgtcagattctacgggcattgagaatattgttttgtgtggagttagctttcattctgcacatacacaaaaaagatttttgtacaaaaatctgactggtgtccattcctatccttcttatgctgtgatgccattatttcgttccactcaaactgcttctgggaaacaaactttatttcattagtcttcaaatctttgcttcgcatggtttataaacatccccaattaccttccctaagttgaatatctgtttatcctccaattatatttctaaaatagtggataggcctctttggatgtttggaatttctttctcctgaagtgttattttagatctagtatgcttgtatactgcaaaaaatggttatctgtgttcatgaatgctcttcaagaatgctggttttgcgtttctcgctagaagtcgtgtcacttctattgtcattatggttgtcatctctaatcacggtctttatctcttctgtttcgcctaacttagaggaatttatctgataaaagcaaagtggtaagcaccattggtgtgccattttggagttatatgaatggaaactttgttttaattagcagtgggttaaagaatctacagttttttaatgctcggtacttagtcacctgacatcattttacccaatctcaattggtcctctcggatcacaagtcacaattatctgctgtgggcgatagttgttttatcttcatcatcctccttcagtgacctaaattgtttttctggtgcatttttcccttcttatctcgttagg

SEQ ID NO: 9968 - DNA, 6370 bp, Eucalyptus grandis
  Intron number 1 from transcript Egrandis_v1_0.045792m (loc us Egrandis_v1_0.045792m.g) derived from phytozome v7.0 (c hr-ID scaffold_5; pos 73108727 to 73115096 reverse strand)
aagtcgttatacaggttgtgtcaagaaattgatggggacgacttaagaagttccttttgggtgaaggccttcttgattgcatgcgagtcatgcttattcagaatttgcttggccactacaatttgagaaagctggcttgattttctaaaaaccctattttctttacttttctcgtttctaccctctatttttcaaatagttaaagttaagaaagaagaaccaaaaagtaacttaagaaatgggggaatatatgaaaaatccacatgtatgagaggatgggaatccaatcttccgaacatattactcctccaaccctccatttctctctcctctcctccaatggttgagccacgatccctcggtctctcttcttcttcggtcaagtttcaaagagaagactcaaaatttgagcttcattttcaaatcaatttggggaaacaaaacaaccacaacgagatcattttaagcctttttttgccatgttaattgaagattgtccatgaagaacctaagtttctttttataaaagccatgtcagagtcaaaatttaatttcaaaatccatgtagggcgagttgccaaatgagccacttaaggatttgtttggtgatgtttatatttcaaagaacaatttctttttagaaatatttttttatttttatttcctgaaataatttctaagtaaaagaatgcatttgataactatacaaaatttttatttatgaaatggaaaaagaataggaatgtgtttggtacgattcacaaatttttttgtaacgtaggatttgtttaattttttaaggtttttgttattcatcctcaccgcgactaccactacctgtcgctgtcgtcgaccaccacccttggctacttgccgttgccaaccaccatcgttagttgtggcggtgatggtgggcggtggacgatagcagtcggtgatgatggccaatggtggctagacagcagtgagcgacagtgggggccaaggacaaagaaaagaaagaaaaagaaaaagaaaaataacttatttctagatattattcttgagaataagaaactattctttttttacttcttatttttgttttaaatctattccccaatcactttactatttcaagaaataaaaaatttagttgacattaccaaacaaatttatgttctttttttgttctgggtcacaaaagaacataaatcgagataaatagaaacgttaccaaacatatattaagcaattgattctttgccaatgaagcactcagttgattgttagaaaagttttaactctaaaatgagcgtcgtaaaaagattataacatttttttgtccattttccaaaaatagtataactttctcattctaatacaagatatatagtggtagctaacgacttaccaagctaaaaactttttggtcgaatgtacattgtgtggcaaaactgtaacacatgtcatgccacgtggtaacatagaggcaaagtgaattgccacgtggtgagcattaaagcgaacatttctcaaatttggactttaaataccatctaacgcaatcaaatcttgcatcctgaggctttaggtctctaatcagcccataattgattaatagtagctcctaaagtatgaataaacaacataatcaaaacgagaagatcaatatgcgatcagtagagtttggaagagcaagacgttggttatgtgcttagttgatccacaactatcacacctttactctaacaaagctaaaagtaactccatacttgcatcttaagctcccaatcactttttttttaggggtacctggtacctattccttttgagcttccataggctaggaaaagggtctcatgacaagcttgaatagtacatgccatgtgactcatacctactttgttatatttttttacccaatttctcctccttttctacgagtgcaattatctctaatggcaaaaagtcatgctcttcttcaaccagataatctaaaagagagaggtgaaacatcaaccccattccatctctaccttccaacaagcttgctagaaaaacagataaataaagagctggttaaacgtcatgtctcttttttgtctttctttagaagtaaaccatccaaattttgatcaccatttcgcttttctttcgccttctttatcgaattattctcttaaaggagagctcacgaattgccccactcgaccttcccttcctcgacgcacacgtcactaccgagagcaattccatgctcacaaaaacccatgtggggcgagtgggataaaacatccgaaggcgtgcagatcgagcgctttcgattttcaatttgtaattcggtgcccgagtaccttttcaatataataaatcaatccaatcgtgatcacgcgatagaattattactcatccctcgagatgcctaaaaggattttgtatttggcgtgattaaattaaatgggccgatccacttgcaaaaaaatttttgcatggaaaaacataaaaaatattaataaaaaaaaaatggaacgaaattgggggggaaaaattgttgcccggggaagcacggcaaacgagccggggggcgcttcttgacaacgacgctcgcccatcgaagccccgtactctgccccacgcgccatcccctccgcgcgtgggccccacgcgattgaataagggccgatccccggctcgtgattcgggtggcccggcaagggcgtaagcgtcttttcggacggccggtttcacgtgcagggcccctgctttggggaaaaaagtggttttgccaattttggatgtggttttttctttttgatttgcgtgtgaatggaaaaagaaaaagaaaaattctttcaattctggaatttcacgaatcacgcgttttcgatttttttttctacttcgaaatatcttgaattttttttattgataagttgattatgtccagaaaagtgtaaaagttgagtgataaatagagaaagtacgttttttacttcatttcaaaaatggtatgtgtttcgattgataattcttgtaggaatttgtttttctctaaatttgaaaagatactattggtatgtagatctatttttgttggcctctttctttttggggttggtcccctacaaaaatttcaaaattgtgccctcacgaagctaaccttcgtgacaaaagcaattcaaatgattggtgggtgatgtaagattccttgtaaaaaattcaatataaataaatctcatgatacattgtgagattccttatgaaaaattcaatataaataaatctcatgatgcattaaacaaatctcatgatgcattgtgagattccttatggaatattcaatataaataaatctcctaaacaacgtcatgttaagaagccaagtttgaagaaaatgccctatgattagccagagtatactaaattttttcctaggagctccctcttgttttcaaaatccctaatttggccccaattctgcaataatattttggtagacttgtcaacagtgcacgaaagggacctttttcgtgctggcgaaaattaatctcagtaaatgcgtcacgagcatatcgcgttggattttctaccacactaaaattaataatatatcaattcaaaaacttttcatgatattgagctatacttttgcgtgtaaataaggtaccccatgacgaggatatgccgtcaagcgcaggatgaaatgaaaaagatgggatggaaaaggacgaaaggaaaaggacaaaactcaaataaataatatcaatagggataaattaaaaagggcaagaatggaaaattaaaagtgggtttttttctaataaaagaaaacaagtcactacaaaaatacagataagaaaatacggaattttagtaaaacgagaaaccaccgcgaaaaagttttcttgctcgctttttctcttctctttctcggctttttcttgtctgtctttccttccatttctcgctgctcgtgcacggttcttgatgcgccgaggttgaggagggaggtggcggttcgcatttcgggggcgaaacccgcgtggggaaggtggaggggaatcgtgggtcgcggcttgtttgtctcgggccgagctgattcgcctgcgattcgcggcggggagtgatcggttcttgtgtcggccggcggtggctctgtccgggcccgggaggcgcaatgcggtgaagggatgttgccgggttggaggcgggggtgtggggttccgagcttcccgttgggggggcggggggtgatcgggtctcgagatctgggaatgggggggtggttggagtagtagtgatggcggttcttgatttggagctggcgtctttctcgagatgttgacttctctcctggtttgtcgggtgtaataagtggtgggggctgaagggggaggaggaggaggcgtttcgtttttgttcttttctgtgtggtggtggtggtgctgttgttgttggagttttgaattcgtagaagacggggggtttgggttttaggagggggagttgaggagggaacggagtcatgatcgatcagttcatcaatttcgtgattcggcctcccaggtagtttgtcattcttgttgtccctgccgtgttctttgtcaatatcgtcgttacttcgtggactctagcttgtagctttgttttcttgatgctatggaaaccttccgttgaatgttatttagctctgtcaaatgttccaagtgggggagatatgattcatttgtattgaccactgttacgatatggcagctgttgcttgaagtctgtcctcattgacttttgttatcgttgaataagggttgagttaagagaaaggagttcaaaagggacaaaagaatgttttttttggcgatagaagaaaggaacgtccgatctttctggaagacgatcatttaatttctctctagggcttaaagggtatcacggtttctaaattgattgtcatagccactgcctttctttgattactggattttgctgaaggaggaccttgctcgattttgatgctcgcttattgactggtactacatgtagtaaaatgaggacgtccacatgttttttcccatctgaaagtatattcttaaataaatactagatcctttcattttgctcctatcgtttgctttagatttatctttacattatctttcattgggttactcctcatggaacccctcccatcaaaattttgcagtctgtggtctaagaaactcactacggtttccatctctttgtcgacaagttgaatagagtagcatctattgggtttgtctcaatagaaaaaagctcttatggctgtttttctgttagaatcaatagcttgtatgcacacgttctttgttaatttgaaaaacatcttgacagttaatgtgccctctctctgttacctgacataccgctctacatacagggcagagtacaaccctgaccaatacttgtgggaaaaggattttactctagcaggcaggtcgtacaaaagacaagatttggaggcaagtatggacaacaataccaacaattaaataattatttcttttgctttctatacaatttaatgtatattttctcagcggtttttgatctttcaagtcatgatgctttcatttcagcttaccaacaaaagaggccataccctgaagtgtagtcattatgttcctgcacctttgccggaggaaacacctcttccttgtgttatttactgccatggaaacaggtagagaatgtcttaaaacttgaagtctttatttcaagaggaccatgagtgtctcgtttgcctcttgagttgtggaggatttttttagatgtcttgtgcatacacccttttttagatgtcttgtgcatacacccttttctcgcatatctttaaattggcttgtctcctgtgccatggtttattattattattatttttcacgaggaatcattaagggaggtaaagattcattcttttcccaagaaaataaccttgatggctgtttggaatagttggatatccatatgagctgttttagaaatagtttgtaaattttgctgtcttactctagtaaataatgcagtgatgtagggctgatgcaaatgaagctgttgttattctgcttccatcgaatatcactgttttcacacttgatttttcgggatctggcttatctgatggtgaatttgtcagcctgggttggcacgaggtatgtatacatgggatcgcaagttatattcacaaagaaaccatgaaagaagtagctatttttggcttaacaagtaagacattttctaaaagtaaaggcaggaactttatgcatgcttaagctttaagtctctcttctcctttgttccagaaaaatgaccttcaggttgtggtatcacatttaagaagcaataagcaaat

SEQ ID NO: 9969 - DNA, 1489 bp, Eucalyptus grandis
  Intron number 2 from transcript Egrandis_v1_0.012538m (loc us Egrandis_v1_0.012538m.g) derived from phytozome v7.0 (c hr-ID scaffold_4; pos 31127527 to 31129015)
catccgcttccgcgagctcgccgccgacgtcctaggtgagttttacctacctaacctccccctgcacgtcatcatcgatccgtccgccgccgttcgcgccggataagttcgaccggttcgtccgaggccgccgcgagaagacgacaatctcgacgcgttggtcctcttgcgtgttttcaccgataatgccgatcgcgctttatggcgcaatctcggtttttaagattcgttcctagcggcttttcagtttatcaaaagttcctctccattcatttttattttattttttctattaatgaattatgagcgaatcatcacgcatttttcgcttattgaaaatttcaaaatacttgaaaattttataaaatttgccatgtgatgagacctttttcatgatttttttttgaatttatgcagtatttaagattggagataaagtagttaatcttcttattcctttgtgaatgttaatccttttaagtccccccccccctccccggggccccccaacaaaaaaagagcataactagatccaaaaaatttaaagaagttagaactcacagattttttttttttttggatatattgagaatcacgttttctttcttattcgtttaatttttagcaagtctttacaccaatcaatatatggcaatggaatcagggtctactaaattttaattttttttacaagctgaatctaactcatcttatttaaattataggatataagttggattctaaaaaattctgggaatctccatgtttattttttcctcacgtatcccaaatctggaaaatcgtgaccgtaccgttgctccatattcagatttctaatatagattctgtgaatcataacaagtgaaaataattattgatgtttcgcggatggtgtaagtaggttctatttttcgggcatatggaggaaacattctggtaaaatggtcgtcgtggacaaggaaaaatgggaccgttagcaatgggcggtagacagaatcattcggatttttttatcattcggtggctgcgctggcaaatggacgaccattggaatgcgggtcggcgttatgatcagccgtgaatactaaaaacgcccgcacggattgtgtacacgcgttggccagcggctggactttggtagttggcggctacttttcttttctctgttcattttgtattttggtttatatttcgtaatgcttgcgtcatattttcttggagcttggtggcccaaggcccatggctttaatgggtagagtggccagtccgtcgattcttcttcttgggtcgacaagagagattttagttgggtctaatttgataagttaattcagtgcgtcttttagtcattcggatgatggatcctttaccatatggataaaaattctcgtgggtaagtttctttttacttacgaaaatgatgcagtcgctaccgttctaatgtgtgcagattttatggtcttggcttatgttgttttataggatcggg

SEQ ID NO: 9970 - DNA, 1860 bp, Eucalyptus grandis
  Intron number 2 from transcript Egrandis_v1_0.044857m (loc us Egrandis_v1_0.044857m.g) derived from phytozome v7.0 (c hr-ID scaffold_10; pos 34671046 to 34672905 reverse strand )
gttcaagaggctttgtttctttcaggaagcaacaggtgcttcattgcattttcctgaacctattgtcacttcctacatctaaatgttctacacccattatacacatatgtattctatcgttctgaatctccagtagtaggttgtccgtttatttgtagaggttctgtttgtgctccggatgcccaaagtgcaataacggtaacaattctgccttctgatgaaactatgtctcagtcttacgtgcgttatggtctcatgttaaggagattgcctcctttatcttggatatcggaatagtgaaatagatgaactaccaatactgaagttcagattttcttaaacagactattcaaaattctagacaatcttctcctcttttgtctatggtaactagttcatagatgggaaactctttcttggatcataaacatgctgtttccctcagatacctagattggtttgatgtcttgggggtaagataataagggaggtcctcaattctgagccatttttcatttctaaatttatgttgttgtcatttgccaaaagaacaggaaattttggggtttgacactaaaatttattacatttttgttctattcatagttctgaacgcggttgtccgctcattgatgtcacaatggaaaaaggaatttgacaattaggtggtgcctttttgtttcctattttgagggcactttgacaactgtagttttggatgatgcatcacgtttaacaggccccgtgggttgattaaagatcactttctgttagaaatttggacatagtaagaagaagttggcaacaattgaattattttggatggtatagtggtagtttaaaggttcagtgacatagaagagagtttaatagtcttccctgataataacacgatggctagttcttttttttctttttttttggtagtttcttaaaattaacattcttttttgaattgacgcgaaggatgcttcttttacttcgataatttcatattttcttaataagtgtttttagtttttgaaagaaaaacaatggtatgaataaaaaatgaataccccatttagtgaaacatgttttcttgatttgtttagttagtgggacatatgtcactcaaaaagagaaccgcatggcaacactaatagcccctttgctttggcaccaagatacacatatggtattagattaagtaatgcaatcacattgagtgggtctataccaaaataattttttgagactaatttattatgttatactttttatcataagctatttgatatcagtactacattagttcatacttggacccgtatttatagaacagaattttaggaattgggtgtgtgaggagtaggtgagtgagttgagaggaagagctgacgaacttattctgccaaacttaaatctacttatatggaaaatgcctctgacaattgcaagtttaaatttggcctttcaagtaattaaaaggacgcttgtaagtattctgattttctggtgatgggcatttaatagaaattgtggaggttatagagtaggaggtagttttgtgaactacgacttgtaaagtgttatttcttttgaaatgataggttgcatcttattccatagagcatgataccatatgtagatttcttttatgtgcgtcacagaagtttagttctctataccacattggaaaggttgtttataacttagtgaaatttttgctagaattgaatcattataaaatataggtacatgccacgtgaccgtgtaggctcattttcagaaattatttgttccaaaatttttgggggaaattctgagtcattttaatttgcaggttactcagtttgaattccatcaccattttcacgc

SEQ ID NO: 9971 - DNA, 2477 bp, Eucalyptus grandis
  Intron number 4 from transcript Egrandis_v1_0.001287m (loc us Egrandis_v1_0.001287m.g) derived from phytozome v7.0 (c hr-ID scaffold_11; pos 43854492 to 43856968)
cgatttatcaaaaaagagtgtcgtatcttgagcaggtaaaagctcggttatttgccctataggcctatatgtgcagcatttttttaaagagtacctgctcaatggttgatcatttggcattcttgttttgcatggaatttcaaggcgtgttggcataattttttgcttattaactatagaattttccttgtgcttttagtatatagatttgacttttatttgatagataacacctttaattttccaaagcatacaattattggcaatctgaggcatttaaagacatgtagactttttttcatgatttttaatataatattgatatttgatgggaaagccatatatatatttatatttgccataaagtcataagtagcttaagaagtcaaaacagacagatcctgaaccgaacttagtccttgaaacatgtagtaaaataagactggaatctcctattgcctcttcatttatttgagccacccatgtttttgcacttatcaaatgcttgaagagttattgactttgctgggatccttaaacttttggcatttcaccctggttccaaatttcatttctcattacttgctgtatggattactaactgatagcattgtctattagtgaacaaatagatataagaacaaatgtttatgttggccttagtagtaaatagttcctatggcagtctcaccagtgaagcataatacctatggggcaatatgggagttcttgctcctgctttcagaaagtcacaacaggcagacttctaaaagttgagcaagtagaagttgaaacgatttaaaagcacattttcaagaagcaacccacggctgattttgcagctgtgagtgttctaacttctaattgtaagtgtcgaataatactcacagagttcatctttgacccttgaaaccattaagtggggtccatcaagataacatcaatatttggtgccgtttattaccctaatggctgatagttttctaattatcaattaacttcttagttgaaataaggaaataattatcaattaacttcttaagttatttatgtattttcttttctctattttagtatgcctataaatatgcacttgtattttgatgcaaagcaactttttttttttttttaataaactaatgaaagaattatgagagacttttccttgaatttgtgtctgtgagagtgttgcaccttgggcatattctgtggattgatttctccgcatttatcccatttctactacatcggttggtattagagttgacaacatccttggagagcagagccatgtctagtaacgacagcaatggaagtgactaccccttgacgaagatctgcaatgaactctagacaggtgagctgagtagctcagtctgggggaaatctggaaagggtgacgaagtggtgctatggtcaaatattgccacgactaactgttcatggacttgcttcaatcgttcggaacaatcattggatggcctacgtagagaattgtgatttggatggggatatgcagggagattgttagaaagtccaactaagagcttaagctgataggtggaggaagactatatgaatatagagagcacgcacattcacaaaagggatacgtgttagaaagttcgatcttgaaacttaagctattaggtggaaggagaccacatgaatataaagggcatttgggacctattgtcaagtgatatggaataacatttcaatagagatgattttggagttagtactgaggtcgtggtttcaattgagatggggatgtggaccgtgattaagcctgggctgcaattactaaagtgggcaacataggagaagtcatcattgtagcagtgattggtggaatctcgatggtgcatgatgggagatttattaaagacaaatgaaaacaaaagagcatatgcaaattcccttttgatgccatttcattggtagaggttcatatgtatacaagcgaaataacagtcccatgattcttttaataaacaaaatctaaaagacaagtgaaacaacttaactacagaatccaataaaaataaaaacaactgagcatcaaatctctcttgagcggttgtcattgaatcttcctaatttggcttggccctagcctgagattgaatgtgtggatcaatacttcccgttaaagtagtcattgagataagccaaaggccgagtttgtatctaaaatgagtaaaggcattatgagcaaggggccctgcaaatatgtctgccaattgcaataaggatggtaaataccaagtgatgatagaaccaagggtgaccctaggaggcatgataattcctgacagtttttttttctctctatagaaaggtttaagtattatgtttctcataaagagataagtatcttcaaggttttccaaatgtagcttgagaggcatgctgtatttattagattttgctgaacaggtaaccaaattgcttggaattagttcggagtcatc

SEQ ID NO: 9972 - DNA, 1555 bp, Eucalyptus grandis
  Intron number 1 from transcript Egrandis_v1_0.026162m (loc us Egrandis_v1_0.026162m.g) derived from phytozome v7.0 (c hr-ID scaffold_8; pos 10013009 to 10014563)
ggtactctctctctctctctctctctctctctctctctgcgcgggcgtgtgggtttgtgtttgggtgggtgtgtttgtgaagttgagctttcacgtgagttcttctatgtgacatggatgatgctaatcagataccaaaggtagtagcttttgagtttaacattgtggtgatttatagaattcttaatggggtacggcgttaatgtaaatagtaaattgaggatgttggtgtcctgcttctttacacgcagtttctacgtggagttctcgatcagcaagatgtgatattgctatggttatgttggatacgtgctcgaaattgaaaaaccctacagcatgacttatggataaaaaagctgtaaacacagggggtttggtcattcctgtgggcaatctatgatctgataattggagtggaataactttgaaattatcggactaagttggaaatgatgtggctttgtgtcatgagtggtcatggaggcatcgtagttgccctgctatggttccctttatacagttcaaatgttggttcccgttattgttgggtatgaactgaagaactattttgcttgatgccctagaggaccctgcaagttcttgtttggtagaaggaacaggaaacctttctatctgagtggtctttttgcttatataccgatactgttgttggggacaaggttcctcttctaagaagcgtgcagacggccaaaacggtcacattatcgaaacgaaatgtgagatattagatgtggcagatacaatggttgtgcacatctatgattgggcatgctacttctgtgagttgttttttcccctcaaaagaaaggattgaaattattagctcagaagacttggtgggtattttcaaatcttttgtgtgaagtcgtgtttgaaaatttttcttccatttcactggtagtttctggttttgaacttgttccataaacttgtgtcttctattaccacagaactattctttggtgatgttcgctttgggcagtaaatccatatgaaagggtatgagtactattgtatgtcgagattgaaaatgtcatgtaattcctcatattgggttgaatgacctatcattgtacttctgacctaagtgatgtctcaaattcattaaaaattattgtaaaaatggagtcttaatcagagtattatctcctatctcctacatggccaatatccttgtatttaactgactggctggttcaattacattcacttaagatgttaataaaacttcatcaagtaggttagattcatttccattgagaaggtttaattcatcattctttctatatcaatctttgtaggttcatgtgattagtctgttacgataggttctccaagttgtatgtgaggttggtgtcaaagttgatctgacaatttcttttgtaccctgttctccgagtcagaaattctatttcaaaatatctttggttctttcattgatcagttcagaaaggtaatccttttcacatatttctgaatgcattacatcgtctttacagggtttaccctgtttcttgggttcgtcattgatcga

SEQ ID NO: 9973 - DNA, 1340 bp, Eucalyptus grandis
  Intron number 9 from transcript Egrandis_v1_0.011073m (loc us Egrandis_v1_0.010296m.g) derived from phytozome v7.0 (c hr-ID scaffold_8; pos 41194091 to 41195430)
ttgtactctttgccactggtaattaatatataagagatatacttaatgtttttttttttttttttggtaaagagatatacttaatgttcaattgggcttattccaattattttatgggctaaaactattatcagcacttttttctcatcagtacaatgataagcaactcattagataggtaacaaaggttattttatttttgtgggatctggttctgtcatttgaagtattaaatgtgattgttcttatattagttgtgtgggggcaattactctgaaccaatacttttttctatcttttttcatataactagtttcaagtgttagatattacccatcttcttatatagtggttagatggctcaattatagtgacctgtgtccttagtatttccattacccgtttgagaagattcagtgtacttgtacattggagtgtggtttctgctcaataattttggggttattacactaaatggctgcatttttatattaatgcttatcgctacattgaaactggccaatatacttaggttaatttttaaataggaggaaaagtccctttccatctaattcaaatgtgatttgcatggatgtagtatatgcatcatcatgcttactatgtttcccaaaatttatgtgaaatcgattctcttctgtagcatagagttgtctcctgcatatggcttgcgtatgcacttttgcagtttccacatcttggactaatcagaagagcctaagctgctgcaatatagccctgaattccatgctttgaataagtgatattgccaagcatttgagtggtgacatagttactgattcagggttattggtagtttcaaaaactgtaaacatttggtccagttgaataattacatgcaatttaactgattggtgacatggtcactgattcaaggttttccttggaagtggaatcagcaaaagaattcagttttggaatttgttaagatttgctccagttgattagttacatgcaatttaactaattgggtgtatacaaggtaaactacttttgtagacatctcacttcggtcatagttttgtgttagccattgatcaagcccctcaactttgatttcacttttgtattgtaattaggtcaatttgttggattttggtcaaagaaccactaactggtttgtgccagaagtgacttgattggaagtgaaatccaagtcaagtttgaaaaataaaaagtacaatgactgagatgaattggtagttctaccagaaagttgttcatggtggtgaacaattggtggttgtcttcgtttgatttttgcaggtcgaattcccaatacgaagaggttgaatttggct

SEQ ID NO: 9974 - DNA, 1198 bp, Eucalyptus grandis
  Intron number 9 from transcript Egrandis_v1_0.003276m (loc us Egrandis_v1_0.003276m.g) derived from phytozome v7.0 (c hr-ID scaffold_8; pos 60366525 to 60367722)
gaaccggataataatcctgttgtcatcctttgtaggtacttttcattatataccttatgagacagcggcacatacatctatgtttagtagatttaagattcaaacaattcccttgacaaggatttagtcataaaatgcatcctctttgtacagaagggcttgcaagggcacaaagaaaagtgcttttgtgaaaacctccttttaacttttcctactgaagccttctgcttcaagtctagttccagccatctgatagcaacatcagaactttcactttctgaatttctttgcttccatggtactgtcagactatgcagagaataactcaagtacgaatttgtcctctagtcgtgtcttgtgtgtactcgtgctgggtcatgactcttaacacgcatgacatgttgtgttgcacaaacatatcatcatacctgaaactttcaggtatatgacgaaacatctgttgtggtgtaatattggattgaccaacaacggatgatgctagacgaagatgcttgctgataaagattttcattggacgtccacagttaattaatctttgttaatttaccagtggttataagatttgcagacgctcctgttcttgttctacaataaattgattttgctatatatgcaaataacaagaatcaaaagaaattcttgtgactgttctttgtttgtagctgaagtagttgaaaataggcaatgtacacttgttcttctgcgtgcttaatttaattgtctggcctattagctgtgctacacggcttggagacatagtcagtcttccattcggttgcagttgtgtaaggatgactagtttgccaatgcaaccatgtggttttttattcaccttcatactttaccccacaggacagcggtaggcaatgtacacttgttcttctgtgtgcttaatttaattttctggcctattagctgtgttacacggcttggagacgtagtcagtcttcaattcggttgcagttgcgtgaagatgactagcttgccaatgcaaccatttttttctttttctttttcctattcaccttcgtactttaccccatgggactgcagtgctactggagcatgttttactctgtctaacaagaatgattgatcctttacatggaatatttttatctgattctcctttgttgttgcagctcgatcatcaggtttgccgaacaaagcttgaatc

SEQ ID NO: 9975 - DNA, 2565 bp, Eucalyptus grandis
  Intron number 4 from transcript Egrandis_v1_0.001557m (loc us Egrandis_v1_0.001557m.g) derived from phytozome v7.0 (c hr-ID scaffold_5; pos 31101019 to 31103583 reverse strand)
gactcaatatcacaggagttctcaaacaatttaaggtgagcattaccaacataagcctttttattatctacttaattttatatgtagatgcatatcatatgtactagtacatgaaaggaagtggtgttcctctgtttcaggcaccacttcactattttctttcaaaatgaccctaattaattccgttagagatatttttatgtgaagcaaaattgacatttgataacgtaagcgaagaacttcattagaagtactcaatggagacatttttgttaataaaatacacaatacaaagaagttttatacatataagtggaaagagaaagatattgcaagatctgattttttttttttttaatgaaggccattgcattattagaaaattcaactattcatattgacatagcgagagataaaaaaacaaaataatcaatttcatgtatacatgtccattatataatatttgtagaataggtaattgaggatatttgatggaaggaatagaaaaaaggaaaaagattgaaatattttaaagtaggagatcatctttaccttatatacagtatagataaaggttaaatacttttaaacctaatatctctaactattaacatagttatattttaaaatcaaatcaaatctacctagtggagaaattcaaaatgcaatttgctgtcggttgtttacgtatgaactttattatttaaaaaaaaaattgtatagtgatcgaacaaaaaggaaataaaaatatgacaaatctacccgttgacacgtatgtagaaataaaaacacccaagaagtggttggtttagggtgcgtttggttgtgtttctgtttaaaaattgttccagggaacagaaatagaaaaaagtgtttctgctcctgggaacaatttctgaacaaaacaacgcgtttggtaaacttgttccgggaataaaaaataaacaggaacatgtttggtaaatttggataatttttttatttcttttattttttctatttttttctattttttcctttttttctttttcattttttttttcttcttttggtcagtcgtcggccaattccgaatatttttcaaagttgcattcagtccttgcatgacttaaaaaaaaattaaagtttataaatctttacgcaagtacattgtgaaagtattcatatcccctattcatctacgatgtatagttaaagccagacctagcagaatcttcattcctatgcttgtcacatggtacttcacttcgtttttgtgattgccatttgatggaatagtcttgtcacatggcccacatttgcgcttgccatgtggcacctcactgtgcttttatgtttgccatgtggcataatgtgtggcatagttttgttatgtggccagcattcacatgctcgccacatgacacttcacttatattttgtgattgccacatgcatgacacgctacacattgttatcccaaattaattttcatccactaatggatggcagatttggatggggagtactatgttgaaattcttctgttagaagaaaattagtctaggtgattgtgttatagtggtaccaatttaggatttttgtgaaatgaaaatcggtttagagtaaatctacgtaatgatttgaaatttttaatggtattagttctcatttttccttttataattgtctaacagaactttatctttgaagttttttatattgtgtacctatattttattcaattctttgaaataatatctaaaatgtaaaaacatagtagttatcattgataaagcctagtcgtgtgcgtgccgcctcacatcactgtgcaagctttgctcccaaatatatattctagtaattacggtaaagttcgaaagtgtttagtaataaataaatacaacatatgatttataagaaatcagtttatagtaactttaaatgaaaagtcaattaataggttagaaaatttactcaaaaacctatatagtaggttccaagttgcacaccgaagctccttacttccacatgaagagtgttgtggccttagcatatgtaatcatgacatattcacctagtcaatattgatcatataacagtgaaggatatgtaattgtgacatatcctttccttgagaaacccaatctcctccatgcgttgcgtagcgaaattaattcacctcaatcaagcaaagcccctaaaaatcaattatgacattattaatacatggacaacgtgaatgacttccggtattgttttaccatcatttcatgagttttagtcccctatctatgtacaacaagaagcataagcctatttgtagactctgtaacagatcacctctacattaaataaacaaattgctcatgatcaacgagctaaaatataataatttcttcaaagatcagtattggatacgcttcagtagcaacttattctcaaatgggaatcccactgtttaaatgtaaagaaacaacataatcattcaaacatccctttttgtccatttcaaaatgtttatcaaaagttgttttcgctgtatttgcaggatttccaaaatttgaagtacattactttcagtta

SEQ ID NO: 9976 - DNA, 2635 bp, Eucalyptus grandis
  Intron number 2 from transcript Egrandis_v1_0.015721m (loc us Egrandis_v1_0.015721m.g) derived from phytozome v7.0 (c hr-ID scaffold_8; pos 51599805 to 51602439)
ggtatcttcattctctaaccaacaccttgtttactttgatgatatcaacaccatacaatcttcttcttctttttttatatggatccgatttattcgttttgatgatgaaagtttttggctgtaatattttaccttcctttatgcaaggattatctaacttatatttttgcttatttctacctacataaaggcggtattactgtgtttacatttacgaataagatttggataacgactgacgcctctaaaagaaccaaaaataaataaataaaaagaagaaggaggagaaaaacagactgcttttaaagcttcattagtctcaatcttttttctaatagaatacgtcagggtaatcttaaaaagaagttatgagtgcatcttctggagcaatcacgggattgctttaccccctttcatcttagcaaatataataagaatggaagtggggaaaagatttgaaagttttccaaattatccccaagttctattgtttgcgctatcgttagataatacttatgtcattgaactcgttttcatttgacaggagagaaggagaattgataaaatcggttgtgcaaaaagttttgaaagagttgaaggagttggttgctgatgattatttggttggaattgacagtcctgtggagaaggttatgcgattggtaaacaagaatgctagtgctacctcgtgtgtgggaatttatggaattacgggcattggtaagactactcttgctaaagtcatatacaataagctgtctgatctatttgtgcatcgtagcttcattgcaaacatcagggtatcatgcgaacgtcatggtattaattacttacaaaatcaattaatctttgatatgcggaaaagagaaattcaattttgcaatagcgacgaaagactcaagtacatctcgtctaggtttaaagatgagaaagccctcattattcttgatgacgtggataccactagtcagttagaggctttggctggaaatccttactggtttggctcaggaagtaggatctttgttaccactaaaaatgagagtgttcttgatagagtgaacatcaagtacaagcatgagcaaatggatgaggagcaatctcttgtcctattttctagacatgcatttcgaagagaccatcctccatatgaatttttagctctctctcgtcttgtggtatctgcaacggaagggattcccttggctgtcaagtttgtaggttcatttttgtgtgaaaaaccatcacgaatatggagagaaatactacgaaagatgcaaaatatacctcatatggctgtgcaagaaaagttcaggataatttgtgaagaaatgggggaggatcgaaaaaaggcggaagatgcatcttccgctgctacgccttgtccttccatcttgccaagtgaaaacgattacgaagtgttcttgagttttagaggtgtagatactcgaagaggcttcagcgactacctctactgcaggctcgtcgatgttggaatccgtgtcttcagggacgacgatgagctccgcaggggcgagagtttgagcgaagatcttatgcgagtcatcaagaacagcaatattttgatcccaattatctctgtgaattatgcttctagcaaatggtgccttgatgaacttgttgaaatgatgaagtgcaagaattgctcagggcacatagtgttacctatattctacgatgtggaacctgcggatgtgcgagatcaaaagggtcaatttggagaggcatttcattattccggtaggcgtttcaatcaaaagtctaccgcagaatggaagcaagcgctgatagaagtcagttccttacaaggatggcaatttgctaatgggtaattcattctttaaccagcactttatttgctttgacgatgtcaacaccagtcaaaatgataatttttttatcgatctgattcattcgttttaagaatgaaactcctttactataaaattttgccttcctttatgcaaggattctctaacttatattttgcttatttccgcctacataaaagcagcgtaactgtgtttatccctacgaataagatttggattattatgatgacttacgcctctgaaagagcccaaaagaagaagaagaagagaagactgtcttagtggtttagtaaattattttccggtgtagttcttccatctcgttttttctttcttacgccgaggaaacacatcattattcaacttcctgtcaaactccacgttagattaatcaacatcatagaacatagatactactcaaaaggaaaactagaaaaaaaaatgcttcctattatgatccatatccttaacggaccacagattttgaaatttaattcagatccttaatatgtgcaaaacttaaagcttcactagcctcaaatctttttctaattcaatacatttagagtaaccttgaaagaatttatgggtgcatcatgtggggcaaccatatttactggtcggtggggaagaaaaacatacactaccaactgggggtgcaaggcatgtgggtactggtacgttaaaataaggaacgcagcctggcagggctccttatttgagaactaccgcagttggcccttgcaggtgggaaaccacccgggtagaggtgaggcaaaagg

SEQ ID NO: 9977 - DNA, 1351 bp, Eucalyptus grandis
  Intron number 16 from transcript Egrandis_v1_0.005305m (lo cus Egrandis_v1_0.005305m.g) derived from phytozome v7.0 ( chr-ID scaffold_4; pos 33952682 to 33954032 reverse strand )
gaggtaataattctctttgaccatgaatgaaatacattagatggagtttttgggaaaggcattaaccacacttagtggtgaactttggttaagtttgaatgagacaaatccatttcatgtcacctctaaaatctgacttaaaattgccattgccaaaaggatgtactcaccttattttttagtgcaactccaaagggattaggataagtcacgatttgatttatcaccttcgatagtacatgtgggtgctaccattctatcgaacagatattgacaccaaagaaaagggaattaagaagcaaatcttagcagttaaagattctttgttgtcagatttgcctcttgtttacttcccagcaatttgaaggaaagatgttgtgtgtattcaggaggatgcttgtatatctcagaatatagagcacgaaagattggattgagtgtcactgctggacatgaaaaagacttaagggaaattgttgcatgaaagccgcaaattgagtccacggtttccttcaactaactgttttcattcagttgcatgaggagaggaatcacaaaagacttgattgtaatttcttaaactggaagtggggggatattttaattattttccaggaagaataagtacagatttccgaacaaaattaccactttcttgttagtcatgtgaatcataagtttgaaatgtatcttaaatatgtggcagttgtgctcacgtgcttctttttgaatatggacacaagctttctcatgatcttatttggatgctcacacatctgtggagagaggaagagggaaagggagaggggagggagggagggagagatgtgatctatgacaaatatgtcattaacacaacatgagggagagggaggggggagggtgggggagggagatttgttccatgagaaccatctcattaacgcaacatgaggctgatacatcgtttgctctatggtaagaaggagaggagtctttgttacctggtgcttaggccatggagcttggtttactgctttaactgtgatgattgggtctactaatgggacatttatgactaaactatcagttttctatgaaaagttaatttgcagagatgggaattcattataagaccaagtactaaggattatgcataagctttccagattgtaaacggggtttttctctttctggcgagcttgtcttttctattctattatttttctgggttgaaaacttgggcaagcttgaaactgcctctactggtagttgtagtcaaggtaatcaggcgcagtagttaattaccttgaaatgtttggtcttttttacttcaggagcttattgaaaagctttgcaaaggggaactacc

SEQ ID NO: 9978 - DNA, 1555 bp, Eucalyptus grandis
  Intron number 4 from transcript Egrandis_v1_0.019347m (loc us Egrandis_v1_0.011599m.g) derived from phytozome v7.0 (c hr-ID scaffold_10; pos 22733241 to 22734795)
actctagtgtgaaaggtacattgactcaatgttcaaattcagatttttgtgtttggcagtttgctcataatttgtcatctgaaggcataccttcctttaaccctgagcaagaggttagttggaagacgatctttcatgctttatttttcactgaggttggattttggattgttaatatggtccttcagataaggttcgctgcataattgcacgtgcaagggttgtttttctcatatatggattctgttcacacttgaattttttctgaggaataactttggtctttaaggtttctatggtatagtagaccaaattaggaaaagttccaaaaggagttatttgtcaaattctctttctgacaaatggtattcaggttgtttgtccatgtgagatgattctagacagcaaaatttgaactgagattttcccatatcatcgcaacggaattgtcagcatatttttttaataatgcgatgccatcatctgcagatgtcagttcattgtcgcttaggacttcatagccgggtaaacagcggcagttggaattacttttaccatcatttgtctatcagcaaggcccttcccatatttggtcgttattattactttgcgggcctagaacgagggaaaagcagaagataggactgcatggacagcacttctttagtctctaatgaaaccaagggactggatttgatggaacattgaaacctttagaaaacacacggatctcttgttgtagacagatgagtgagataacttgttatgtccttgaagcatttactggcaacctgcaggctgcaccaccacaacatatcaaaatttcctctttacaagaaacgagtcagctatcttaattagactaatgtacaattctttctcagcgcctgagttgtccagctttgagggttagtaatgtttttcacaatacagagattatctgtattttttctcggttaatttcttcaaaagcaagttttgacattgtttcatgggtttttgtagaatctcctttgtttctggtggttccttctctacgaggaagatcctagctttcaaaactatgcttaaagatggccttttcaaaatgcaaagatccaagagacaatatgaatttttatgttcatcactttttagagaaataaaaaacgcttaagtgtgcataaggtcgttacgtcaaatgcagtacttctctttaggtcacttagaaagcaggttgtgactttgacctgtgttaagacttgtcagcaggacttgcctttcagaaggtcaatttccaattacttttttgactacctcaatttgcatttaccactttcatttggtcaaatccagcttgacttattctttgttttggattttccaattaaagcaggggggtattatatttagtggtatgtaaggatagatttatgtgctttatagtttgattataccctaagatttgatgtcttggttattttcccaccatgttgatttgatttctccaatactgaaaatttcttgtactatgttgtcagtggattctctcaagtgggcttgtccggatcgcatc

SEQ ID NO: 9979 - DNA, 6697 bp, Eucalyptus grandis
  Intron number 2 from transcript Egrandis_v1_0.025879m (loc us Egrandis_v1_0.025879m.g) derived from phytozome v7.0 (c hr-ID scaffold_8; pos 59923434 to 59930130)
taaaccctccccacactcaccctcgcggcactgaggtcttggtcgtcatcgagggcacactccttgtcggcttcgtcacatccaaccaattgaacaacactctcttcaccaaagtcttgtacaaaggcgatgtgtttgttttcccaattggactcattcacttccagttgaatactggaaagacccctgcgctggcctttgccggtttgagcagccaaaatccaggagtcattaccattgctaactccgtctttggaacaaagccacccatttctgctgatgttctcaccaaggccttccaagtggacaagaaaactgtggactaccttcaagcacagttttggtacgacaacaactaaatggaacagatgactcaagatatgccgacagagcatttgagccatagtacttatgagatcattgctactttccaagattgctaagaataaatgaataatttttctcaatgtttatagggttgttatataccttgttgtatgaatcattgagcaataaagatcatttactaagaatctctttcaacccaaaccccccgggcgctttcttccctccctccctccctcactgttttgaggataatttctcattcgaaaggagccaaatcccaagcaaagtcattcctcacatttaattacggggcgaggatccataaaaattccatcgatgtcacctttttcaagctctaatttggtggaagcacaggaaaggaagtcccagtccacacaccgcttgtcatcaggatcattgctttgtgctgcctagttgtctacttgtttcctactaaccacgatgtatcgtcactttgtagaaagcatgcggtattatcgcagttcaacatctgcatatctgtgaaaactgtcctatggcaattacgtgggagctcttacgattcatgtgttccactccatgctgaatttcaggccatttttgaaaacatgactagtttcaaccaaaagcccgatttggaaaaccattcactaagaaactgtgccacatagccaaagaatactccctaaaataactcaagttagagtagttgattaaaagcagaatatggaaacttaaaagacgaaaagaagtgggagacagagactcactataaccaaattgaagtcgcctacgatattttatatggatcaggtgttcggaaaagaatagcgagcacattaagtcgtagaactttccgttcttcgcaagtagagaaggacaattatctattaaacattcactaccgaaaacggattgatgtgaagctcactacagatatgcaaattaagtagtcgccatcatctacacatcttcaacaactctcccatttctccatgttatattaagatgtgtaaactgcgtttaaacctctctgctcctcttgcaatttcctataagcgagtcctcgttagcagaagtaaaaaaataaccttcttttttccgagtataggttttttttctttcaatcatcgtccgcagtacatattcgttttggtaggcttctgattggtgctgcggtttttacatccttggaatggataaaaaaacagctcaaaaatggaagtacatgattgaatcgtaatgcaatgcatacgcctggcaaagcgatgaagttcctgcgtatttcccttttaaaaacgcttcatgtgatccaatttacttcatcaagaggactggctgacgtgtcgtctgccggaaaagtcaaacaaaaattacaaaaatttgcaaactcccaaggtctgattgttgtgacttacatcatttgaggaaggtgaagcacaatccaaaaattgaaatcattaattttcaaagtacttttttaggaaccaaacacgaatggacctatggcatattcaaagctttttcaagtaaaaaactagtaagcgcttttcttaattaaaccaaagcataacggtgtcaagcaggatgaactggatatcaaattgtgtttttctaatcgaaatgccatgtctctattcaatttgactagggttagtgttccgcctgattccttgatctattcccagcatagttctctcacttgtacattaatcaatgcatgcttgctagataatccttgctccaaggacttttgaactttcaacaaaaacataaaaaccaaagtaaaggtcatgttaatcctcaagttcgctggtctcaacaagtccattctagaaactacgagaccatctagaaatccattcaacagaatatgagataaccttattaacaaagcctagctatgtgaaacaaccttaagaaatgctttagtccaggatgagatatgttttcggtctaacatataaaagtgcattgcaagcaagcatatgctctaaatattctttttagtttcctccaaataacaaagtggatcaaattttctaatttaacgagggagaacatcagcaaacctaaactatttctttcgcaaatgtaaaagcaaatgctcgggagacacggagattgaccctttcaacaacatttgcagagacactattgtatcaatctttactcaaacaagttgagcttgaaaaggcgccagatataaattatataagacaaacaagggtggactcaattacttggctcagttttaggcccctagatcacgtcaaatcacgctcattggtacatgaatggtcgtgatcatgtgatgaagatccatcacgcgaacattccttgtcaagacttggcctccattgatttagtcccgggtcgtcgcgtcaatttatgaaagttgctgttcatttctttttcctaggaatataaaatcaaagtaatggacacgtgcttgtagttgttgttgtggaatgacccgtccatcgcgtcttaaaccaaacttgcataatatcggaagattttcaatgttgcctatcacgcacaaagcgctgtacttggtcaacaatctgcatttatatatagagcacttgtcgccatgcctcgtcaagtagattacctggagagagcctaaagtctttctactaatttatttaacaggactcgcctttaacaaaaagttaagccaacaaatttagtatcaaccaaataaatcaattgctcttcaccgtgatgtgcatccgacgaaaaaccgaaatcacttatactcttaattgtaacccttaaaaacttagcttgttaatacttatgtgggacattaattatagttaatcctttaaatgtccttgtttgagcgatctaatccattgaaaattttattatgcagtgtagtcttcgacgtaagatatgggctgtaagtcaccataatctaagggcctgcatgtttttgttcctcatttctgtttctgaacacttttttttttttgttcccgagaacaaaaaaagaacagaaacatgtttggttgcgtttatgttctttttttatttttttgttcccggaacacaaaaagaatagaaatgagaaacaaaaaaaatttgtttcttgttccagaaacgattttgaagaaacgcttcttcttctctctcttctcttttcttcttctttttttcttcttttttctttggccggtcaccggcctcggccatggccggcgaccggctatcgagggccagcgatgacgtcaagggtcggcgaccttgccggagcatcgccggcccccggcgaggccgatcctcgccgtggttgggtgaggctcggcctcgccttggttgggcgagctcggcctcgcccagatccggcgaggccaagtgtcgccagcccccgatgaggccgaacctcgccatggttgggcgagctcgagctcacctagatccggcgaggccgagcctcgctgggggctggcgagcctcgccgtggctgggcgaggctgtcggccacgtcggccgggaaccggccgaaagaagaaaaaataaaaaagaaatgaaaaaaatgaaaaataaaataaaaatattaaaaaattaaaagaaacaaaaaaagaataaaatttactaaacgtgtttatattcattttttattaataaaaaagcattgataatatttttagaggtggctcgagaaaacttctatatgtaggacgttcacaccataatctcttatagaaacacgctgtggcgaaaacttctgtatgtaggacgttcacaccatgtcctactccccagggagaaaactagctgtggccccaagtcatcaactaatgagtattcaaacttctgtatgtagatactactccccagggagaaaactcaagattgttagtaataaaaaatttgatatgtggaaggtaaaggcctgtttggcaatgtcctactctttcgtttttcaaatatttcgttctcggaaaaaaataaatatttgataacatcaactaatttttatatttattgaaatagaaaagtggttggggaatagatttgtaatagaaataaaaactagaaaaaagcattttattgtttctgaaaataatttctagaaataagttatttcttcttttttttattttcttttcttctttcttgtcgcctcctcgcccttggccactacccctattgtccaaccaacactggctggccgccgccacccatcacccgccacccaccacccaccttccgctgttggtggtagcaacggcaaggaagaataaaaaaagaaaaaaagaaaaaaatcttaaaaattatttaaaaaattaaaagaaattatacgttacaaaaaaaaattgtggatcgtaccaaatacattccttttttttttttcactatgagaatgaaaattttgcacaattatcaaatacgttattttatttagaaattattctgaagaatataaatagaaaaaaaaaaagctatttttgaaaagaaattgttctccggaacataagtgttaccaaacagacctaagaaaccacaaaaggaagactcgctattactaacttaaaaatctcctaaacttatttttggggagcaaatgtgcattggaatatcatatagcgtaaaattaattaaataaatttgtgcttctagcaatctcattactcaaagacataatgcagcgggattgtcttttcacctttcatctcttaaattggttagcacaaaatctatcatgacaaaattatgattggaaagttgccttaatcatctacccatctttaacaactctcccacttctctgagaaaatctgtagaggagcttcgaggttagaaataatagagggacatttggtaatttcaaggaaattagctaaaattctttggtgttgatagtaaaagcctcttttgaattataaccttccgaagcttcgtttttccaacgaattgggtgacttaattaatatccaccagctcaacatggaaacattcacacccttgatcctcaagtaagcgatgtcatgtaagttctagaagccattggaatttggaataagatattgctcacaagttctaactttcgtaaaacttttctgctcataaggttgtgaagcagtcgcagctttggacaacggcatcttatttctgacctcccatgaacttgtgttcccaaaggtacttaatgaatcaagttttgtgcaacaggagagtgaatcactgctatgtggattgctactaagttcactgtttgggatgttaaatcagacgaagtcccctgattattactgatacgaaatatctgcagcccaaaaatttccatggtgaagatgagtgtgaaaagagtttttcctactctagaaagggtcaattcaatccactttggatgcatgaaactgtgttcagaaaacagtccttgtgtaatcatgctgctctaaattgatgctgaagagctgaagaagtgaaggaggaataatgcaaggttgtaaaagttatgaatgagcacttccatagctgataatatgcattgtttaagctggagatgagaaaatcaaatagactgccaggtggtcatagtggttatggaacggtccattgtttggaattaagaatggggaaataaagatagaaacattgaaaacttggtcttctgcagggaaacttgttgcataaattgtttaccaggtcaagcactgtcatgtataaatagagaccatgtcatgcaaggcacctcactcctccctcgagcaataatactctgagctaggaaatagaacctgagatcagccccaactcccgcccacaatgaagtcctttccagttagccttctcattttggctttggcaactgcaactgcctttgcttatgacccaagtcctcttcaggacatatgcgtggccatcaacgaccccaagtctgcaggttaaacctctattctagtgttattgacatgctgttttcttcttgtcagcgatgctataaacagaacatgcaaaaaggttttgttttggtaacatgacgacattgtcatcgactataactagtacaatagtcatcgcagattgagtgatgcatattaagatgagttctgttttcttatgcagtgtttgtgaacggggagttttgcaaggaccctaagcaagccaatgcagatgacttcacctttatggggttcagaaagcctgggaatactgcaaacccacttggatcgaaagtcacacctgcaaccgtcaacgagtttccaggactcaatactttgggcatatccgcggctcgcattgacttcgctcctggaggtttaaaccctcctcacactcaccctcgtggcactgaggtcttggtcgtcatcgagggcacactccttgtcgg

SEQ ID NO: 9980 - DNA, 7162 bp, Eucalyptus grandis
  Intron number 1 from transcript Egrandis_v1_0.018924m (loc us Egrandis_v1_0.018912m.g) derived from phytozome v7.0 (c hr-ID scaffold_940; pos 4586 to 11747)
ttctcgctcttgcagcccgtgattccgtttttctggtactttataatctcgtgcttccatttataacagatctccgatatgagtgcaaaccaatgtggatcaatttcattcacttctacgcaaatcttggcgacggcaacatgattgatatcttttaattgcaatgattcttcaaatatttgagatatcttgagtgatgggattcatgaaattcaatgcagacgaatggacgaagttgggccgtcccgacgggacgtagagatgggcgagtctccttggcatcagatactgcaaatttgccaggtttccgggattcagttgatgtgcaaaagcaaaagtttgctgacttaggactgaacacccttgatctcgttgctcttgttggtcagtattttcaatttgtccccatttcaatttactatcctgcagtacacaagttggcaaccaaatgcgttatactgcagcatttccaaacctaattatttttctcctgtctgctgtatctaaggacaactccgcctgtcggtagttgttatgggcatgcatggtaacatttttatttttttcgatttctattcttttgttctccgaaataaaaaaagaacagaaatctgtttggtaacaccaacttatttttctattcaccggaatagaaaaataactagggaatagattttaaacagaaacaagaaaaaaaaaagtagcttattgttgtcgggaacaatttctaaaaataagtttttctttttctatatttcttttcttcttcttccttgttgcggccactgctgaccacctgccatccattggccaccgactatggccgctggcctgccgccagcggccatagtcggtggccaaccgctggtgacgattgccgtcgcctgtagtccaccaaccgccgcccacagcccatcggccgacggccaccaccatccgccaacaacctactgtcaacaactgccgcacaatcgtcgcctgccgtcgcacgactgccgatagttgctgccgatcgctgtcataggactgccacccacagctcaccgaccatcgccccctctcgtggctagtgggttgtgggcggcaatcctgtgtcagtggcgacgattggcgatcgtgcgccggtcgtgcggtggtcgtgcggcgtttgtgcgacaatcgtgcgacggtcgtgcggcgatcgtgcggcggtcgtgcggcgacaatcgtcgtagataataaatttctcatatgtccatgtgcatcaaaaggggtacactaagtttctttgcttttgaccaatacttgatacaggagggcacaccataggaactggagcttgccaattcttcagctacagactctacaacttcaccaatactacgtcaagtggagcggacgcttccattgatccttcctttgtttctcaactccagtctctgtgtccgcaaaacggtgatggcacaaggcgtgttgccctcgacaccggcagccctagtcgtttcgatgcatccttcttcgcaaacttgaggagcggaaggggagttttggagtccgatcaaaagctatggaccgatgcctccaccaaaaccttcgtgcaaggctttctaagtggcaaaggctcgacccaattggacttcaacacggagtttgctaaatcgatggtgaagatgagtaagattggtgtgaagacggggaccgatggtgaaattaggaaaatatgctccgccattaatgcatgatttagatcattaaagatgattgcacttcggtatttcagtgttatctattggagtcggtgtaagctgattcatggtgcgttctaatgaaagaagggaacgtgtagtactttataattaaataaaattgatggctatcgtctcaaaaatgaaaatcttgaccatgaatttcaagatttcttatattcttgttctagtgccatttgatattttattcaaaactagatgttggtggcttatttattctagtaaatgcgttacaattgacataatctaaggtttttagtggctttaaaaaaatgcattttatgataaaacgtaacaaatctttatagaaaatcgtaacatatagaaaattatatttttaaatgttttgtttttttatcatattttaaaatcataaattcgaagatttgatatcttttcatttacattcacaactctaaaaagcgtcttgctaggtggtacaaaatcaatgacctatcttgtgcttgacttgggttcattaatttttttatgaaatcgatttatattattataatgccttcatatagaaaattaaaataaagtaatttgacacaattgcagtataattaataaaaaaaacatgtatacacttcggttgttggaaaataattcaatatatccaagtttcgataacttaatttgccttcttttttttctcttgttattctgtactttattttatcagccaactatatctttaattattaggatcgccgttgttatgtcaagaaaatttccatttaaagctctgtcacgcttgtgatagtgatgtgcgactcatttgcgacttccgtgccactcacatgcttgttctgtagcaacgtcaaagatgcgaggaacccaatagtggagggatctacatcgatgcgacaaacactagtgtcattcacttttctagaaaccccctccggaaatgcagattcaactagtggcatttgccctataatcactacttatatgcacatgaacaaaactcatgcggagaacgacgtgcactactgtcaacgtaaaatattatcattttctttgaaaatggcttattgaaaaatatttccaccgactgttgctagacttttaaatctacctgttcaggctttgtaacttttgggttgaatttctgctttgacttaccatcaggttgaaaacactattggagagttatactttcgagaagtcagtgcaattgcgggtgctgtcacgatcacttgcctcatggtctgtccattgctgcgttcatggcttcggcaatagtctcgtattctaattttacacgagtttttggcttggccattatattgtattgataaagacaaatatgccattgggcgtaaaaaatctcttggtcatagactcataggtacattatcttctctctctttttttttttcacgaaaatatttttaatatcctaacttttggattcacccgtgtcaggttgcaaatctcgttggctttgtgattgaaccatctggtatcagttggttaattgctcgattccttcataaagaaggtactagctatcattatttcagttttccattttacacagtagtattggagcaagctccattctgggcgagcacttcacaagatccaagtctgttgatgctttgttgatacttaagccagtgcaaaattggttttgagctcacttttcctctctattggcaattgaaactgtaactagagtctgggaggagttggatggatgctgctctagtgggcaagcggagatcgtcagccgcttctgatatcgcagagctctattagcatctaagagattctgccaaatttgtcctttcatgtcactacatatatcatttattggggattcttgaacttgaacgattagttcttgctacttgcggagctgttatctttgttttcacctgtcttttttccttcttattccctcaattttggacctccaggcattgatagagcatccatcttgcaggatgcctgtccttgatggcatgtttttgacattctatgtggggaccaatgcaagttagatatcaacttatctttgccattaattggacaaaagtgaccagagtgacctatttccctgttttgcagctcatgattcatatccaggatgccaaacggaaaggacggtgaatcagacaccatgatttgaaagggttgtactcagttgcaccactgcacagtaggattatttagcaatcgaccacggagaagagcattgatgaaatttctggacatactgaccttggcatcagagttaacctggaaaggcattccattacgcctcccggcactcggtggtagagtcagatttgttagccctgtatggactggtaactcttcagtgctcgtgaaagttggtgctgctgagaactatttttgtataacattgttttgtcctagtcaattggttgtgatgtaacaaatagttatctatggaatataaattaatcagatacagatgcacatgaaaatgatatcagtcaggttgctctttcaacatttttgaaatatcgaaatgaacgggtaataaggccatttttctttgtcgaagtattaaggccacttatgaagaataggagtgtctttgatttataatccctgtacatttacttcaaatgtgcattatttttactcttttcgtgtctactataaattggacaagacatacttaaatccttcgtagagataatatatgaaagaataatacctcaagtgttaatacttggcacggatggatatataattgccaaaaattttagaatgtacacttaagtgtcacaagtgtcaacgagcgccaccttcgatgagacttaatagaattcaacttggcgttactttattaataaaacttgttcatgagacttgttgaaatgttcactcagtatctttgttccaaaacaacattgttttgtcctcaaatttgattttaaatataaatattaattaaattaaaagaattgtcacatctcaattaaaaatctcgtgagaagcagggtcagttgcttggttgaaaattcttgctgttgggacttaagtattcattttttctttgatttttatatttaagtgtacattttggaagttttggaacttatgtgtccacccgtactaagttttggcatttggagtgtctgtgcctcaataatattctaatataacttatgtaacttttaggatgtcccaataatcaacttgccacgatatcaaattttccattttccaaatcgtcttgtgagccgaccaaaaaaaaaaaaaatcatttcgtgaggatttcaatcgagagtttttaaggcttactactaaatcaaatttcttctttattaatctctccattattattagttagaaaagctagtgactcatctcacgtgaaatttaaagtctctatgtgtagacactttgagtctctcttttaactttagctattggcacacgataattatctagacgaaatatcctatttaaaaggagaccttccagagtgttcgattgccaatcatcacacttctctgaaagcatagaccaaaatagtaagacactagatgcatgcacatgcaaaataaattgagtaaagtataatgttagaaaatccagttccaaattttaaactactaggtgagggataatcacttgattggttttaaacctattatatagatgtcaatttcgttctcaactttcaattttatcaatttaatcctaaactttcttatgaaatttcaatatagtcattttagttaatttttgctagaaatgctaatattagaggcaaaatgacaagcaatgattggattgtgacatatggccacgtaggtcgacagatagtgattggactatcacctcaatggtttctagcgaaatttggtcaaaaggattacatgagatttcacataaatatttataacttaattgataaaaattaaaagtttagaattaaattggtatctgtataatatttttataaatgattggacaactttttcaatagatagaaagagaccacgctatataaagagtatataaaacccatgatcaaagaaatgtaagatatttcaatacagcattagataataaaaagaattcaataaaaaaaaaacaagaaagagaaaactccataagccaaacgtacaaatacatgtggatgcatgcatcggtcttcgaagtcaaaggagccaaaaatgttaaatagcccccaaaagagaagagagagagagagagagagagagagagagagagaagcaaaaaattgacttttggtcggccactggcgctttggatatattctctcctttcgacgcggttttgacgcttctgtggggctaggcaagaatcgcgcaaagggccaattttacataattaacaaagcgacgacccctcctctcgtttggtttcatcctgctctcgaagccctctcttgccgcctattttgaccctaaatcaatgcgacgaacactagtgccattcactttttcagaaacgccctcgtggaaatgcagattcgactggcggcatttgtattttaatcgctacgatatgcatgcagcatgcgaacaaaacccatgcagagcaccacatgcactatttttatcataccccactctttttatccactcgcccgaaagatgcaagaaacttcgcgtaccacctctctctcgccagccatctttttgtactgcttctccctagtttgacctctccttcgtgctatatatacatgcatgttgtggatgcattgcctcacaccaaagtcagaacatcttagagaatcaacatctcagtcgtctaagcaaaagcttatacacttcattcaactattttcgtaacaatggagggtcgcttctttcccaacaaagccgccttgttcatgatgcttctttcggtatgcattgcaccaaccttggtaaaaggacaaggtacgagagtagggttctactcaagttcgtgtccgcgtgccgaggccattattaggtcgaccgttcaagcccatttcaaatctgatcccaccgtggctccggggttgttgaggatgcactttcacgactgctttgtccaaggatgcgacggttccatcctcatcgatgggtccaacgctgagaaaacggccggtccgaaccgtttgttgagaggatatgaagtgatcgacgatgcaaagactcagctcgaagctgcatgtgccggcgtcgtttcatgtgctgatattctcgctcttgcagcccgtgattccgtttttctggtactttataatctcatgcttccatttataacagatctccgatatgagtgcaaaccaatgtggatcaatttcattcacttctacgcaaatcttggcgacggcaacacgattgatatcttttaattgcaatgattcttcaaatatttgagataccttgagtgatgtgattcatgaaattcaatgcagacga

SEQ ID NO: 9981 - DNA, 6865 bp, Eucalyptus grandis
  Intron number 2 from transcript Egrandis_v1_0.051471m (loc us Egrandis_v1_0.051471m.g) derived from phytozome v7.0 (c hr-ID scaffold_2; pos 28312395 to 28319259)
ttaccaggtcagcgaaagttaacattatttcatttgtgtattgatcgaatgtagaagtatgcatgaagacaatgtttagagcacaagccctgtgcactttggtgaatggttccaccaattatatactagacgggtagacctatttatcgaaactcaagctataaaatgatcttgcaatctgctttgttagaactgttgagaagtttgtgctgaaatacaggatattcttgttctgccttcgcccatctctgtccattccgtaatttctagaacttgagttttgtgctatgcttctaggaccttctaattacttactagaaaatttatcttgtttttgcatgtaagtgttgtcatcagtcatatttcaggtccaattcaaaagggttatcaagtcaaagaggaataagttttcaaaatacttgcaccaaatacggattgtagatgtctatatatcctatgtaggtatgtgctatgtcatcatctcaactaaaggtgatcatttccataattggtttgaaatggatgtcctatcatataagatggatcttggaagcatgcaaaatatagggttcacagaatcacgaaggaagatattaacctgaatttattaagttgaattatcctgaaatgttgtttgttcagtcttgaagtagttcatatatgtttctagctgaagtaattgtaagacaaatagtgatgactagtgctttttgatcagctgtaggtgaacaaatatgtttttcccccctcccttcatttgctcttctggtgtttttgttggaggtaataggtttgagagagaagaagtagttgcttgaagtattacaccaagagacgtcaagtttggaacgctcaacagtgttacctccagcgtagggaaaccctagagtttttatatgaaagttattgggctccggcccatatagacccaaataaccatgcttttacctattgggcttgtatgtgaacatattattttggactatattaataatatatccaacaatctcctcctatgttcaccatacagcacaatccaataaggtagtcagtgtaatgttcatacaaacatgaatcatccacattcagtccaagacaattaactcaaatcggtcaaagagtattctagcagtaaagtattaaactaaatcatcatatgcaatataaataagtgaatcattcttatcatgaatctgttctgaaattaacaaaatccaaatctcaaaataaatctcagactcagttcacaaccaatatatgcatattaatcaagtataagtaggccagtcaaaatagtccaaggccttacaagcataataatgttcacaaaatagaaatagtaaaatgtaagtctcaagtaaatggactttatcaaaataggcaatagcaagtaaattgtcaagtccccacacgctctgagtgatatatattcattcatcaagtaggtcatcctggtcaggatcccactcattaagctctcctccatctctgccatcccctttagaatgtcaaatatgaatttcatattatcatgaattcaaccatttgaataaacacttagcaccattccatcaggcagagaagaacatatattgatgtcataaagcatcataatatcatgtcataagcatcaagccagtttcataaattatgaacaagacctaaacaatgtgatttacaaagagccatcaacttaagtttatttgtaggagaataactattgtctagtttcaaagaacaagaccaatagtcaagttacttacaataacctagtcatgtaatagcaagtttcaattaagaacaagaccaataggcttcttatgtaaacaattgtttctatgtttcaatttggaatgtcacaattactgattccttaaagtcaaataatctagcatcaagtttggaatgagatcatttaaccaaaaaggatagtccaatctagttgaattgtatcatcaagtttggaatgatacaattttcccagatagaacatttgaattaggtgaaagtcatcttcatcaaatttggaatgagacaactcaccctcttcaaattagtcagcaactgtgaacatcgatgaaacatataaactgtgcttatcattgtagccaataaagaaagatttgataattcaaaacacacaattagaaggtaagtaaatggtagttaagacttgcctatatagtctttaaccccagttcccccactgttttgaataatcgatctttaggcatacctttggtgagagtatcggctatgttatccttcgatctcacatcgatcaaggtgataaccccttgttctctcagataattcaacaacgcatgtctcagtctcacatgtcttctctttgaattaaagagagaattcttgacgacttggacagttgctcgattatcacagaataggcttaaagaattcatctttagccgagtcaaaggaatatccataatcagattctttatccactctgcctcttcaccggctgaggctaaagcaaaaagttctgattccatagacgacaatgcaatacaagtctgtcgtttggatttccaagtaatagcagctccacccaaagtgaatacatacccactagtggacttactatttccaatatctgagcaccatgaggcatcagaatatccatccacagttggaggataaccagaataataaagagcataatctttagtacctttaaggtatctcattagcctattgagagcatcccaatgctctttactaggattactagtaaaacaattcagcatgccaactgtaaaagctatgtcgggtctagtgcaactcatagcatacatgagactaccaatcagtttcgagtactttaactgatccacgctggtcccttcattaggactcagtctgttattataatcacatggtgtctcactcggtttacacttatcgtatccccaagtagaaagtagctgctcaatataatgagtctggctaagggagataacttgtcgtttaaagcttactttcataccaagaatggtattagcaataccaagatctttcatgtcaaattctttagctaaagtagctttcacgtcactcactacagaatgatcggaaccaagaatcaacatgtcatcaacatacaagcaaatgatgactatcttatttgacatagaacgatggtaaatgcatttatctgaataactagactgaaagccataactctttaccacttcatcaaatttaagatgccacatcttaggtgcttgtttaagatcatatagggatttatttaatttacaaactttgtcctcaagacctttcataacatatccttccggttgttccatgtaaatttcctcatttaaatccccatttaagaaagctgtttttacatccatttgatgcactacaaagtgttcaatagatgccaaagcaagaagaattcttatagttgatagatgacacacaggtgaatagacatcaaaatagtctattccactctgttgtttatagcctttagctactaaacgtgctttgtatctggctattgatctatcactattcagtttcttcttcaacacccatttatagcctatagctttagccccttttggcaaatttactagctgacaagtgtgattctgcagcagagagctcatttcatcatctatggcttctgcccacagtagagattccctatatctcattgcttcctgataggagaatggatcatcctcaagatggtaagcaacaaagtcctcaccaaaacttttgggaattctctctcttgtagatactctaactggagttggttcaatagccaactgtgtggaattagtgtcggaagggcctgcttcagattctacaagagattctgaaatcatatctgtagatctagaaacattcaagccttgatctctgagaaacttgttttcaaagaacactgcatctctagattttatcaccgtgttagtagatagatctaaaaacctatttgcagcgctatcttctgcactacctagatatacacaagtaatagttctagatcccaccttaggtttcttaggatctggtatacttacataagcaatacagccccaagtcttaatagtatcatatctacaagggcgcttatgccatatctcataaggtgtcatggacaacttagagtgcgacaacctgttcaagatgtgattagcagttagaactgcttctccccagtaggaggaaggcatgcccgctgtaagtaacatagagtttaacatttcagttaacgttctattcttacgctctgcaacaccatttgattggggtgaaaaaggagcagtggtttcaagtattataccttctgaagcacaaaattccttgaaccttgacatagtatattctcctcctctatcactcctaaacctcttaattttcaagttgagttgattttctactctagacttgaaaatcttaaatttttcaaaagcttcatctttcgatttcaacaaatagacatgacaatatctagaaaaatcgtctatgaatgttattagatacttccgaccacctttagtaatgtaatttctaaaatcacaaatgtcataatgtattagctcaagaagttgtgtgcttttagaaaccaacttaaagggttttctagtgattttagcctatgcacacacttcacacttatcaaatcgaatagaagtatctaatggaatgttatgagttttagctagatgttgcattttcctgtaattcacatgtccaagtctattgtgtagcaactttggatcaatcaaagtagaattcacatggtttatgctatcggcatttaaactcaacctatacataccattaaccatgaatgcacaaccaaaataatatgagttaacagataaagttactctaccattcatagttgaaaaagacataccagctttatcaagtaaactcatagatatcaaattcttattaagtaaaggtactactctaacatgtttcagagttagtaatttacttgaagaaagcaccaaatttgcagttccagcatgagtcacctttgcctcaccaccattgcaattttccacagtgtctttcacttctatgacctcagtgagtaaattcttgtcatttgtagcatgacaagtagcgccactgtccaaccaccattcagaagagatgctggcatttccattcttcatcattccaataaaggctcgaggctcagatcctctaattagcatattggcctcattatgtggtgtgtcattatttggcttcctcgacaacttacactctgctgcccagtgaccccactttccacagttatggcacttgcccttcttcttatttttgaagatagtctttttggcctctaactgtaaagaggattcgccttttggtgacttggactttttctgaggtttattggagtgtgaaactaagttggcaactgacttttgttgtcccacttgttccaaactcttcctagtgatattttgatcatcaatgtgaatatacctctttaattcatccagtcccatatgtaccttcagtctgtgcatttcaatcttaaaagaactccattcaattggcagtttgctcaacacaagactgacaaagagattatcggacatatcagaattatcatctttcagcttgttcctcatgttctcaaattcaactaactgagaggtgatgcttgaattcatggtgaatttcaagtcaaagaatttctctgctatgagagttttagatagcccctcttgttttttggaactgagcgttcaagtgatcccatatctctttcgccgtcttatactcactataagtcatagctagattaggatttagagagttcaataattaatctctacaaatatcctcatctttgttccattgatattcattcacatcttcaatagtagatgcaaaattgctcaatacagtatagaatatgtcacgttctttcatgccaaattgaacatgtaatttccagccatgaaattcaataacatcaaaagattgcaactttataatatcataggaactacactttgccattttaatcaaagcaaagtgttagaaagagtgtaccttgaagtcctcagagcaacaaagttgaataactcccctaaccttaatcaaaccgctctgtagagatggaatttgtcaaaacaaacccaaaaaacggatctggagcgcccaaaaaccttaagatagagtgcccttgtcgctgaaactcgctgaaaaatttcgcctccgaaattcgctaaaaatttcgtccccgaaattcgctagaaatttagatggaaacttccgggtgccgtaacttctccgtccgacctccgattgatgcgagtgaccactcaaaacgttcgtatcgatgagtagaacaaagcttaagtggtttcaccctctaaaattggctataatttttgggtttttgaatcaaagatttcggtcacccgaatcttcaaacttagatcccggccaatatcaccgtcgaaatcgaaagtaaattacagctgcgagttcgtcttaacgaaatcttcaagaagacactttactcgctcaaatccgacacacgaacttaatacttcaagattgttgaaggtaataggtttgagagagaagtagttgcttgaagtattacactaagagacgtcaagtttggaacgctcaatagtgttacctccagcgtagggaaaccctagagtttttatatgaaagttattgggctccggcccatatagacccaaataaccatacttttacctattggacttgtatgtgaacatattattttggactatattaataatatatccaacagtttttacccttcatttcagctgccagcaactcttaaaccaggtgtcacaattgt

SEQ ID NO: 9982 - DNA, 401 bp, Eucalyptus grandis
  Intron number 1 from transcript Egrandis_v1_0.037225m (loc us Egrandis_v1_0.037225m.g) derived from phytozome v7.0 (c hr-ID scaffold_4; pos 18689441 to 18689841)
atttacatagtgaagccaggtataattgacagagaaagccttatgaaaaagtaatatggccattgatgtaccaacagaacaactaccaacatcttccacttagcacagtcagctacatgaattctcttatgactttgtactttaattagtaaaagagtcttcaacaagatccaaggacaatattctttgaaatttctgccaatttctggtcaactattctattagcctacagtatcttaaagtcgaatctttcaatgtagccacttaaagttgctcgcaagtttaaatttgggttcacatttcctcaaatagatccaaatctgcaaaaataccaatcaatatggtacacggtcattttattttcagcaacaatcactgaccaaccagactccgcacttcat

SEQ ID NO: 9983 - DNA, 831 bp, Eucalyptus grandis
  Intron number 16 from transcript Egrandis_v1_0.000490m (lo cus Egrandis_v1_0.000490m.g) derived from phytozome v7.0 ( chr-ID scaffold_8; pos 7495259 to 7496089)
ctatcaactactccttcagcaatttctctttcaaggtaataactaaactaataaaatgtcatttcatgctattgtgcatttatccaaagtcggattgagatcttttcaactttatatgataacatcatcttactttctggactttcaccaagttcactcttcagcattttgcgtttctgcgggtagatatttagagctgctttgctaaaggaggaagtttcatagctaagccacccgttataatcattttcctatgatcagaaatcttatattatgatagtacattataggtttccgttgcaggtaagtttggattaatctattgaaatgttttttggggaaaataccataaacatacctcatctttcacctaatgaacccttatataccttttgttgaaaacaccaaatacatacctgaatgttacatttggaggccaatttgcacgttcacatcaattatccttatgtccctatatatgaaaatgccgctccttttctaaaaaggctcaccttggactcctaaattcttgcttttagtcaaaactttcaaggccaattgaaaaccaaactacgaaaccctaagccgatgttaaattgagtttgtaaggggggcagtatggtctttttgattttggattttgtttagaggtatgtgaatggtatttgcagaaacggatgtatactagtgttggtcaaagttaaggtttgttcccagtattctctgtgttttatgatttctctgccatggctgctaaccttgtaggacatacttctattttttcgtcttttcaatttttgcagaatctctcccagttggcatcaatcaact

SEQ ID NO: 9984 - DNA, 2052 bp, Eucalyptus grandis
  Intron number 1 from transcript Egrandis_v1_0.027984m (loc us Egrandis_v1_0.027984m.g) derived from phytozome v7.0 (c hr-ID scaffold_8; pos 24927088 to 24929139 reverse strand)
gcaacacacccccacccatcttcccttccctagaggtaaaaaacagacatcatcagacatgcaggccacataaaccacattacattcgttcatgtctgtcaatattcgtggcgtgtaatctcaatattttaggctgtgccatctccctttttatcttctgttaactccatcgtggtgctgtgacctagctctagctgcccccccgaattgttgcatgcgctagggaaaattaaagaaaaaaaaaaatccaaagtgtgcaatttcatgtccaattcgtgggttcgaggccttaattcctagtttcggttcgtgggttcttcgaaagtttgggttttttctcgagggatgtggaccgtcttgctaggatgaacttgaagcatgtgattactgttgacgatcgactcgcagatgcagatacagtgtatcctttcgagcactttcatcctcaattaacttttgccagatgtttagggtttcgaaaagcattgttctttcttctgatcaagggttacccgctaatttctccaagcggaggctgtcacattggttcgattacgatttctgcatgttgggcaagttttgattttgtatttccgttttgcccaccaattttttttctttttttttgccggggaaacatatgtaacggttttgtctgtgatgttacacgaggatgtgacttgggacgttgataactccagttgtgtcacctgggtattagtgaagttgcagaaactttaatgctttttcattaaggtttaattttgatgttgagtttagagttttatagttggcaatctcacaaatggggttactttgattgccaatatggcaattcgatgaagttttgtgctttgattcgatttttctttatggtgttttgagttaagagagacattcttgtgttatatatggttgtctggttcactagatttctttatttcctttggtaagtcttgatggtaggtgctttattgctaacgaaactagccgaccgattctaaaatgtcggtgatctgccaattcccgcaatgtatattactctctttgcttaacatttatggaatttccatatgatttctgcgacatagttgatgatttcatatggtttccttggaggaaacgagttgatcatatttgtcttgtaagtgatctgtaaaagagttgccatcctgttgttgcccattctaacaactaaactgcattataaaaataaatgcagagttaaagatttaagattgcatgatctttgcattggtttttgtgtgacctaaatcaggaggcagcagttctgatcgaggattttctaatagaatttttgaaatgcgtagaaagtgaacgcttttgaccatctagtaattgttaggtacatggacagacgtgtggattcattcattcctctttggtatgaagcaactgatttttagacctggtggtagtttcagttgattaacaaggagttttgttatgttgtaacgaaactattctgataaggcatattgattgaggtggtccaacccgaaacttccagcttgtttgttgcattagggacagagaatctctctgtgacttttggtctgagaagaaagtaactgccattctaactccatcatagaatatacaattggttctttgcatgttgatgattctaggaaatgggttgttcaaatgaagttcctcatgaagtagcaaattcaagcatttatttatttattttattttttttccattttaaattcttcaacttattctctgcattgcaatctgtctaaaatctgtgagtgctccaagcacgatgtttcttatttcagttttcacttttgaaaaagaaagatatatagctgaattgtgtgcataagtgagagatcgcagaacttggcatgaaaaggatatgcgggttgtccttggtatgttgatttagcttggaatgctgtctgtacggtgatataatatgtattaataacttaggtccctgattttctgtgaaaatctttgtcgttaatttattaaagtgtttgtcttgaatctgcagaagatacctggctttgtgca

SEQ ID NO: 9985 - DNA, 4462 bp, Eucalyptus grandis
  Intron number 1 from transcript Egrandis_v1_0.047478m (loc us Egrandis_v1_0.047478m.g) derived from phytozome v7.0 (c hr-ID scaffold_8; pos 53934759 to 53939220)
gcttggtgcaagttgttcctaggattcatcttctggtacattgtcattgaagaaattgtcttggcttgttttagtgttctgcagcttttggtcgttgactgcataacaacatctgtatttgccccccccccccctcttctctctctctctctctgtgaaaacgcatgcacttctttgagcgttagggatgtggatccgctttcctgcaccatactcccatgtgtgtctcaacatatgtcggcttttgatgcttacttcattcacatgtgtcaacggttgagaagcgttttaagggttacagcatgaacgggagccctatggttgttgagtatcttcatccaaaatatgctatcttctaggtggcctgcaatttgactaccctttctgtgtgatggtacattgtcaatctaaatgcagaagttcgataccggaatcatactgcataatgaagtagatattttcaagcaaaaagcaacaagtacataagcagaattctatgatcttttccaaagtggatactgggaacacatcaggcctaagatgtgcactgtactgcctacagctagataaataatgggcatattttgctccaagtgatctcaattttccacccaagtagctgtagttgctgcacgtcacgaaaagatccaagctcaaagcaaactcatttgatttgactataactgatttttgtcatttgtgttttcaaagaggttggctatttgggtggagcctgtttcttgttattgcggtagcagttcagagctcacgaggtgtgatattgcttgcggagtttggttagagtgacaagatcaataggctggaaataaaggtgctgaagattcaccataggcctcgtcttctttttcgcttgttttaatgtatattcactgctccaaacgagcttgacttgaagcatgtaaaattagggatatttgcggagaactttgtctaggcatgcatgcatttttcttattggaagctttatgagccattgaatctcattatcatgaacaaggttgcagttccattccgattttgattacttcaaacgcatggtccatgcgtcattgattctcaatgaatgccgtgtgttagaattctccaaagttgtatctaacgtcaaatacctaacatgatattttgttctaagacactaacgataaaagacagctcgttctgagtatctagatatgttctgagtatctagatattttctcgtgacgggtacggttctttttcattctttcactcatttcgacataacatatggtgctttggtttgggaaagcaaatgtaactcagtaataggaagattaatctgtgattagtcataagaggggatcatgattgttcctggatatgatagaaactcccggagtggtcatttagttaatttcattgtggaaaccaaatagaagaagaattaagtatgcaggggatgagtggaagaagaattaaccaattcaattaggagtgatcttagttatatggtgtttccttgactagttcttactcatagagttagtctacacaaaaagcagtttgatttggctttaggctattattctagttgcaatttgatttggcaaataaaatgcatacattgcaatcaatcctacagaatttatcatgacatatcctcctggatcaatgcctctgcctgccaatttgcattgccgttctcctaaaaatcatgaaaggcctgcaataggaagttccatccaaaattgcataggtcctttaattcatcctgaaattgcattcctcttgaaatggaaatcctagattcaatgttaagacaaagttccatccaaaattggatagtgatattccaaatgaatcacattaggctagtgatacttgctgaacaatttgtaaaaatcacattgattaagagtgaaaatcactagatttcaatttgtagtgatcgagaaatcaatctctaactcttagcctctattctggccttcttaataaaagtatggctagtatgaatgtcgagatttgattttatcattttatttctctttcgggctaatttagataatcgcttgatgatcatgcattaaaaaatgatgtcgcgagtccgatttcaatgggatcctgttcctgaccttgttttccaggtgggtcggtccggttcctaaatatacccgatccggttgcacactcctagttaatattttctaatttaactaaatggaaagtacggaagtgttgtatacatgtggtttttgcattgcaccaaaatagaatcattagattaggaattgcatgagattggtcaatgtgatatttatggacgccagcaatctaaagcctatgatccctgtgcctcgttttatcatgacattaacattagctaccactcttagaaagacagaaaaaaaaaaaaagacagttacagcgtatgggcggtgcaagaggcctgaaacatcacgggattagaagggcgaagtcagtccacgaagacttggactgacaatagtccatgatgagccagcattgctccaagaaggaatcaaaccaaagattgacccaagtataaggcacacgctaaagcattgacgggtcttcttttccacgctaggatccgtcttctttttctttgctatattgcttttcttttcattatcaatttgcttttttgataagattttccttggatcctcagggacgtttgaggtctctagtcagttaattattttgatagttgattgattggtggccaccgcttgatcaaggattttttttttttttttttttggcctagcagcacttgagaagtagggcctctgaacttttttccatgtctgaattgtctcccaaagaaaagatcaagtgatatcaacgaaggggaggcaatgcttgttttattcatcattgttctagcttgtgaaaagcttatgatatcgtacatatcaacgttttatgagtgacttttattggttaaaaaacggtcgataatgcaacttaccttagttattgttgagttagtattgtgaatcttcagttgtgaagtagctattttttatcataaaacataaaaattttagttatcaagcgaaatgtggtatacatatagttttgccttgcattgaaatcaaatcattacattaaaaatcgcattatctaccactctccaaagaaaataaataaataaaagaatagcgtaccggtaagggcaaagtcaaagtctacgaagacttggactaccaacagtccatgatgaaccagctttgctcaggaaggaatcacatcaatgattcattcatttggtactttgtccctcacatacgggcattcatgaacgtggagattctatcaaaaagaagggaaaaaaatgtcactagatcactttgtcaaatccaacaccgactcattgttctcccattcacccgcaaaatttacatggcaataaatcgatttccaattctcatattcattgataatttcattacacgatttcctccgattctataatttcatatgagatttgaaaatcaaataagaacaacctctaaggatgtctttatgtcactgagatttttttttttttttgtgtgaccggaaaatgcttttagcaaattcaatttcagagaaagggaatcggaaaattttgattatggtgaaaacaagttgaaaaagactgattttattgtaattggtaataagtgaatccactaaatgtaacttgtatcattaaaagtaacatggaatgactaataaactagaattgatatcttcttcatttattctataatccatcaaaataacattgattacaaagaaaataagattgaaattatgaaatcatatttgtaaaatattagatataatcgtgctttgggaatgtagaaaaattgagcatcaataaagtatagtcttctcacttcaaagcttagcaagaaaacaagggtaatgattccttcttgccaagtcatttttctctaggcttattgtttttaggattaataccgcgaagaatctcaaactagtatatccgtgataaatttattcaaaattaattttttgatcaccaaaaactcaaaactggcaaatttgtgataaatttattctccattaatttccgttaaattgaataaataataagaacaaacacaaaccggtacacatgtgataaataaaaaataaaaccccaaactaatagagtggtcaattgtaaaaatttgatgtggctgtatgttttgaggcctctctgccctcaacttgatctatgcttctaactgagaaatgctacttgcacaagcacacgcaatatggccttgcccaacatccaacccaccccaccccaccccctccccctttttcttttctctcactccaccttttatataggttgtagatgtaaactgtggaagcttcatgtgattgtaagtttctgttttcattcttgcatacagtgaaatcacttctgaaggacgaaggataacaaagc

SEQ ID NO: 9986 - DNA, 3644 bp, Eucalyptus grandis
  Intron number 5 from transcript Egrandis_v1_0.031557m (loc us Egrandis_v1_0.031557m.g) derived from phytozome v7.0 (c hr-ID scaffold_5; pos 36296814 to 36300457 reverse strand)
atctggaagagaagcagaacagcaagagagatgtctgtgatctatccttctgaactctgacatgaatgtgcgcttcattttgtgttttatggttactatgtctgacttgatatgcttgtgttttgtaatgatttcatatcctgttgccggtccagtgactgtctgcctctagtacataaccatttgaactcatgtggaggggcattatctccttaagtttatgaaggttctccttcatgctaatgaattatctattagctctttatgtagtctcttgtttatagacatgtagagaaattcagatgaagtggataggccttatgatacaatgtgttttcactactttttctccctttgaactttacctttctggtgctttagatgtgtttcttaatggtatcgtcatgcagtacagctaaccaggtttctttttatgctcctgctagtattgaatggggcctgcaatggataatattaagctgcatgacaatctcagcaaactttgaatttgaaagaataatttaggctgcacaacaagtgggtgaacttgttaatttggctgacgataatgtagaaactccataaaagaaaaattaatgattcatataaatcgcttaatgggaaatgtcctgaaattaatctataagtattctagtttgtaccctttttcattccttaggatgttttcttctgtctgatatgatcattattgctaagatactcattttccttatgctagtataaaacagcattgatctcagtgcgttctttgcggtaatcctccttataaagacacttagttatgcttcttgttactcattaatgtttgcagaatcaaatagtggaagagagataaaagatgttaagttttacttggtcctcgcttctgaatcaaagtggctcgctctaataaatgtgatgtactaattggtaacaagagatttttttctcctcaagagaactcaggaagaaatagggtgactaagcatgtcatattgtcaattaagagagactatgtgtcccctgaggagaggagtttcattatttgcatggaactcactagttgggttgttggtccaaccaaatgcaagagcaacatgggactgttcgggcattgttttttgactatgtgtcccctgaggagaggggtttcattatttgcatggaactcactagttgggttgttggtccaaccaaatgcaagagagacatgggactgttcgggcattgttttttcaggctctcttgctttgaaacacaattattgttcaattcattgcaagtcttggtagtgtctacgtgtacgactttcttccttcttttaaatcttgctttgagaaatgaataatatttataggcatttggaaccttaaggggagaggtactacaactaccgcagctaagcgttaggtaggtctgctatatgaatccgacataatggtgctctttttatatcaagtcaggtaatatgcaagatctgacccccccaaaaaaaaaaaaaaaaattaatatgtaagatctaagtacttcatatcatttcacattgttctattccatatcctgttaggtcttcccctcagcctttcatcaaacacagtgacagtttagtagacagatgtagtcagaagccaacttgcccttttcagcttatggtctttgagtgaaatatcatagaaagatgtaaaattgtaatctaaaatgtggaatacataattcataagatactttttgtttgcacttaattgtttgactgaaaaagttacacaaatttgtaagagtcaaacactaatttgttgcttctaattgatactacttccaaacactaatttgtagagtcaaattcaagccaagaagctgaccaaagaaaaaggcaagccaagaagccatttcatcccatataggtttttgcctatgtagctaacttttttaggatcctacaatgtctttgggtatcaccatctgaccatgaaaatagcagcaaagttttctctttagattctttatgcgagaagcactaatcaaagtaatggattttagctgatcaatttggtcatggttggtagtggggaccagaccattactgagaaacaaaataagtttgaccttatttcatttacattcttttgtaagccttcctggatatcttgggtttggtcccatcagatcaagagttccggttattgaagctagaattgcagtcatttagcaactttggtctttgtggtttccttgtattatttgtcgtcgttattgttggatagattgggttgttgttggcctttctttcccttcagttcatttcttcgctcttttctctttttggtgaatcatctgaatggagctaaatgttcaatctagtgcctatttctttgatagtcaagataatgtagctcacattctgtttgtttcgaataagcaaattcataaacaatgtagggggaagactcctgttaagcctcatgaatccattaaatccctcaaattatgttccaatttccacaaacattcaaatgcagggaagtgtttctgggaagcaagttgacgctgcataaactaccaaaaacaacactccattctatggagcagttcatcttgagtgttcatggagctttgaatttctagcacatattggttctgccattttgagcatgagcatagtttatgaatatcccaaagactgaatttgcctttacgtgttgacatcccggcagttcctgaagccagtagctaagaggcctcttaagtattaacttaacatagattgaaaatgatcctccgaatacccctagaaatagaccaaccaaagaacagaagtctcatcgaccaaacaactgccacatatactctagaatggttttgtttccacttgatcaccttctttggacatacaaagagactgcacaaattcttaccagttttcacttccaccacatgcatctgtttgccccaaattcttaccaatcatgcccaaccacgcattgcataattattagaacaaatcatttgaagagattgctagtgaaattctcttcaattgggcagtgaattctatgtctgagattgcaaactaccgaagctctttgttggagtctctctatctacctgtaaagtcagtgtgttattttttgaaacaatagtaccaattcattcaagaaacttcatatcacatgctttggaggcaagtcagttgtggggaacacttcaccatcatgggctgccacttgggttaaactgatgtagcttgtcagagtgtagtgcaatagggaacaaaataatcttttaagttggcaacgtgtatcttctcctttgagcttctgttaactttctagatattgtagagtgattaacttgatacactgtctagtattgctgttttggcatgtgaagccagagaaattggtcacaatgactacaccaaattataaacaatacttttccttttaagagaacagcttatggttccattctaataagtttttgaattagcactcatataatttgtctccttgatgaagttgcttggttagttgtttgagaagttggtcatggaaaatttgttttattaggaagggcctcgtgatgttcatatttatgttatgcatggtgcagatcctgaagttacaacagaggattcaatctctgca

SEQ ID NO: 9987 - DNA, 2034 bp, Eucalyptus grandis
  Intron number 2 from transcript Egrandis_v1_0.024315m (loc us Egrandis_v1_0.015262m.g) derived from phytozome v7.0 (c hr-ID scaffold_3; pos 40502380 to 40504413)
tgaatccgaaaagccagatttcattgccttcacgggtacttcgatggtgacttcatcgtcattgctttatcttttctaacgtttgtttccaagattgtctttttaatgggtaaaaacagatagagggaggaattgctctagtaatattgccagatgagttgctacttgctattccgtttatggagttggtgtttatagtagggacttctcacagcatacgcatttatgcttcgatagcttgtgaagcataaaggtttgctggaacagttagggtcaataaatgtaacaatgaaacgggcatgttgctaagattatatatctggaagcatgcttgtatcccttcatgacattttgttttttgtagagtcccatcaacacacccttgataggcaacgcatttcatttaaagcatatatgtctgctaaagaggaattgtcaccttatgtagttaatggcaaaggggaggtgtataatttcacaggcggtttgcgcagaaaacaaaattctcctgatttgatgctctagacttctaaggatggcagccttctgatctggtgttgggcttcctttatggaaacttagtagttatttcatatttgagtgcaaaggatgcatatattaggtactggaacataacagattcatttacttggagaatctgttcccactttttaaatgttatctcaatagctcgaattttctggacaacgaactaccatctcttggcatcacattttgcgtttttgtacttttcttttacgatccatggccattttccaacttggattgggtggtggttaaagatttctgtgaaatggttgtattgtattctctttataacataatctttggattagtggtttattgagcagaaacgcacttgccctctgttcgctttgtttaattaatacttccatggaaatctgcttggtcttatattagtttccaagcttcaggttttgctcgcccatttttttcctgagtgaacattccctttcaagagaatctagatttcatcttgtgttggattttgtctgtacttgatatatccaaggctttgctttttatttagtgtggcagacattaatatgctattagttttcatgatgacctcatatgcttcaacaaagcagatgggtctttgacattaaagatcaggttgtgttaatgatccgtaatgttcatattgttctctgtggtatcatgcaactattcgggactgctcaaatgcccgctatatatttgatgaacacacttttaatgaaatatgcgttgttttgtttattttttctgattgaatgagatgtaaatagagtaatatgtgtccatttaaatgaagtcaataaagcttgcttgtttaccaaaaatgagaaaagaaacattatgttgatgattgttaatacataattttagaaggcaagacagcaattcttgctccaaaatgatatttgatcttacagcatccaccgccataactggcattttggttctgttaagtgtttcctgcgtataatggttttccatatttgaatacaatctctggatcttgtgttcacacaagtgcatcttgcactcgtaacagtcagtcaaagttttgcgaaaatggttgcttctaccttcttttgtatgactttacaatgtcttccaaatatgtgcatgaatgaacaacaatgatgtcagaataacctttcaaaatttaattagtaggtagagtggcttcaactaaaagttaaattaatctatagttgtgaattcacagatgagaaaactcgacctagttcctacctatggtctgctgtggactagctagcggatgaaactatgcatgcttttatttcgggtaggtagttgaaaggtgtaaagtgtatcttcttaactaaagtggttattattcatttgctaatgctgtgaaactttatctcaacttcatgatgccgggtttatatagagcatgacccctccttgtgctgttaatgacttagttgattatgttcttttgtgtaggtgataatatttttggcccgagcacttctg

SEQ ID NO: 9988 - DNA, 5100 bp, Eucalyptus grandis
  Intron number 4 from transcript Egrandis_v1_0.012995m (loc us Egrandis_v1_0.012995m.g) derived from phytozome v7.0 (c hr-ID scaffold_5; pos 3532680 to 3537779)
tagggaccgcaacaacgtgcatcaaaagattgaaggtacatggattcattaataatttttgcatcttctccgtctcaacattttgttgtgattaattttctatgatgcaacataaagcgactacaccacatatgctagggctagatatcggtttactcttcttataagaagaatacatgcaatgcgaacatagttagtgtggaaatgcagaagtagaaatagaccttggaacttttgctctctctctctctctctcccctcattatcttactaactttggtagttgatcgtatctctctgactataagatactacaagttaatgacaaactcgctgagttgctgtgttgcagcactgctacttttgtctcaaaataacctttctatccttgcagcctgcttctaaagtatcaatatttttaagaggaaaggatttggagtgggtgtagaatgagcaaatttacatgacatgtcttgaaaaatattctttgctaaatttgtccccagttttttgtgtctaaaataaaattcttaaaaattttcactctaatcctaaatttgcacatgcgtccagcactctagtcccaaatttgcacttgttcaaaaaatatctctgatttcttcttgataatcaacatcaaggtttctaattggtgatcttgtttatccagattggttcgctttatctcgcttgctctataaatagatactgtcgactctctctgccactcccattcagcatccaccctctctctgctcaatctgccccaagctccttcggaaattaagatggcctcgaaaaccttgcaatcgccgaaggtcgcggtgccgagttcgaatcaagcacgcggcaaacagaactatataggagtccagaagaagccttgggggaagttcggagcacggatccgagtcccgagccagaacagcaagcaaatctggctcggaagttatgaaaccgatatcgatgctgcgagggcctacaacgaagccgccttggagcaccacacaaagccgaccctcaacgtccttcccgatggcaagaaggaggaggtggaaggggacaacggggtcatcgtgaagaaggaggagctggaaggggacaacaaggtcatcgtgaaggaggaggagctggaaggggactacaaggtcatcgtgaaggaggaggagctggaaggggacaacgaggtcatcgtgaagaaggaggagctggaaggggactacaaggtcatcgtgaagaaggaggagctggaaggggactggcccgaggagtaggaggaggagacaacgagttccgtgatttcttcagagaattcccttcaactagcatcgtgaagaaggaggacctcgtgaggaagtagggttttacaatctacgcacagcacataacatacataattacttgtaaaattaatattggataggactggacaaaaaacatgattccttcttctattgaaaatttcttgtcaagaaaaaggtatgtttgtttgaaacttaggcatataatgagatgaaatccatgaaaaagagcaaagactttttcaaggtagtgactcggtataatctcgtgaaggcagaactccattgttctgtaccaaacgatatgattttttttccatgctactaaatttctataaattattataagtgtagaaaaaaccgttgataaaaaaaatggcaagtgattattttctagtaacttgttggtaatttactaacactatattgaaattgccaactattttttatagtttgcaaaaaactggcaatttattaacactatatgcatggtccacgaagaggtctatccctaaaatgtaaggcacatctcaagatatttgacttaggtagactcaggaaattactgttcaatttctttgtttctcataacgaactttttacttattaaaaaaaaagagagaattttttgcactctttttttttctttttttttaatcacagtaatgcctgctaacaaacattgagggtcacgatgcttgatgtgaacttgactagtttcgggaccatgtagggttataaataaattgctaagcaaacgattaaatgacattgctattttaccaatgaaaagtattgagatggttgtaaaaaatttcacaaaaatattgtgaaatatggctctatcgaaaccaaatggtaaaaaaaataaaatacgttcaaaatgctttatgtacttttctttgcaacataaggatgaacctaattatttaattactatgctttagcataggaactcactttccatgggcgggaagtttcgaacctcttcccccctggatgaggttgagaacgcgaaccaacacgtcaataaagccgcggcagctcatgcccctgtcaatctaataatttaaaaccaacggcagaaggcaagcggaaatcaatcaaaattccgttggttgacctgacggcgacgaccgttcactcgcagctcgttcgccggagctccgaagaaaacctcatcgatcgccgcgaccggtgagttcacctcgaatctcctctcctctcctctcctctcctcctcgaaccgcaattttccattcgagtaaggcttcgagtcgcttcgtcatcgtcgctcgatgcgctgcgcgaaggcgacgaaaacgatgccgtttcgtcgcggcgtcggcggtcgcgacgggaacgaaagaagggaggagaaccggtcgcacgattgtcgctcgaggcgcttctcgtcatcagaattgcgtgcaaatctggtgacgcggggcccgaatttcggtatctgttggctgttgctgctacaatgtcgattcgttgagggggacgagatttttttttcttttttcctgtttttacactgcaatccttttactaaatgcattgctaacattgtcgattagttgcttttcactagtaagattacctgcttctcacaaatgtctatattcacgaaacagattcggttgccgttgcttactttgggttactatgtgccatcaaagttcttgtgaacatttttctgatgaagatgcaactgcagcagaagagaatctcctggtgtattgcaagcctgttgagctatacaacattctacaccgccgtgccatacataatgtaattgtttcataatgctctcttttgcatactctatgttttggcttttccttaatatatatacttccctggaaacaccaattgggatgatcagctttgactgtagatgggtatatcgagggagggaatacctgtgatatagtcccttgttgtagatatttatgtagtgtaaatcattttataacatatcttaaactctactcttgggtggtactatcaaaagggaaaaaaaaaaaaaaattaacatctggtctcttcaaaagttgggctagccaaaagataatttttaggtgttggtaactccttaccttatcctgatcctgttgaacagatgatatctgaatgctatcatcataggggtaagatataaagtccctcgggttttcatggctttcataattctaagatatgttccttgttctgattttttggatccatccatcctaacatgctgatcaagcatctgtttgtgctctagccttctttcctccggagatgtttgcgtttcaaaatacaagcaagacgtaagcgtaataagaggtgagaattttcatccaactacatactaggctactattcctcaatcatcactaagggatcttattttccagttatattctttgaaattacagaactttagtgcttctagtggctattccctcagtgcttctgtccaagctcatgctcttctatgtaactttgataccctgaaaaggagtttgtgtgtatttactattccgtaatttataggaatatttcatgggcctttggtttcatataggaaaatgttattgcatatatgggcttttgacacaagagaaacaaaatgtacaaagtccttgtatttgtggctatttctaaaaaagaatggtaaatcaagctcgtttgtgatcgaatggcttctaaagacatcttaaggtggcagtttttatgttgttgctgttgttggttccttattttgatgcacaagtagcagggcatgcaacatttttgttctcattttctcatttagttgactaaactgctagagaacagcagccgtttcccctttcctttttttggggccaagatgacacatgtctagccatgttctctcttttcttatcctaataagtttattttctcattctagccatcctctctcttttctttatcgaaaatgtctgtccactttattattgtccttcgtgtgattcttcttctattttggggttcctgtaacatttaccatttttgtgctaattgtctaggttgagggctggaatagtcattttcaactatagggaccgcaacaacgtgcatcaaaaggttgaaggtacatggattcattaatagtttgaattttgcatcttctccatctcaacattttgttgtgattaattttctatgatgcaacataaagcgactacaccacatatgctagggctagatatcggtttactcttcttataagaagaaggtagaatacatgcaatgcgaacatagttagtgtggaaatgcagaagtagaaatagaccttggaacttttgctctctctctctctcccctcattatcttactaactttggtagttgatcgtatctctctgactataagatactacaagttaatgacaaactcgctgagttgctgtgttgcagcactgctacttttgtctcaaaataacctttctatccttgcagcctgcttctaaagtatcaatatttttaagaggaaaggatttggagtgggtgtagaatgagcaaatttacatgacatgtcttgaaaaatattctttgcttcagagctttagactgaagttcacatgtgtctgcctcccgaagcacagtagggacattaatgaatggcagtgcttctttgaagctactgtttttatcttcttcctgtcgaaattttctctatttgtacaaggatgggccaagcttcgttagtaaaaacttttaattggtgcctttgtttttaaaatgcagtaactgaagatttctcttgcccattttgctta

SEQ ID NO: 9989 - DNA, 6975 bp, Eucalyptus grandis
  Intron number 1 from transcript Egrandis_v1_0.043305m (loc us Egrandis_v1_0.043305m.g) derived from phytozome v7.0 (c hr-ID scaffold_11; pos 28282649 to 28289623 reverse strand )
gcgcttctgggtctcagccttctgttcccgacgaggtgaaattatctttctcaattttttattaggggaaaattcgaagaaacaggaaaatagttagctacttttattatcacatttcatgaagcatataacctttaattaaaacatctttggtggccaattatagtcaccgacactttttagtttcgacaggtattttgtctctttatttacccatttttccggtttttgtctaagttgggtccgacatttctatcggacaaattgggcaggaaatgcatcatttccccaaatgaaaaaaaaaaaaacctgagttattattggctttatctctagactcatgttgcttgaattacatactggcagtatattttggtcacgtgctttatgtaatttgtctaggattttagatgttttgacatgatattatcaattcagtttcttcgtgccactcatttattcatctctaagtgtgagattactcccctgttcttccatttcatctgccttttaattgtgagaaaattgttaagcgcctcacatcttcttcttagattctattcgtttcgcaaaaaaacaatttacagaaaactattttttatattttcatgcatttgtttcgcaaaaaataaattacttgggaaaaacattttcctcactcagtatctcttatctcacacccatacaagccctcaatttctcctcctcctcttgcttctttttttaattcgaattattttttatttttatttgtattttctttttttcttttctttgttttccttgttcttctttattggccaatcgctggccattgtcttggcaaattggcgagtgtaagtgtctagctcgaggctcgccaatctggtgaagctcgaggccaacaagcaatggaaaaatctattttttaaaataaaaaataatgaaaatttgatttgaaaaaataaaataaataaaaagagtgtatggaggaaaagatattccttaccaaacaatggaaaatattttccactttattttcagatttcatctgaacattagaaaataattgttgacacctaaattttggcgacctgcttagtcatttatcgcattaaaaaattaggagttaattttatttctgaaaaaatagttaattgcatagcatatagttttaggtgcatttgtttcttaatttgcatttacattgggtcggtgacaaatgggtttgatttagtagttctaagctttaatttggcaggtcggactaagcccacgaagcaagtaaattggcccgagcccgttttcttttaatgacaagaattacttaaattgagatttgaaataatattacggtggatttttggaatttaagaaaatcgggttgcaatcttatctttaggcgataaaatcaggagatgtggaaaataaaagaaaagtgatattgcgtgcgaaaaagaaatcttcgcggatgctgatttgaaaaggaaaataaaaccctaatcttcagcctataaaaaggttttcgcgtagggtttcaaggaaggcgactcacaatagaatacacggccattagggggcttctttcttcgctttgtggaagggttttctttctttttttcatattcaaaggtcaatagtcaaaagacggaaggccacacaatacattgaatacacggccacacgttcagagagtaagagacgtgaagatcctatgactcttgcctgctgcggtgagtccctactgctgggatcgcgcctccttgttccggtgttcatcgcttcaacctagcgaaccccacatgacgatggtgccgttgctgcttccttccgagtcaatccaacgacgactttctctgaatccaaccgagccttgcaccaacgatgttgattcccagttcaatctcccacgttcctcctagcgtgcttagcttgtcactgcgtccctggtgttatccttggtgtctcctgcacatccggacgtgttgcagcttctcattgatgatgatgccacctcaagcaacacacatataactctttcaattgtccttttacacctgtctaatgcagaaatttcccgtttgcagattccccggtgtttgagaacgcttacagtgtggtcttgttcttattgccaattattcatcgcagttgtagacacttcgccgagctggccacgccactcattgacaccatcaccgcacgagtctctcatcgtgcgccgacccgagagtcacctgccggagccaatctcacaaggcaccgccatgccgaggccccttaatactcgaccagttttgaatcagcccctggtcgagtttgactttgctttcgcagatcttctcgatgtgcccaacgtagacatccccaataaaaagacaacagtcaactctgagaggggattgaccgcgttatattgtatttttattgtagtgggtccatgtattactcggcaatacattgctgttttgctttcctcttcgttggatccaacgaaatcaacagaattcgttgggtccaatttggattacttgcagatttctttggccttgttgagaagtacaaagttcctggagccggaatccatcgatggtctccttgaaggttacgggttcccgtcgaaattgccattgtcccgtggttcgtggtcctattcagccaccatccaacgcgttctaatttggaatattgtgaattaggtaaggatcttgattaattcgttttgtttcccaatctgaagtattccttgatgaaatccttggctgatattcacaattcgacgagccttttaaattagggattgacagtccgattttcgcgctcgaaatccgactcgcaatcccttgcaaaaatcgacaatccaatctcaagcccgagattcgattcgcgatttatttttaaaattggtcaacccgatctcatgctcgagatatggttcgccaatttttagatatcaacattatcttgcttgatttgatgtcgtggtgtttgagtcagttttcattttcgtaaaaggaaaaggaaaaggaaatccaaaaaaattgaattaggtttaggtttgtttttaattatctttgcatgtttagaataggggttttattttcaatcatgaaaaaggaaacaaaaaaagtgcattcatttaggttgttaatttttttatttgaattgcatgtttaattatgtgttagttttaattttgaatttcataaagaaaaacacaaaagaaatcattgtgcatattagatgaattgcatgtttcattttaaatttagatcatctttttagataaattgcattttagatttagatactgtcttagtttaaattaggatttaatatgacttaatccctagtttaaatttcgaatttcataaaatttgtcttaggataaattagttgcaatttctaggatagattgcattttttagaatagaaaaatcatgtgcacgttatatagaattaggtccatgagatgcacgtcattttagtgattgttattaggttcatttctaattaaattgctcgtcattagaattaggtcattttggctaatttagattgcatatctaattgttgcatgttcattaagaaatcattagtttttttttactcattcatatagtttaggacatattgtcatgccttattatttcatattagattagaagcattgcattgcatatggattatgttctcgtttaaaaaaagtgaaaacaaaaattgagcaattgcttgttaattagaaatcatatctaggattgccgatgtgaattctaatctaacaacgcagatgctttcgttgctatgaggtaagtcttgcaatttattcactgctttaattgggtgttaaattagtggtttgcgcacctgcatggtcacctcacatgttaacgaattaaaatcaattcaagttgcttgccaaacatttttcaaaaataaaagaaaaggtaccgaaagggtgttagagaaatctagcgtaaccaagtccctgaactcataaatctctggttcgtaggagtaaagtaaatctcccattactttacttgggtttctaatcgacccaccaaaaatagattagtggcgactcctagttaaaaatcaattgcatgttaaaaacttaaacctaagtcgcgaattggtatgggcttgggagagcccgagttaagtttaggcttaacaatccattagccaaaccctaagtggttcacaccccgaaaaaattgggtcgcgacaataattacattattttggaaaataggttcttagaaaatatatttcagaaacgccacattttttgcaaaacgaatgaagctttaatgtactcttcctctcctcttcctaaaattgggaaacaataataatattccatttgtttcatagaaaatgtatcattttttgaaaaacattttccaaaaaatctttttataagaaaatgacaatattttccaatatttggtttaaacctaaaaatgaattagaaaatattttcaccatttgatatggaaaatctagtcttgaggaaaattatcaaaaagttcgctaattattttttatttctttttctttttgtttcttcctttatcgtggtgacggacaatgattagtcataggcaaccttgagcttgccaaattctagcaagccaagccttcccaacctcaagtgaggctccactcaccaaatctaacgaggtgaagctcacacaaggccgatgagcttaaagcttgccataggccaacaagcctaaaggccacaccaaataggtgagcttgagccttgctagatcggtgacctttgagctcgccacagtacgatgaggctcaagcttgcttgtggtcagttgttggttgtcatcatggccgacgactacttgaggaagaagaaaaagaaaatgaaagaaaagaaaataaataattgaaaatttgatctttcaaaaaaagaaattaaaagataaaaaaaaaaaattataaatatgagtgcacggaagaacatgcttggtctaagtgaaagaaagaggagagaaaatttactacttttgaaagtgtcttttcttctagactgtttatttcctgttaaccaaacgctgaaattttttttttcccaaaagttgttttctataaaataaatggaacctaagtagatggtaggccacgggaaggagagtaattagagcatgcgttgtcagcaaagcaatgaatcttcacaagcaattttgttcgccgtttgttcagtgtttagtgagaatgtgagcggttaaaatactcacaaaacaaaaacataacgatgaagtatgagcatcaaaccttgcaaaagaagaagaagaagaagaagcggtaggcatcaaaattcttttgcaaaaatatgggcacgtcatcgctcacaaccgcaatttcaatgttattttttgggtctggcgcagagaattttggcctcacatccagcctgaggcttttgaagagtattttctgggagggaaaacagatagaataaaaaataaaaaataaaagtgggggttcggcaggcttagcccattgggtcatgatgggcccgagcggcaccggcccgttatccttccactgttgggagcctttgctcggcctgcacggatctactccgggcttggaacggcggcacagaaaattagccaccaagagccctgcccattttctctcacggtattgcccccacttgggtctccagccagcgcaactgagctcggagacctgaaggcccgccctgctcttcgtgacgtattgccccctttgttcagttccttatgcgtcgggcgatgtgcgactgctgcagctgttggcagtttccacgtctcccttcatcaaaaaattcatgtacacgcgcacgctttgattcttgactcactgggtctcgaaatttccttttgtaggatcgctttcccttgtccggagaagtggctgatccgtgccatgagagccaatccctaatttgattctttattttatattataagcaaaaaaaggctttttatatgaagtttcatttggatactcatggatagatcagttatttcaaattaagaatagaaaattttacttctaacaatttataaaagtgatttggtttatctattttttttttttttagattgatggatggaaatcttggcgtggaaagaatgcaattctcatctattcaagagtgtgcattgtcttgtttttttacaagaaatttaatcgagatttcttaaagctaatcttcaaggttactcttaagaaaaagttgtcttgaaattggttttctttttgggtttttaattgaaagctcgtggtggaagtgataaatatatatagagttaagtataagaattcaccttggtcctaaactacttcgagctaaaattcatgcaattgcactctttttttcaatattctcccctttattttggcctctaaatatgtaaatgatgaataaggtagagtatattcattccactttttatattttaacattaacattttaacatgcgttcatgggtttgatttgattagttgacattcaagtcaaaagaatttgagtaacaaaataaaacaagaaaagtataactaaaggtcagacatgagaaatgttgtttattgaaagtgaagtaaagaagcatttgttattagatgtaaccaagcatttactttcaattaagaaatgcgtaaataaactaaaaacacatccgaatgattttacagtttataaaggaaaacaaagacaaatgtatctaaacggcgcccaaaagtctgtccccttccttgttgtttcacttcaaaccgtcagtgatctaattctttctcatggaaaactaatcgttacaccaaaccaatttcatagaccaatcttaatacatatgacatgaccctaatttccttttatatagttcacttctattagaacccatggcaggtgttcgtttctgattccttccatgataatggagagcaggttgcagagattttgacgaagagggctcaacgcca

SEQ ID NO: 9990 - DNA, 2476 bp, Eucalyptus grandis
  Intron number 5 from transcript Egrandis_v1_0.023535m (loc us Egrandis_v1_0.019360m.g) derived from phytozome v7.0 (c hr-ID scaffold_11; pos 1457968 to 1460443)
tgggataggttcgtttcttatgctaaatgaatatgattgtttgaccagtgtgtgggtgctgcatgtttttacactatggtgatattgccgtcgatcttttcttgacatccttgttaagttgcttgactcgcagaacctgacctgttagccttgtgcattatgcttgtaatcagcaaatcaaaatctagactagtctggttggtatatctagttgaaccaggaactagactttagtctgctgctccttttctttggcttttctagatgaaagatgggatgaattgggtttgatctgactgagccaatagtgcaatcgcctccggccggcatagggaagctgtggtggcttattaattttggagtattacatttcaattgcagcgtctttcttgaagtactaatttttccagttttctctttattcctctacgatttgcacctgattgagccaattgtgtgatcgtgtccggctgctataggtttctgtaaaatgatggaccatacaaaaaggatgtcaacttatatcccctttactaatgtgtttgtgcatggcaacctgtgttctttgttctaaaggtactaatgacagatactagtttttaaagctaacaagtatggacaaccaataggaatagaaaagaatccctcctagattcgagctagagtaatgtgcaaactctgccaggcctttctttgtttgttaatatgtggatgtcaataattttgtatttaacacaaaataccagtatttaatatggattaagatattctgaccaccaaaaataaaaaaagcattaggatatattgaactgatggcttccttcactggtttataggggtttagtgttataagctctgcttttaacttgatagctaatacagcacacattatcacctattacaacttatatcatatttttaggacatggtcaatgtggtataaagatatcagctacctgtgcttttttgtatggtagatgttagcttcatttgctggaagttaaaccttcgaggaccctcctctcaatttaatgtgagactaggcaattgccaaatgatgatgtggagaaagaaatgtgcgcgagaattgacaagggagaaggagaatcaaatattaagaatggtacttaaatatgtttgagaaggctggaaaaaatgggcaggccatgcaggcacattctgcagtcagtcctaatattgttgtctgagctcacccactaataaaagaagaaaattacacgctattctgcaaggctggtgaggcctggctagggccagtgaggttgggctcggattttccttaggtctgctgattggacctttgactctggcaagccactagacctgtgattgatattaagactgctcaacatcagttaataaaaagaactttctttttttcaaaaaggttggttttatttttgttatacatgatctatagcagaagcggtcttcacaactgtcatccacaagtttgttataacttgttttgaatgtatgtctgatgatttaggcggatgtttttagaatgacttttacattttattctttttttccttaaaatcttgcaaggcaagcactttggacttttttaaacgcgaaacccttgaaacctctcaaaacatatatattttttacatgtagattcagatattatttttttttttttcactttctttatgaattttgtgcttctatttccctctctagaaaatgtgatgtgatgcgtcaacacttgcttgtaaggaacatagcaatgggacatgagaagaccaatggaaagggattagcccatagattttgcgtggcactaaatcatgtttggctattgtcatgaaccatgacattcctttgagttctgtgcttttatgaagctctctattgcattcttacccttatgtaggttggagcttaaagggaataagtatgtcttgggtgagttcctagaatttaaagggaaacaagaagacgtccagatcctgaaaaacatccgaagatcaaaagttggtcgtttgataattcagaagacaagcatgtttggatttggtaatctcataagcatttctttagtgtatttacctttctagactatttctttagggctgcaatttccaccacttttagttggaggaaatttgctttgcctaggctcttccgattgatgggttacaaaattggcaagacccacatttctttagttgagttttcatgtgtgtagtgtctatatttgtgacccaccaagtataagaccaaccaagaatggaggaaaaaatagccctttctttcagtcctgattactatagagcataatcttgggaggctagcctcgtagaacaaaatgtctggggacgtgaagtaatagagtaattatagggtaatcatttttcatatgaggatgctatttgaatatatattgatgatttttcatatgcaaatggcagctccatcgaggctccaggttttgtactctcctcga

SEQ ID NO: 9991 - DNA, 1022 bp, Eucalyptus grandis
  Intron number 1 from transcript Egrandis_v1_0.017259m (loc us Egrandis_v1_0.017000m.g) derived from phytozome v7.0 (c hr-ID scaffold_10; pos 39054387 to 39055408 reverse strand )
ggtttcaagttcccgacgttaagctcgttctcaaagtaagtagagagtgctttttttttttttttcctgggtagttattttcccttttgcgctctggacttttagtcttcaagaagtgttcgattatggaggaacacgggatattctctttccaagaactgccttttaagtgaataaggagttaacccatgatttactgagctagtagatgaactttttaggaaagcaggagccacttttatagtctggattccatggcactccgcttttttatgtgtttggctgattcgtggtataatctgttttgttctcctctgaaatctgctctataaaggttggctactgaacaaattggcaattggctgagcacaaatattcaactttggatacagcgtgtaactgctttcccagagcagaatctttgatgatctttgtttgactaaaatgagattggttgttatagacttccccatggtttgagttgtggtaatatgttgttgtcccattttgagctcttcactacccagctgattttagttgttggtgatagcctatgaagtcgattccgttgtgaaatttttctgcaataaaccagagtcagctaagtaacagtggaagtatagctgttgggttcgttggagattactgaaaaaaaatgttcttacattagtattctggatctggaaaagcaaattacaaatcaagctaaaagtctgtcatttaaaatctagactatatgtgccatctttgttttgtgttgtaaaaagaatccttatgtgagggttaaagttatcttattatgctgcttgaactcttggatttctccgtcggaatttcttggtcacattccctctatttacatgagcatctgtagatgctactttcctgtagtcttgtattatttgcgtcttaccaattgcaaaggtcatattgccaattctccagaatcgaatttttaagttcatcatccattctgtgtaaatgcaggatttcttcaggactagagaagttggtgagtttct

SEQ ID NO: 9992 - DNA, 2873 bp, Eucalyptus grandis
  Intron number 1 from transcript Egrandis_v1_0.010420m (loc us Egrandis_v1_0.010420m.g) derived from phytozome v7.0 (c hr-ID scaffold_6; pos 18821476 to 18824348 reverse strand)
ggtggtcattagaccctgagaggtatgaatatgggttactcttttcgatagccttacatcttttgttgaattaatcatatgagcgatataaaagtctaatttttttgacagtttaggaagtgataaggtctaattttaatgttgcttgataacttaagtgagtacagaaaggtaaattttagtttgttatagggtgctaggagtgtgacagataggcagcccgtgtatgaaaaaagcttaatacccccaaaaaggagctcatcgctatgtctagcaatgtcttcacaccaattaataattttcctatgacataatggaaaattctaactgcaatttaactagtgcaagattgttcctgctcagagtgtctcagttcccccttcccttcaagcccaaatgaggagagagactgcgaaatccttctcaaacaaatggatccgtgaaccctgccatgcccaaatttcattgtttaacagaaccttaaaccagttgaagcaaagattgctgtccatatttccttgctaatgagcaatgaaaagaaggtgaaaaacagtcttcttgctcattgcagattaagcgactttttaactgcaattgacccccctctgtaatatggataggaatctgctcccaagtagtttcttgcaccaaaaaggagacctatgtgaaataagtgcatgcttgccacctgaaccctcaatttcttccaaaattttgtaaaataatttcacagaaaggctctagaagttttattgttggtttcctttcaaatgtaggtgagaatgttttttgggatgttcttttgggggtggcgtgggggttaggttgaaagagtttaagataatttttgccattaacttgcatccgacattccatttccatcctggcaaagtttccttcataaaccagatatatatgctgagaactcttaaaaaaatagaggaaaattttgcttggtagataagcagaccagacattaggtggcaacttcatgattcatggcatacgtctgattggattgattgggaaaggacaaagcattcctataaaataagctattttagaaatgctcaggagctccttgcttacaagtctagctagcctccatgttcagtcctctaggactattatgatttaaattcagcatgtaaatagcgatcttctattggttagtttgattgataaaaggtgcatctttccttttaactaaggataaagtccatactattggtcatctctgttgtcttttctgacttctataaggttatttgttaagagtgtttcattcacgacatacttcacatatattcacttttttcctagtactgttaatttttgcctcgcatcttttgttgaataaggttgagctagaatggtagaattggtttatatgatatggtatggctgctttatgcttactgtgctcagttttttttttttttttgtttctcttgaggttttctttgaaagattactgtcagtttggttgagaaacaagctatagcaatcattttaagaatggtatagctgatatcgatattgtttcctatgctgatatcctcttgaatgactactttaaagtggttgtgcccatttgttccatcagtgcacaccttatatggttttttcttcttcttttttctcattgtgtggattctgctttgttgtaactgctgattggcggcttttctgcaagccatcagtatcggctggacaggaagtagctatgccagttcaatcttttttattttgtcctactttggatgcagattaaagttatctattgaagctattcgtttataagttaattttgtctggagaataatctattatatcaattttagttttggttaactttttgttcaagggcaagtcagatagactgctataagaataacaaaaataaaagctcaattggagataaatttcttgtcgaatcagtaagatgatgatctcttggagtgtaaaacatcattcatgcgctattgcagccatcgagtgtaaatggttgtttccaccttagtaattggtatgcgatcagaatgtattcaactttacttattaaaaaatcttagagcaatcaaatataaaacctttggcaatattattgttgcgaattttgtgcaattcatagttgttaatttaaaaggattttgagtctgctcttctggatacaaccttagagtttgtctttcattaaataccgattggaaggggttcagcaagtggtctagttgggctcttttggattaaatcttagagtttgtcatccgttaaatactgattggaatggattcataaatgattatttctattggaattttggtctgtataacttttaaatattgtttaatgacttttctgtgctttcatatcgtgttatataatgtgatgttatagatcttaggtcagcggtctgaataagaaaaagaaatggtttattatgcaccatgtcttggctgagaaacttgtagagaatatttcacatcactaggaagaaaaaacggccaggggaagggttttactcttattttctttttgattttgcataaatggtatgctttcgtattttctgttggtattttgccagaagctcaggcttattcagctgttttctcaacatggtaaacattcggaattaatttgaatttaatttcaaagtaacagaaaattcaattgagttgggcggataactagcattcaaacacttcactttgttgacagacaatttcactaccatttgctgctgttgcaacattcttttgaaacgatatcagattctgaaatacttttagcagtgtaaaagtttttatcgtgttttactgattcattttgcagatccaacaaaggtgcatcagtcttttagtactgcc

SEQ ID NO: 9993 - DNA, 1551 bp, Eucalyptus grandis
  Intron number 2 from transcript Egrandis_v1_0.006065m (loc us Egrandis_v1_0.006065m.g) derived from phytozome v7.0 (c hr-ID scaffold_1; pos 5768555 to 5770105)
ttggaagtacagaactcgtgcgcattctgttacaggtgatctttctaacctgtttattatccgaaaattctttgctttattttgcctgtgctttttgtgtaaatattttcatagaacatcatggcagttgtgttctgttttctatttcctttggttcgggtatgcatctttctcatgtacgggtttctttgttgaaggtgctgtatggagtatattagttcagtttgattttcagttattgcttggtggatgattttctatataaaccgagatacatacttctcaagcttatggatgtaatctcggtggcatgatttgtgtggctaatattaacgtgccctggttcttgtcctgattaccttcactaagtactgcttgatatgaaagtatttcagtgcgctgtggaatctggaaatctgcttctgacgcctccaacaaactagaatttgtttggcttcttgcataaaaatcccaattagaaggttgatggtgacttgactattcagggaacaccagcttgccacataaaatttttggcttaatgacagtgtccctttcagtttgactttttgggctgagataattttcttggttttaaattgctggtccaagtgtctggagattcacagaccattgtttcaaagtaacattgacaacacgaacaaaaataatacgaaacagacccaagctggcagagcaggctctaagtcagatgaaagctcttcccttttctttgatgagcaagataagtgttgttaaaagcgtgaacctttatttaactcaaagaaaacctggagacattcttatcatttgaacttttgtggactcagatagtcataacatgttccttttgcttcaatggctaaaaagagagttgaagctgacaaacctatgtgaaataaggccaaccagttactgatatcttttctccaaatgagcatttgttacatttattgtatggatttgtcagcttgtgcacgcaaccatttctttttccttccttttgccaagttcttgaataatagattctagttcagatgaattagttgatccaaagtataagaaaagacaatatagatagctaactacatgccctagtgcaagaatcaaagcatgtagtctaagtaacttaaagagtgtccttcaattaaacataaaagtttggaagaatccaccaatggtagatcaatgtaaaatgaatgatgcataagatagttgcataccttctgctgaaaattgaagtgaacaggaaatcaaataactgaaaatatgaactgttctttgatgaggtacaatgtggaagtagatggttggttgctagctgttgccagtaaatgaaaatatgaaatctcttgttaatgctttgttggaagtgcttcagagcttgacctcttattatgtctgctttcttgactactagccatggggatttttagaatactagccatggggatttttagaatattcatgttgaatagtgactttgttcattgcaatagtgcatgagtagtttttttcctttctatcagattgctcagaggaacagcttgg

SEQ ID NO: 9994 - DNA, 2223 bp, Eucalyptus grandis
  Intron number 2 from transcript Egrandis_v1_0.003804m (loc us Egrandis_v1_0.003804m.g) derived from phytozome v7.0 (c hr-ID scaffold_11; pos 17535800 to 17538022 reverse strand )
gaagcaagataatcaagtctgtcctcataggtaagtagatttcttcattctgtcatgtttatgaataaggactatccatcctttgtgcacccagattcgggaatatcccgtcctatcatttcaagagaggcaacatggagtctataagtgataaatcccacaatttagaaaaagttatatagcctgatgcattttcagtggatcggatgtttgttgttcgtacacagctcttcggaattcaagtttgctgtttgatttgggcacatattttatgaacgaggactatccatctttggagcacccagactcgtgaatattacatcctgtcatctaaataaattaaacatggagtctaatgataaaactcccaatctagaaaatgttatatagcatgatgcaatttcagtcatttgattctttatttttgaactcttctccctttaactcaatttttaacttgaatttgttttgaccattaattgtcaagacaaataatggtttggtccacacgaaaaataaatggttccgtctgacattaaaaataaaaataaaaatctctctacagtcttctctttcgataaatgtaagtatatcgggagaaaatcaattggatattattattgtacagttgtcctataatgaaagtatttacttctttctttcttttttatttataaatacttctactatttcctcataaactcaccttttgtgccttgcttttttagtagtttaagtaagatgatgtaaaatttaaatgtacatttttaaaggctcatgagatgtgatatttttgttactatgccaggatgcatagaaaatatctccccactactttatatatatacttcataacacttaaaaatagactatgggtctttctctcacacttaactcttttaaggattaataccctaaaaaaaatcataaactgatacacatatgatgaatttacctcaaactaatttttgaatcacgaaaaaaccctaaattaatacacctgtgataaatataccacaaatgattgcaaaaagtttcaaactgatacacacgtggcaaatttaccccaaactaatttgttcaactatcaaaacctcaaagtggtatatatcttcccttaaattagattattaataaaaccacaacaatggtacaactatgataaacaaaaagtaaaatctcaaattgatacattagtcaaatgtcatacattattgaactttgcaatttgagattaaaatttaacaaaagctaaagagggtaaatttgtcataagtgtatcgatttggggtaaatttatcaaatgtatacaagtttggggtttttgtggttaaaaaattagttttggataaatttgtcacaaatgtaccaatttctaattttttaagtattaaccattcttttaaagtcaattacctttttaaaaaaaaaattcttttaaagtgtttgcatgagattttatcatttcctttatatacaaaatcagccatgacacacgtgtgatatcaatcataacatcaaaacgaatgtggatatttttctttagaatttttctagtcatttaatgattctttttatataaaaaacgggccatcatttttttctttgcaattgttttatgtttgtagaatgtcccatgacagattatttcaacgatttttgttagcatattgacactttctttcagatgaatccatgtattttaaacggaacatatagaatgaaaaacgtaatcatgggaagaacattgccaatgcttatatttgcaatttttgataggaaaaaaaattctgaagaaaaaaaaaatgtgatagctgaacatggcctataaaagaactataaggccaaaaataattactaacggtgggtaggtgtcaacataggagagtaccattggttatttttgctattttttgaaaagaaaataaaattatgaaagatatacgaaggttgacatatgctaagagagagagagagaaaaggcccaaaataaacaaagtggttaagtgtcaaaatatatactttgttgaacatttttcctaaaattgattgaataaaaatataaatggaaaaccacggtcgtaacatagaattgaatcgagtatgatgtacctagaaaaataaatttggtctttgtggccttcttccttcgattttacttaatatgaggattcaaatatgtgcccagggacttgtgtgaacaaattgggtacctatttctgc

SEQ ID NO: 9995 - DNA, 2641 bp, Eucalyptus grandis
  Intron number 5 from transcript Egrandis_v1_0.003423m (loc us Egrandis_v1_0.003423m.g) derived from phytozome v7.0 (c hr-ID scaffold_1; pos 18666830 to 18669470 reverse strand)
cacggcataatccctctgttggatactgtcaggtagttatgaggtgaagcagaattttgttgtaaaatcctgcttctttaaaagggtttatccccatatgccatgttacaactgtcgccccatgaactttgtcattaatagttgtctcttagttgtaatgaagcctttttaattttggattggtatgttgctgatctttgctttctcttcataggtatgggacatttttaatctttcccctctgatatcaattttttttttttggaattctgtctgggatttaaattgtgtataccggacctttaattcctaagtagtagaattatggacaatgacataccacaaccgttaaagtcttacactttcagttgtcctcactgtcagtcttaattgttttttatgatgatcttaagtttccaaaatattgacttgctgtttttcaattggattgtatcttcatagttaattgaataactgtaatatttctatctgtcatttgcctttcttcttgattattgtcaggacattaaagaattatgtaatgacatcagatagaagtgaaacaatttgatacagtgacagcatcaaagccttatctggttaagtaggttttggctatgtgaatcctgttatgccactggacttgattttgaataaagtcttttctaaactctacatggtttaaattttttcttatcatcttcttccacatctttttaggttttcttgctctttctaactcaagtttccatcccctgatcacgtctcctcattgaagtatttgaaggtgatggagcttacaatataaattgtttgtggcccaaacaacaatgatattgccgagtcgtgatgattggctattccgatgatctataactcaaacaggaccagtaaaggaacaagatccttcaccaaattcaattagtagccttatctattgggatctgaagtctcttaggattgtaataggtttctgaatttacatttgaagtagattattaggttgcctatttccattatgttggttgatcagatatttttttactacagctaggattaagattttcagaatatttgataaatatagatgcaattatttcaatccaatagaatttcattgagattattgaaatttagcaagatttgtttgtgagtagtgtcatgtgatgcaattcttgtggaaccgtaggtttgatgtttaggaagccttaggtgggatgcctgaaggaattcacttgttcaatgttatctttcattgggatttctcttcaagttttctattaaatcaggctcataactttaggaaattatttcccaacattagaagtccttcaactgatcaaaccataaaaacaagcttccctgatcttattttcaattggagccacactttctttttattgaatagatccatttttaatctgtctttcttgtgtgtctgcacatccatcgaaacattctaatctctgctacactcattttgtgcacctgtgactgtttaaccccccagcattccatgccacggagtgttgttggctttattgttgtctaactgatttatccttaagcatatgcagcattcaacaattgcataaaacaccagatgcacttctttgcttcactttttggatatgtcttgtcaatcttgtcaactcatccatcatcagagcaaaaagataaggacttagagcttacccttgatttgactctattgttataggaaagtcttccattcctccagtattcctttcttttcaagaatcctccaaggaagctctcttgattcttgtcacatgctttctctaaatttataaaggccatttgcaaatccttcttgaattcatctacttttcggccaatctttgtaacgggtaaatagtctctatgttagattttctgttgtaaaactgatttgattgtttgagatacatctcttttttcttaactaaaatttggttagtccttcccaaagagccatcatatgggccattagttcaatccctttgtagttgtggatgggaaccaaagtgccttttctccagtcattaggcatcttcttcgatctcactattttattaaagaggtttgcaaaccaaaatatactggtctccccattgttttccatactaaaagatttcagctgttggtccatgggatatacctgttttcattctaagagatctataactgaggagcatgactccgttctcgatgattttaagtgtttatggactacaaactttttgtcttttctgaagtagtttttgttgctagggtctttcttttagtactggatattcacgatgtccttataaattttctccattaataaaacttttatcttttaaaagttttggtagtttattggagggccactattgtaaatcaatgtccttgattgtttaagggatttaggtgatgcaaattacccttaatataagcactcatagaagttagaaaattggtaatctgtggtcttcattgctttatggggttggactttaaggctgggttgattcttactgcatcatacttagatcttgacaagattttgcacctttaatgtgcttttagtcttctcaatttaatgctatcttttttgtcccttctgctcacatgtttatatgatgtttgtcaggca

SEQ ID NO: 9996 - DNA, 724 bp, Eucalyptus grandis
  Intron number 7 from transcript Egrandis_v1_0.018517m (loc us Egrandis_v1_0.013759m.g) derived from phytozome v7.0 (c hr-ID scaffold_3; pos 62515763 to 62516486 reverse strand)
atttgagtatgtgaattcctttccaattcttttgtatcattcaaatttaatttttgctctggctcatttgtaaaatttgtgattgttttgaggaaatatttgaggggttagacctttttgatatttctttatgggaagagattttttttttttgttcgtacaatcatggactcatatttttatttttagtcttatgttatctagatatggcttgaattagcatctcttcctttaataaattgagtgttaaaactttagttctggaatttgtagggtagttggggggaatgaaaataagtctcaatattgttggtagttgactggcatttatggtattgacattcgattcattctcaggtattcactgatggcaaagcatcaaatgtatatgattgattgatatactcaatgacaaaattccttatcgcttcttttattcatactagtggaagggtggacggagggatgaaggagcatttaatgattctttgcttttgactattatgaaaatcactttggaaaatcaaactgatggtctgtatattgttctatcttatacttaacagaattacccacattaatagcaggtctgattccagcattgaatagatcggttgtgcattcgattcatttttagttctttgtttctaacttctattcaatgcaattcatccattttaatattgcaggaaagtggcttggaagtcgtcaaatacgttgtaac

SEQ ID NO: 9997 - DNA, 5268 bp, Eucalyptus grandis
  Intron number 8 from transcript Egrandis_v1_0.039601m (loc us Egrandis_v1_0.039601m.g) derived from phytozome v7.0 (c hr-ID scaffold_10; pos 25024794 to 25030061)
agcttgaaaaggtaactcttctgaattatctacatttgtgcccacgtatgtacatgggcatgtggggtgtgcattttgctcctcctccccttcccccaacccccaaaaaaaaacaacaaaaccattgttttggtagttttaactattgtcatgccagggctaggcttggcataatggtaagattacttgtgagtttaaggttatgggtatggcccatggaaatagcctttttgctagagagctggggaatgctgcagtggacctcacccaaccattgcatggtttgtagctctatgcactagatgctttcttcccccaccttgaactctccaactatccatactcgctggtgaagcatgatactggggtcatgcagtttgataatcaattggcttggcaggctagtgagcgctctgcagtcgatcttaataatctgctcaaaacactttgtttggactctttctatctggtgactatgtagccactaaaagctctaaacgtaggctctagttctacaggtttgagaagttaaacctggtttacactgggagagtaaaatcatgtaacagagctgtgcaagaaaattattttggtagaatctgcattcttcgacgtgtaagtggatgttgtttaatttgagatgtataaaaaatatccatatcccatttcacattaatcaggagactatatagataagttggtaaaaccttagggcctgtttgaaaaatccactaaatctggtaaggactgggttacttaattcgttcagtacaaatatttgatggtaattggaatcattagatatctttgtattattattttcagcgcttaagattgtcaacacttaaagttcaattctttaatgtttagctctttatgaaagcccttagtgaagtgtcttcaggagacaataatgtctctcatggcctcttagtttttctggtccattgtctcgagaaaccacgtcaagtagacaagatcatatggcgaggtgaattcgacactccaccaactcttcctctgtctctaaatccatattctattgattgttcttccaactgctatttgaaattgtaaaaacccgtacctcctaacaaatttttagttgcatgtcatcaattatcaagttaatgcacatcttttattacttcactgccctctatttccactccatctgtttgtgaattccttagacatcctggtcggaaagctgctatgacaaagggatgcttaattacagcaaaacaatacttgaaatcttatgaaacctccctgctgataagtttactgttgattgcaaaaagattcatatagtgaaattgacatatggttcaattatcgagttgaaggcgcaattgtagcttaatgctatactctactctgttaaatagattatttaaatatttttctccacttgccaaaatacatccctcaagttattattataagataatcccacatcgcttgtctatagagcttgtctgggtcttgcatacatgtagttccccttaatttgatggttcaagtttccggttggacattgtaacatggtatcagagctaatttccaattagtgatgccccatttaatatttcatttcctgtatggttcctgtctgtcctatttttcttttatccgttccacatgcgattcttcatctgattttcacgtgagagagggtgttaaagtaatctaacttcacttgttaataacttaaatattttggattatatatcctcaaaattactttgctgtttcagtggcttttacattagttaggtataaaaaattgctttcctggatggagatgaggagaaatatgcatggagcaataacttgcttttgttgcttagggggagtagagagcttagtttgttgactgaagaagtgtacagaacaatcttcttgagcaaggtttggtagctttagtgaagtggtggttaactttggcccttggagatgctatgttgatcatccaattcgattaaccaatagatgtcaatgctatccctttgagttggtaaatgatgcgatagaagagattaattggaaagttgaattacttaatggttgcaagcaagggcatgccttttgccatgagtgtggttctagccacactagacctatacattgggatcagatgtacttattcggagatacatggaaggtgctctagggcatgatttactttatgaaaatcatggtacatcctctaatgctgatatctaatagaaggttaaccaccagatactgtgtatttgtttggggtaactagatgtcgtggaaaagccagttgcaagctgttatcacaaggtaaacttctggtttttagtaggaagccacaacacttgccacttgtgagccattccattgaagcacatgagggaggagcttgaacttatgcattctgatccaataaccctcacatgcgataatcaagctgctattgatagggcatccaattctgtttgcaacgaatataccaaacatatcaaggttgattgtcacatagtttgacagaaactaccttctacaaaatgtgcgattaataagatttttggatcagctggcagatttatctgctaaagttctggggttctagagtttcttatctgtaacaagctaggagcattaatgctcctagcttgaggggagtgataatgtgtgttttagtttagaaggtaatatgtccttatgtagcatcatcttgtatttaagtttcttctttcctctacctacgcttccattaaattgtcaaatagagtgagtgtaagcccacacagtctactcaatgcctatactatttgattccattttgtacccctaaagtgaaactcgctttatcccatctctctttctctctctccctagataatatagtttgaaaaaaagcgttaatttcccttggcattgtcaattatcatttaacaaggtgatgtggggaccaaagcaagcttttattcattgttccatcttctctgaatctccagtcctccatcctgaggtgagatcatgttgcacctgggcattcttacacggtacttcctctacaaagtaatgaccaattagtctattgtgataaacattagagctttacatcgtgacctcttttgaagggatagaagcagagagcaattcaagcagtcaaatgaagtttgtggatatcttttacaatccttaaattgtggtaattattatgccgctgtactctgatctatgtcattgtaaccactcaactttggacattgcttaaatgtttccacgccatcactttgctatcagaaacagagcactaaacttgatgtggatgtcctacaggtattctttcaaatgatgggcaacttatctgtatcaaattccaatagtctttttttatggcaaattgatggtgtggaaacattagaacatggcaagagttgtgtttcaatggcaaattggcaatgctaatgaaaactatacattaaacaatgatccaagatatttactcaaatggacagaatcccgctgttgtcaagagagattgctgagtattgggctgagcatatcaaataccagtattcaagctcaacatgtgtgtgggacaagctgcaaaaagttacagggtttggaatgagggggagaaaaaaagaaaaaaaggttggggggtacctcaatgtgtctgtttgcttttccaggaaaaacatgagagtactccaaagcaacaccaaattggaattcgttttttcttctcagttttttcattaagataactggatttcacacccccttgatgcataaacagtcattgcatttagaaagcatactcacctcctgtcaactaaaggtgttctcccttttcatccacgacatgtgtatgtattggctaaaagctcttacgaggcattaaagccaccctaccaattcattcaataatttctaatcttgagatgttcagggagcagggtaaatgctcaatttgaaaaaaaaaatctaggacctacctgcatttttatcaaaacctgatcggtgttcgggcagtttaccctattcattaatatctaccgtcaagtgatgatgtaccttttacatggaatcacattttgggttgactcatgtggaacagtggaagagatggaatctatgctgcaaagttctactacaagctgctagaacagattagtggcgctaatatggattttccttggaaagtgaggggtccaacaaaagttctttctagaagcaaattgggaacgagtccttacttttagataacttacaacaaagaggcagagtagcggttgatctctttcctctgctaaaagagggcagagaccatgtggcacctcctccttcattgttcttggatgtgaatggtttggtagcttgtgcttgcactgggttaatcataggttatggaggttctattgagcaagaactttagggtgtggcagggcgtttatttagaacacaacaagaaaaggactaccttagtccttctcttttttcggttgatttggaaggagtggatgtgagagcttttgatggagaggaatcttccttctctctctctctctctctctctctctctctctctctctctctctctctctctctctgttttttcttgggaaatcggcttaaaacacttttggtctagtggagacttgctcatggatgtaaatatcttggttgatatagttgatgatttatcctgatattggttctgagagctgttttctatacggcactagtttttgagctctttttgcacatggttatgggttgcacctccttggtggcctattacttatcttacctatctcacaaaattaacgtgtttttggacactaaacagaaataagtaaaaagaacataagaatttgtttggcttggtatgtaggacttcaatttttgccagttaatatgaagggtggtaaatgtgggcactattacgtttttggtgactcaatgaaaatgtcatattagagtcagcttttcataaattgcttagagtctgtactggagttgtcttgtaacttgtgcttagtactgcacattctaaagtcacatcattttaaagctgggtgaggcagttttctaagagttgcggtaaatttgtagcaaagatagcctcttgttagtgctgaatgacttggggagcaatgcgggcttttcccctttttttccctttctttatccaggactgtttaatgcaattgatctgattaactttatgttctacctcgttttccagaagctgaaggagttagcagtatccaaactggtttt

SEQ ID NO: 9998 - DNA, 3639 bp, Eucalyptus grandis
  Intron number 2 from transcript Egrandis_v1_0.052805m (loc us Egrandis_v1_0.052805m.g) derived from phytozome v7.0 (c hr-ID scaffold_4; pos 31115351 to 31118989)
catccgctttcgtgagctcgccgccgacgtccttggtgagtttatctacctaacctccccccacacgtcatcattgatctgtccgccgctgttggcgccggataagttcgactggttcgtccgaggctgccgcgagaagacaacaatctcgacgccctagtctccttgcgtgtttttaccgataatgccgatcgcgctttatagcgcaaagtcggtttctaagatttgggtttggattcggtccttagtaggtagtggttttttagagcgtgtttggtaacgatttcgttcccgggaatagattctgatcagaaataattcttttttattctgtttccgggaataatttttaagcattttaagttgtttggtaacagtccaaaatttctgattttgaaataaaattgcgtttggtatcgtactcattaattatgttccaaatcaatttctgatcagaaataattcttttttattctgtttccgggaataatttttaagcattttaagttgtttggtaacagtccaaaatttctgattttgaaataaaattgcgtttggtatcgtactcattaattatgttccaaatcaatttcttttaattttaaaataatttttttactattttcctttctgttcttttttttcctttttatcctattctttttcttcttcttcttgtggtcagtcgtcggactggcgaccgactagacgagggccggcgacctcactggagtgtcgtcggcccttgtcggcagctaggcgagtggccaggccggccttgctagggctgggtgaggcctgcctggccactagcgaggctaggcgagctcgccgaaccagttgccggcgactggcggtggatggtggcaatggtggcggaaccgcgggatggcggtcgatgaagaagaagaagagaaaagaaaagaggaagaattggttttgattctaggatgcgtttgtttcacggaaaactcaatgatgaaggaaaatgttttctgggaaaacattttccaagaatataatttgttttcctttgtttggtgatgtataattgaaaatgttttgtgccgtttggatcccattaaaaaataatttcacacttctgccgtttgaattttttttcccggctagcttacaaggggtgagctctagttgtcgccaaaggctgcgagctcaccagttggccgctagaggctgcgagctcgcccaatttggtgaggcttgagcctcatcgctagaggccacgagctcacctgatttagtgaggcttgaggctcatcggccttgggcaaactcaagccttgttgtcgaaggccatgagatcgagagactaaagctcattggccttcctcgtggccgatgacgggtgaagaagaagcaaaaagaaaaaagaagaaaataaaaggaaaaaaaaaacaaattcgaaatttttatttttatttttaaaatgttttccaaattttaatttttttaaaaaaaaaattcaaattcaatttttttaaaatatattttataagaataattgtttgtaaaccaagtatcaaatctaagctttggtagattcagaaaacgttttcaggtcgtttcaaaggagaaatcattttcctgaatttaagctttgccattaaaaggttttccgttgacttggaaaacgttctccgttgactcattttcttgagtgatccaaacatcgaaaaatgaggaaaacattttccctgaaaatgtatttcgcgaaacaaacgcaccggaataatcaattttttttatttattcttgattttgtttcaaatctaatttcgggaacaaaaaaaatagaaatttgttttcgggaacaagaattttaccaaacgcgattttgttctcaaactgctctcgggaacaaaaaatcagaatcagacactgtttggatggttaccaaacagggccttagtccatcaaaagtatctctccattcaattttagtttttattaattatgagcgaatcatcacgcatttttggcttagttataatttcaaaatactttaaaaaaattataaaatttactataagattggcgatacaataattaaggatgcgtttgataacgtttctattaaaaaattgttccccgaaacaaaaatagtttttctatttctgttctagagaacaatttttgaatagaagaagatgtttggtaaacttgttcctggaatagaaaaagagcatgaacacgtttggtaaacttgtataattttttaatatttttattttatttttttcgtttttcttccttttggctggtcgccaacctcggccatggtcggcgaccaactgacgagggccggcggccttgcccaaccacgggaggctcgacctcgccaggggccaacgactctccagtgaggtcgctagccctcgacggtcggtcaccggccatggccaaggtcgatgactggccaaagaaaaaagaagaagaaaagaaagagaagaaaaaaaaataagggaaagaaaaattgtttctcgaaagtgttccagaaacaagaaacaagtttttcttctttttttgtttctgtttcaaatttattctcgagtacaaaaaaatagatttggaacaaaaacgcaaacaaacgcgtttctgtttctttttgttacctggaacaaaaaaacaagaattgtgttcatgcacaaaagaaaagaacacaaacaaatagggcctaattttcttgttcctttgtgaatgttacaaccaaaaaaaaaaaaagagcataactagatccaaatttttttaaaaagttagatttcacataattttcttttgatatattgagaatcgcgtttttttttcttatttgtttaatttttagcaagtctttacaccaatcaatatatgacgatggtatcggggtctactaaaatttaattttttttttttacaagctgaatctaactcatcttatttaaattgtaggatataagttcgattctcaaagattcgcgaaattatttcctcacgcataatacatcaccatgattacacaaaaaatctggaaaattgtgaccgtaccgttgcttcatattcagatttccaatatggattctgtgaatcataaccagtgaaaataattatggatgtttcgcggaaggtataagtagtttcaattgttcgggcatatggaggaaacattctagtaaaatggtcgtcgtggacaagaaaagatgagaccattgggcggtgatgggccgtaaatactaaaaatgtccgcacggattgttcagacacgttggccagccgctggactttggtagttggcggctacttttcttttctctgttccttttgtaattttggtttatatttcgtaatgcttgcgtcatattttcttggagcttggtggcccaaggcccatggctataatgggtagagcggccagtccgtcgattcttcttcttcggtcgacaagagaggttttagtagggtctaatttgataagttaattcagtgcatcttctagtcattcggatgatggatcctttaccatatggataaaaattctcgcgggtaaatttctttttacttgcgaaaataatgctgatgctaccgttctaattgtgcagatcttatggtcttggcttctgtcattttataggatcgggattg

SEQ ID NO: 9999 - DNA, 1425 bp, Eucalyptus grandis
  Intron number 1 from transcript Egrandis_v1_0.018317m (loc us Egrandis_v1_0.018317m.g) derived from phytozome v7.0 (c hr-ID scaffold_1; pos 22942783 to 22944207)
tacccgcccattcatcaggttcgatcacgtagctccccgatgacctcgcgctttgaacgtatcgcgctcttcgtggttgatgtcgttgcggtgtgttcttggttcctagggcgatggtgctggtagacaatgcgatttagatggcgggttcggatttgttggattgccagagaatctgcgttgcttcgcatttgtttcggagtagatcggggtgtgatcatgccaggcatggcgattcggagaattcccgttttttactacgagcagaagcagatctaggcctaaatcatacgatactgattgcaagtttagaacttggttgctgtgttgggctacaagatgatggtgcacgggggctaattggtgccttttggtttggcctttgtaggaagttttaggtcttcagaaaggaatcgctcaaaattctttttagttaggctgcaagtatagtcaaatgccttggagggaattgtagtggaataggtctctatattgaagtggcgtctcgctgtgtaagttgactgctctgagctcgtttttttccccttccagtgggacagacttaatacatcaacgttgtcacttgtgctgtcttaattcaaccttcctttttaggctttttgcttagtcatcatggcctggatattgtgtttcatacctccatatcacatgcatctataagaggcgcaggagaggaggtcgaatgttaattcttgactgagggcttaatatgaacatgaggctttgaagacctggaccaagaaaataacgtgttgggctctggtggttttatcaagtatgagtctatcgtgactctcctaattttgagattttacgattagatggttataaaaattctgaaggtttgaagaggcatgattagattggtgatattacgtcggcttgacacataacttgtatacttctgtatattctcccattgtagggtcatacaattttcattctttaaaattctaaagaaactgagtacttgaaaggcttctttctcctaacttttcaccattacgttaattttgttgattgggccacaagatatgtcatgaacttttggtccgtgtgtatggggaagtgaaccactgaagtttgcaccagtcgaggcttttgtaatgcaaaggtaccattgcaaagtgttgagaagtttggcatcagttgtagattgtgcaattgcatgaagaaacttcacccaaagtcaagcaaacgtacagagaaacttgctaaattttagttgtcattgccaggttcgttggtgcattggctgttttgataaagactggggggccattcccagtaacctatatttaatgttagtgacgctttggttgttggtgtacgttagttggttgcatctcctagactttgaattttgatctgagaaactggttttttctttttggcagtgccata

SEQ ID NO: 10000 - DNA, 777 bp, Eucalyptus grandis
  Intron number 2 from transcript Egrandis_v1_0.002001m (loc us Egrandis_v1_0.001995m.g) derived from phytozome v7.0 (c hr-ID scaffold_9; pos 25316957 to 25317733)
gtccagaacttgaaactgtctgcaaagctctcgaggtcccttctaattcttctccttgattctatgataccagatgtttttgagtctgatttgctacaagaagaattagcaaaaagctgtctgcttgtcaatacaaagaaaagcatcaccatatgtggtaataaactattaaaaactgttgaaacataagatataacagattaagagctaggtatagtttctgaacagaaatttgcagtctgaatacgtcctatacgggctcttcggtacttcagctatatattcttgggaggcgaacatatcaaatagcattagtgtcttgcctctgttttcctcaagtcagagttcactgtttagtattttccagatcacaatcagtgtgctaacctcatgtaatgtgtcgtttggtgtgcgaagcatttttcctatcttgccaagcagagatgttggagacattcccacactctatagtccattttcccagtttcctactttgatggccatatggctaattccatttttttttctctatggattattttcactggagtcccaattttcttcataacgaggttatttgaaactgttttgtctgggcatatgttacatttgtttaaattaaaaaaaccgtttagattcaccaacagttccctctccaattattcataatgtacctcagcagacacctacaaatatcaagaaaatttgtcttctcatgtttaattagagctctttattgcaggctgttgatcttagaagttcccagaccttcagacc

SEQ ID NO: 10001 - DNA, 3858 bp, Eucalyptus grandis
  Intron number 1 from transcript Egrandis_v1_0.005563m (loc us Egrandis_v1_0.005563m.g) derived from phytozome v7.0 (c hr-ID scaffold_3; pos 57099462 to 57103319)
atctgataacgggggagatctccggaggtgactttgtaaagatcctatagcttcactacttgtctgctttataaaactgttcgctaacagatttgtttttgggtcaatctcccatctgcctgagcaatagtgacagattcgagtcttgtaatctgatgacagctcagcgaagtcatgagcttctgctgctcgtggggcgactcatttttagggtttgtaacagctgctagggctttgagcggtgtatctgagtacagtagcataatatttactcaagtacatctcttctcacgaagatggctcttgggcggagtgttgactggtgtagctcttgtccttttggctttgatagcattttcgttttataatttacagtttccttcatatagtttaatatcattacataatctatccttaaggataacatttttggaagtaaaatccaaacaccagaaaattacttccctctcgtttccatgctttccaccaaaaagttttcctttaaaccaacgcattccaggtctaataagcccaatctttcatatcctctttttgagtacatacataggatttttctttgtacatttgattcatttccaattatctatgttatagattaagatcccctttgttttgcggaatttttttttatcaaacaatacttgtctcattttttggcatttagatagcttaggaaatgaataaatagaaaatctttttataatcaacgaaaaatctatgcccagttttaggaatatgatttctgcttctaaaagtcataaatcattttctagaatacgactagacattgatgtttgaactagagatctcggcccttgggcatagggcgagacgtttgtgcttgagttcttaatagccttggtcccttaaggctgagcccaagacctcgatgcttatgcctaggcctttgctggttgcgcccaagtccccgaaactttgattgtgaagctcggccttgtggctgggtggaggacctcgatagctaagctaaagtaccctaggctaggcttggggcctaagcattggaggttggattccataagagaagaaaaaatattggcttatgatttatagaagtatctatttataaaaatttgattcaataaaattttatttgggttgattgcattgcaagtctaaaatttttcacgaaaatacaattgagttataaaacttgtcacaaaagtgcaatcaaattctaaaaatttcaaaataatgtaattaagttctaaaacttgtcacaaacatgtaatcgcgtcctaaaactttcgaaaaattcaaataactaaaggatttgattgaattaatttgaaaagttttaggttatgattacactttttttaaagttttagaacttaattgtattttcgtagtaagttttagtatttccattgcactttttaaaagttttaagacttggttgcatctttgtgacaaattttaggacttccaatgtacttatctcaattgataatatagcatatgcaactcgtgtcacacaaatagtgcatatcttttcagaaaaataaaagcaagttcttttttctaatgatggaaaataatttccaatttatgttcgaattctagccgaacactgagaaatattgtcattttccaaaaaaaaaatcttattcaaacacaatttttagaaaaatcaaattatctatgaaacaaacggggcctcagtaaatttctttcttccatttgttttttgtttgttataggaagcttggtatgtgcaactattgacacaaggtaaagttaattaaaattgggataattttttttctatgtaattaagtttagtagaagcatattgtattaaaaaggtgaattgctaaggatgtatgaccataaattttaaatgtattttttcacttcatcaatgaatgttttaaaaggatttatcatcacacgttgtgatttggcatagaaaatttctcattttcgtgagattgtcattcttaatttgtcatagttttgacaaaacacttattctataatgttagttaagaatacatgggtaaccaacctatttctctacggttctcttttgtgttaaattcttgcttctcctaaatttcacctagagaggggtgaatatgtgattattaacaattaaagtggaatttaaaataaccaagttcaatatcatgaaagaacaaagtctaatgaaaaactttgcagtgatcaaattttctgcaacttctgcaatgtcttatgaagaactacgcaatgatagactttatagggtgcaataaacggaataaatgaaaaattaaaggatagagaaaattacacacaacaattatagtggttcagcttatgataagtctacgttcgctctcctacataacagcctattaaccggattccactattaagaaccaataagatattccaagatttgagcagtgaatactcaaattcatgcgaataactccttacacgcactcaacttctgagtgattatacaatattactcacaaagatgaatgtatttgatcagaaatactcttcagactttggaattataagcttcaattctctcgtgctctcactccctttagcatcgagacctccttttatactcgttcctatccaagctgactgtttgatatatctcccggagggttatctagccaatttgcttgttggcctagatttttcttagaaagaacatctgatcgttttaaggatgctaagagtaaagcttcctgtagattctactgctcatacagcagtttggaaactgctttccatgagtcgagtgctttaacttggaaagaatgtttcgccttaagtatagtttcgagaaagttgaatctttgaaagatatttggaaaactttccttttgaaactcctcgtatataaggtaagaaatccaactaattgccagtagccattgcacgacaatattatcttcttcctagccgtttgacagaataaataaggaaggaaataattaagccatgactctggtttagattaatatcgtttgatcaattccaccaaattttatatctgaaaaatacttatcatcataatcaaagtctttacgtcggataaattttgtcaatcttcaaaatcaatttggaaatttcctcaacaatcctttcattcacgtgacaatgtttcatacccattacttatcactctgatttgaataatctttagaactagagcattattggttctatagtagtttacccttctcttctagttctaacatataggtccaattctaactttagttatgatgtttttccataatctcagtctaatttttggttctaacctactgtttattgtaggtcataatatgtttctagtttcttgtttgtttgtaaggctttaattttaaagtaatgtttagatgtgtttacaacaacattctgggtctgggacattgtagttaattctttgcatttcatcaagtactttgcagaactgggtactttctgtcatcccttttcccatcttgtcctcctcattatgttcttgtcactcttccgccagtgggttttgacacttgcactgtccgacttgccaaatgtgaattgtaatagacaccgtttcatattttaagttactcttttggaggcgctgcaggttaggctttcttatttcttgacactagcttgcacaaaactaggcaatggaatgaagtgactggatttaactgaaatatgccttctttcgtcacacataagtagaatgtcaagaatcaagaatcagattgttgctttatttgcttgatagagactcagagaggctaagttatcatttgtgattgaacagtggcgaaagcttttctgttgacggagtaccagtat

SEQ ID NO: 10002 - DNA, 2264 bp, Eucalyptus grandis
  Intron number 4 from transcript Egrandis_v1_0.041684m (loc us Egrandis_v1_0.041684m.g) derived from phytozome v7.0 (c hr-ID scaffold_9; pos 7834672 to 7836935 reverse strand)
aagtgtgcccattgcttaagaaaatcatgccagggaaatttctttgattatgatagatgttccgttatttccagttttaattccaattccccaagccataaacgttgaagggaggcattataggaatttattgatatatttgaaccgttggagtaaaatagcagttgagagcagctttaagccacttgttgtttcttgcgaagtcttctgacgggtgacttgactttgcatctgtgaaggtgtgatgagtgatgacatcttggttatatagtcctagtatttattaatgaatctaactgaagaaataattccccacttttgttattgaatgttgtagttgaatttgtgaaaataacactaaccgtccttaaattatggcttgatgtgcaatatcatctttaaactttcaattcattaaataaagtttttaagcaatttctaaatgttcaatttagtttctaaattttcaatccaatccctcaactttacaatgtcaaatcaatcttttgaactattcgcaagtttatgtaattacacttttacacaaattttttattatgttttcatttcaatccatttcctatatcaataaaaaaaaatgtttatctttttactacctttgtacttttttggtttttctaaatattacgacagttccattttaaatatattttaactttgatctctatgatagtgaaaataggttctcatcttgagttatattatattgatattcataattttttaagaaaaaaaaatcataaggaattctagcaatgctattaactttattaatgtaagtctcgaaactagtttttttggataaaattttcaagtttttgtatttcttgttctcttaactaaattcagtcaaatttgtaactttgaaattcagaacaacgggaaattcaacccgatacaaatactaatgaaattctacttataataaaatagagttcattaaccaaaatataattaaatgaaactattataatatttatgaataccataaaggtaaaaaaagtcacacaaagatagcatttttcggcttatttaggaaatggatggaaatgaaaaagtatcattaaattagggcaatagtgtaattatgaaaacttgtgaatattactgaatgacttatttggctttgttacggatagttgagggattaaattgaacaaattaaaggtttaggattagagtgaacatttatgagtaatttaaggaccacattaaacaaattaagtgtttcaatgatgaaattgaacatttgctaaaattcaaggactgtagatgtcattttcatagtggattataaactctttgtcttgagtctcgctcgtcacctatacgtcctcttgaagacagacaatcagatctcaacctatgattgagcatgtcatgaatgattggacatggaagtctactgcatgctttaggcatgggatttggcatgctttacttctaatatcgttgcagttctatgagaactctaagatgatgtcgggtcttcgtttacggatagaaactatattccagaaggaagtgcagttggagccttggcgtagatctcttttgctgtggtgcagcgagtaatgaattcatatatacttccattttgaaattgcaatgcaaggtgatgaaaaaggatagaagcaatggctatatcttcatagtaagaaaaggcgtgtaaactatgaagtttcaaaagttgaatatggtgggagttcaatcttatttatttatcaagtgaaattagagcaaaatggcggatacatatcttgtatcagttaggcatcagaacccttactttcaatcatccagtctaggcagctacgcatttagtttgatccaatgcacatgtattctgttactcttattcttctgcaacgcttggctttttgcttggtattttgcctgtcaattttggacttgccaccattatttttccttatgaagtttccatcgctatcgtcttggccaatgcattggtttcatcagcctttctccttaaattacgttgatcattataaccagttctttcatagttggctatggttaaatcatttggttgcatcgttatttttgttctttttcttacacctgtactttcgcacttgcataacattttctttcataatgcttcttggaggaactttaagtgctgttcttcgaatcatggttttgtgtttttcccttgtgtatttacggaccagattcttgtcccaggttataattccagctccctgttgggtgagttaccc

SEQ ID NO: 10003 - DNA, 3032 bp, Eucalyptus grandis
  Intron number 1 from transcript Egrandis_v1_0.012232m (loc us Egrandis_v1_0.012232m.g) derived from phytozome v7.0 (c hr-ID scaffold_11; pos 22395859 to 22398890 reverse strand )
catcatcgccaccgtccgccggggagatccgtcaggtacgtccggctgcttctgcgatcaatcccctccctcgccttcctgcgttctgatcagtttggagtgtgtacgtgttgacgggattggatcgtcgccggcgcgtttgatccgtcgttttttttcccttcgtgatcccgtcgcgtggcagcgattcgcgctagtgtcgcgtggttgctgattgctctctccccgtgccttctctctctctctcgtcggtaagtgtcttcggcttttgtctggtcggtcgaggtggcgatctaatcctcgcggggatcgcgtgcatgtgccgccggggcaatgttgccgtgtcctcggacggattgcgtgggctgggatcacggaacgattcgggttcgtgtccgtggattggagtgatgtcttgtttttttgtcgccctatcggactgattcgatcgggggtcattacttgcggcactagcgttagtttcctgcttgaaagtttcggcttgaatgagagcttctatctgctcggctcgcagctgtagccattcaccggtatcagtgagtgcatctggaattgtttctattctattgggttagttttcgatggcgatgtgctgaagagcttggctttgttatgcccgccttgcttttgaaaatagtggacaagtaactgctgattgagttttatatattcggatgattgattctaatacatcttgagaccgtcttgggagggaatgtgtgtggtgagctggttgcagttttgaggcaagagacttaatagtgactttgatggaaaaagaatggtttggccaaaagtctgaaatgctacatatttaagttgattttgtgtgttggcagtacaaatttagaaaatggaaagattgccaatctggagaaaggatggttgtttagatgaaataacgaaccgcaaactctcaagaagagcttctatattcgaataattcttaacaagtgacaagatgatactcttcagatggtcaaatgtttatcaattgaggtttaagtcagcaacaggattctcaaagcaggaattaatggccattgaatgaggaattgtggaactcataatgtgctcaatttctccgtgtttggaccagtacttgcataacattcctaagagaaagttataataagaatccgaataaaagtggtcacgctaagttcctgttttgagaagactgatgccatcaaggtgaaaagcaaggttaattagattataaagatagacgttcataagtatgtcattatttttcgggatattctgtgacatgtaagtgaactttggtgaaagagttagtttgagaaatttggggaacaaaaccataaaaaaaataaatatatattcctaatggagataagataggcagtagctttggagaatccgattagacatagacactaatcctgttagaaggtaactgccaacatatatgtctagatagactggctattgcgtttggttgttattaggatttttgcatgtttatgcttgttctcacgtcgtgggtttgtaatttgggtgtgctgatttggagtatggaaatgctctacgttcttgtgtactcatattggttataatgaatttctcttcttctttagtgcatctttactcttctacgatggtgttcacttgtcatagcttttgattgaagtggtagtcaacattggaaaatggaactactaaagctcgcattaaaattgattttagaaggcagtcattggagttaaaagcaatgtaaatgctaaaattaccagagaggtttgagaaaggcagcaggtggagaagtaccacatgagtccttcatgtccaaggctgacaaggcatactctttagtgcatcctattgaagcgcaagcattggtagcatagttaatttatcattgagaactatgctgagatatgttgggctggcaaaaagagccgccaaatgtttcgtgttagtctttctctatgggatgaagacaaggaactgagcatgtttcttgacaatttaagctcagcgttttaggagcaactgttcttcaatatgatatcggagcttgaagtcaagggtccaatccttgacactcctgttgttaccattttgtctattactcatgttttccttctgattgttgtttgaagcagttaagtccccatcccatgttttacttgtaaggtccaactcatgcacgagggggttgatttaacatttatgtttaatagacattgttggcattttaactagcagcttgagtttaagttttggggaaagcagttgttcaacatttatgaaacgctttgcaggagccttctctttttgcttgtgttgtgggggtaggtgggcagttcaaattgagatattgattcataggaggtttgttatgatatacatatttaatgatattaacagatgcatttctacaaaggtataggtttggtatagcgaaccttatatacatgtgtatgtgtatatacacctttgaagtgaaaaaatgcgagaaaaaagttctgattatactttagcttatctacttgataaggttagtgggtgatgcagttacttgaggtaggtagagtgggtaactcatattcttatgcaggcttgactggctagattttgtgaagctctcaaatgggataagaacacctaggatccgttaagtttgactgattttgcagtttggtccttgttcttaaaaaattgaggtttttattccttgaatgtctttttgagcagttttggtccctgaccatcatttgcatggaatctaaatcacaattgttgaacgtgatgtagtttactaacacataattatatattcaacaaagagaatccataaatgaccaagaagagccttggaggtttaatcttgtgatagaatcataatccaacctctaagcaaatgacaatcagagattataaaatttgctgcttccttttagattgcattttttagcagattctctacaagatcattttctgcttctgcagtggattcttgctgaattatcagacgccagaatccg

SEQ ID NO: 10004 - DNA, 3033 bp, Eucalyptus grandis
  Intron number 8 from transcript Egrandis_v1_0.001288m (loc us Egrandis_v1_0.001288m.g) derived from phytozome v7.0 (c hr-ID scaffold_7; pos 44142849 to 44145881 reverse strand)
cttatacagtaatacctggcaggtaggttggtaagccgatttcatgatttcaagagggggaaaagcgaatgaggctcttcaaggcctcacaaactaaatatctttaagattcactagttttgctttatttcatttaaaagagaccactcccttcttccatcaattcatctccaatcggttgtccatatctctcctcctcctcctcctcctctagagatctgaggtttgatgatataggcacttcacggcggtggccctctccagctacattcgatattctaataaaattcttagatttttttgtcatttcacattgaaccattaagtggtcatcctagatgttctgaacacataatttcagccttgtttttttgtccccttgtggggattttcactgaagagttagctacacaggtactgccctgagccaaacttttccataagatattttccatgagatataaggcattggaggtttgttcatagtattatttagtgcccttttttttattgttacaaattcctcactcatcatttcttcattgctaatggaccttccttttttttatggttacaaattcctcactcatcttttcttcattgctaatggaccttcaaaagtgtcactggtctccctggttcttaatggtctgactctgaggaagtatctgaacttcatcataggcatataatttggaatttgtcctttaggccttaatatgatgagttatatacccccttgttgtccctttatatttgtgttattgaaaaccatcttcgggttgacagtaccatctcaattgctatcgctaggaagatggatcatatccatcttcctacaggataatcaatttaattgaggcagaaatgttatagcacttgattgaatgcttgctgtgctgatagaaaattccctttttttattggtaaattaaaaaattactttagggaaataaaaaataaattacaagaacactttatggcttgaaatagaggaattttcccatatggtgacaagttcgagcttttgttggtaacttcggtaggaggagatgcaaaagcataggtctattttccaaagaaggataaccagctggaatatgagcatcccaagttgtagggtcagatgataattagtacactcgtaccagaagaataagcagtgagattgtctctaagaatagttatgaagcagtaattggtccatcatggagcagaaccctttgcgtggatttagagtagttagagtttcaccacttttcaaactgatatggagattcttagtggctaatgaggaactgagaatctttctcagccttgtggttaaattgctatggccacgtcagttttgttagtgaaattagtagattcatgtcttatcaagtttctggcattgggttagcaaatgatccaaccttgagtttaagagttcttccaaaatcagttacatatacttttacagaattaattcgatgaacccatgctttattcttttcctatagtagtaattttgcaatagtataagtcactttgtaattttgtgcttgacattttaaagttctagttaagtggccttttccttttctgatacataaacagtttaatttgaatttagtgcctgagaatatgtaaggaagacaagtcactgtaattaagtagataagctaaactaatcagaacacctttggaactggtcaaagaggttggccgtgaaatttgttttactctcccaaaaggcgagttgtcaccctcaaacctcccccatttctatcaatctttgccataaaaccctggaaaagtcccacgaaatgtgctggtgttgaaaatatctagaagaaaagctgaatttgatcctaggttgtagctttagattataacttgcttccgttaaagaaattagatccagtattgcaagttttggttataaaacctggaaaaaatgatgaaacacatgtggaactgcttctgttctctgctttttaggatctaaagtggtggaaccagtggggctggagggtgctgtcagcccccggctggtaggtaattagcgtggtgctagtaagcataaaaatcactgtacctttggcttttgtgcctcatttgtataagtttatagtgaggaattttttcctaattaagtttcaagtgtactctccttctctaaattgatactaaattgaacacgtatctatatgcaaattgttgacctaaaaaaatgattagcccttctagaagtccccaaaatggagagctgattgctttattcttctatcattttggaagctaagtgttaaatttacagaaaagaaaataaaggataatgtgtagctggttggttttgtcaatcaaagtactttggagtagatcctaaggcctttatagataggtaatctcacttgcgatgtactcctttcagtctcattgcaatgaagcaaaagatacactggataagaatgtgttttgtgaacattgcttgacagtgaaaagtgaatgcaatttatccaacaactgagtggctttgagtgagtaaaagagtttatttaccttgaagactatttatatagtctcatattgtgctttgtattttgttgttttattgggtggggctcaacttttttcattaactcttttggtatgcagtacttacatgaatgtatgatctctttatggatgtcctatatgcaagtatgagactaataccacttttttagtctattactttgtatgtttgtcctgacttgtgtctgtcagtagcaacatttttgcagtctccagttaaaggaggaattgcaattttaaagtgttttggttatatgagtaaattggagaggccctaacaaaaattgcatgttgtttgtgaatttttgaattcattgtatttttttgttgcttacatgcttgttagagtatgttattcttgcacaagatttttctagctcctcattattaccggcacctatcttgttgcatgacttaacttcttgtgggcatgtatcaggcctttatctaagggccagcgtggggtggtgtacg

SEQ ID NO: 10005 - DNA, 860 bp, Eucalyptus grandis
  Intron number 3 from transcript Egrandis_v1_0.015692m (loc us Egrandis_v1_0.015692m.g) derived from phytozome v7.0 (c hr-ID scaffold_10; pos 4768830 to 4769689 reverse strand)
ttcccagtgaactatttcagagcagaactttagaggttgtttgtccacttgcttattattaatgattaggtgcatctacaaattttgtcttgatatgtacttaagtagctcaatcatgacatagttgtagtggcattaacttgaagcaccagagtaacaaacttttttattggtaagttttgtgaatctgtagttgttttgctgggtattttatttccaactttttttatcaaaaatatttgtctgtatctatgaatgattggtgtatctacagtgtttgaaaaacttggtaattgacctcatataggcgtgagtgataggacttatcaaagctgccgttacctcagtctacttttatcctgtaacttttcataaagttttatcgctatcctaggaatggatttgtttaagttaagtacaagtaaacattcttgcacttcatgcataaatagcttctgatatgaacatggtctcgggattctggaggttttaatattttgaaataatccttcatattcaaatatagggttcgtttattttgacttcttgaaagtaaaaagtaattattttgattttcctgccaaaatttaaagcaaaattcaagtttcaaaattttatgaaagtaaggatgtgaatttgtgtcaacatatgtataatagtgctcaagattagaaaaaatcaatatgcatgtgccccagtttttgaaagagcataaaaggtcaaaagtaaaagtcactccagacatactctagagaagaatgaaattttatccccttacatcatagcactgacgtagaaagggataccctttcctttcattgtggcagggcagaactgggggcgtgttgagaattcaaagt

SEQ ID NO: 10006 - DNA, 7468 bp, Eucalyptus grandis
  Intron number 2 from transcript Egrandis_v1_0.009784m (loc us Egrandis_v1_0.009750m.g) derived from phytozome v7.0 (c hr-ID scaffold_2; pos 57970652 to 57978119)
aaggtgagttctggtataagatatcagaagtataaagaaattagaaaggatggccgaattgtagttcttaccaagagttcggagttcatttgcatagttggtctttctgctcggtgatccctagattgttgactgaattatataatccttggttgcgtaacatatcttcccttgaatttgtttaagatgttgatttgagtgagttgcctgtaatgcttgccaggagagcgacggttgattattctggctgcggtatcttctaccttggctctgctactaattattgcattagctgctttcctcattaggaggaaacttgtcaggaagactagaggtaaatggcatttgatgtagctgttacatattgaacgatcttctcagcatgatatattatcttaccctgctctgccttctgcttcagaaaagaagcagttgggacttctggtggacgtagtgaacaattccaagcggaacttttcctatgaattgcttgagaaggctactagttattttcaccaatccagtaagcttggacaaggagggtccggctcagtttataaggttagccttcctcaattcctgttcagagttggcatgtcactcgtcatgctaacagataaatttttatttctctgtatagggaattttgcccgatggaaagcctgttgccatcaaaaggctggtatttaacacgacgcagtgggtcgatcatttcttcaatgaagtaaacttgatcagcgacattgatcataaaaatctagtcaaactgttggggtgcagcatcaccggtcctgagagccttcttgtttatgaatacatccccaacctaagtcttcatgatcacctttttggtttgtggcctcatctctgaatatttgagttagagcttttctttttcttattcctaactaattgaaatgatgaacatccaatttgatccagcgaaaaagaacgttccaccactaagttgggagacaaggtgtaagatcatcttgggtacggcggagggcctggcctatcttcatgaagagtcgaacttaagaatcatacacagagacattaaattaaccaatgttttgctggacaaagacttcacgcccaagattgctgattttggactagctaggttatttccagaagatgcgactcatatcagcactggtgtcgctggtacattgtatgtcacgtttcctttatcccaatttcacttgcctttgggtagtgcctgattagacatttatgggcgtcaaaacactagctttagagcgtgaattagttgagtttagtttaactacatcatgtttctgctgtgtgatgacgagaaagtgaagagggaaacagttaaaagcacggaaaaattcctgaggtgatagggtagcattgactgattgttggaagctggtgaaccacagatttgttcagatgcttactcaagatggatgcatatttctaatttacttgaacccttatataaatcgaatttgatttttgtaggggctacttggctccagagtatgttgttcgtggcaaattgactgataaggtagatgtctacagctatggcgttctcatgatggaagtactctctggaaagaagaattataccttctccgagagttcctgttccatcttacaaatggtaaagttatcttttgaaccatcactcaaacaaattcccgttattagattagaaacttatgtgagaacctgacactttgtcttgtaggtgtggaatcagtatggatcgggtaggctgtttgaagccatagatccaattctagaggggcaatttcaagaggaggaggtgtctaggttacttcaaattggtctgctgtgcgtgcaagcctctgcagaattgcggccatcaatgtcagtggtcgtgaagatgctgaaagaaagctctgaattacctacaccaacacaaccgccgttcctcaattctagtcgaagcacagaatgcagtaggcacatgagcgaacctaatagttctttccacttgtcagacacccagtctactggcaatgcaacgatgaccgagagctggatcgagcctagataacatttcgtttctgatgcatctctggctctgtctttccaaactatgttggcaaagcttctcccggtggtcacgtgccgactcaagttatgaaatggataattgacttatggaggttctggcgaggtaatatacgaacttcatgtcacgttccctgattcattcagatgccactagcagtttgaggatgttaccgtacacattctcgtcacaataccaaatagatctatttccccccgccatataactctaacggtggagcttcctcttaggactggtaattggtgttaacatatcataatcatgtttgtaattcgtgtcagcatataaagttggctaaatcatattatgtattcaagttttctctttagaagtcatgttttatcccatgttgtgtaaatgggtcttgtccgacattgctaaccctattcatcttcttgtttaatacatcagaaagatttccttaatctctcgcacgtgatgatttcaggtcactggggttgatcaacggaatgaccggagcaaggggcaacgtcggagccgtcctgacccaagtcatattctcccagggatcgaggtactcgaaggagacgggaataaccctgatgggcatcatgatcatatgctgcaccctcccgatcgccttaatatacttcccgcagtggggcggcatgttctgcggcccctcggcagggaagagcgggaccgaggaggactactacttgttggagtggagcaccaaggagcaggagagcggcttccatcaagcgagcgcgaagtttgccgacaacagccggaggaagaagggccggcgattggtggccgccgctcctaggagcccagatgctgagagccatcctcctgtgcaggtctaagtaatactctcgaggaagtcaccctcgtcactgcacatctagctttagagttgttacgcagattttcaagcacataactcttggtgataataaagtaaatctccgaattgcatggcgtgaatttgaagctaatctgggaattcatataacatgtccatgtctcctgtggtgaggttagtttatcgacgtcgacatcagttcgctagatttaacatcaacattttcttctatcggtatatcggtatattattgcgcttatgaatggttatcgatcaataatataatagcaatgaataatacatcaaaaaaagatgttggggatttcatgagaagaataatagcgaatacatccagataacaattgtgttttgtttagcaaaaaaaatagggtgaatacccttttggtacacatgtgataaatttatcccaaactatttttttaaccatgaaaattttcaaaccggtatacccgtgacaaatttatcccgactaactataaaaaactctaaactgatacatttatgataaatttacccccaaactaatttattcaatcgcaaaaaacctcaaattagtaaatttgtgacaaatataccatccgctaacttaatagtttgactgtaaaatttaataaaaactaacagagggtaaatttgtcacaagtatactaatttgaggtaaatttatcaaaggtataccagtttgggatttttggaggtcaaaaaaatagtttttggtaaatttgtcacaagtgtaccagtttggggttttttaatatattaacccaaaaaaataaaatatattttattttggatctttgttggagagaataagtttacgataattgttttaattcataataacaataaatgtctaaacatttatacgataaaggttaggaaattatttgttgattttttccaactaaatgcaactattgatgattgaagatgatgtaaacttttgttattagatttgtgaagattatattcataatcgcaacattacctaagccgaaatctcatagaaatgcaaggccaaataggcccaaaaacattttaggtttcggccataggcccaaaacgggaacaaaggcctagatgagccggaagagaataatccaaagtacattaaattagatcatgtcataatgcaaacccttttcatttaatttaacatataagcatgtgcatagattgcaatctacatatgctatagttgactttggttacataccatataattgacttttgctaccaaaaaatgggcagcggaacaccaaaaataagatttttgtaattcaatttttggtagaaataacaatttgatctatttagatttattatgattcaggatatttatatatctatctatttaaatctattagaaaagtccacttttgcacagtaagccgaatttcttgtgaatgttaataaatagtaaaatcttttctcctttctaggaaaactttaagagaaaacaacaattgaagaaaagcctataaatatatttacataatccgttagacagaaaaaatgagtttgaccaaaataatataatgtaaaagaaaatattgacgctatgcataaagatattaataaataaataaaaggagtatccatactcattaattgatgagaaaaaaccacaaaaaaccccaaagtttattgagagtgacaaatttaccctaatttttttttgtaatacaaaaaccccaaaatttatcaaccgtgacatatttactctaaactctatgacataatggcattttcgtcttttacttttatttattttttcctttttctcttcttcttttttcccctttttttcttcttctctctttcctccactgaccatggcgggggaaaaccagactcaggcaagggctgcctttgccaatgtcgggcaagggcaaccaagtgaggaatgcccttgcccaacgtcgataagggctgcccttgttggcctatgtgagggttgccctcacctgtgtcaagcaagggccaccctcacccacgccaagcaaggtcggccttgttggatccaaggagggtagccctcgcttgaggctagcttccctttgccatggccagcaaaggcaagatagaagaagaaaaaagaaaaagaaaattaaaattaaaaagtaaaaaacaaaaaatgccttgtagtttgggataattatatcacaattagcaaagtttaaagttttttgtatcacgaaaaaatttaggataaatttgtcattttttgataaaatttggggttttttcccttaattatttgtattgtacctatcaataattgttactgcgtaaatagtaaatttgctttgatttcatccatatgacacataggaaatttcaagattgagtaaatgttattcaaaagtgataattactttaaagaaaatgattggttaactgtatcaattttttttaaagtcctcattagactcaattatggtgaaaattaagctataagacatttgacaaggtcggagaatctaccatattgaatcattagtcaaaatgattatcattataaaatacaaaacccaagtattactcaagtaagtacactgtgtttgttttcacgaaaaatggatgatttataatttatttacagagtttcaataggcttaaattcaaggaatatcctttttacctattaactatatatttctatgtttgaattttagtattataattagatcccacctgggacttacgtcgcgtgtgaagctctccgttcatttattccacgtgtatcccatttgtccatgaaaggaagaataacacgtcgcaaattctcataatagtgaaatgaaatttggaccaccgatacgatgcacgtagtcatgcaacaatttcttgttccccccacgccatgtcgcgggccccaccctcccgctcgttattagtcagttcatcgtccagtctccgtccatgagtttcagatgtcgggaacggcaccgcgtaggagctccctcccaaaggtcaaacctccttcgaccgaacgcctctgtttttccagcgtcactttcacacgcaccgccccgagcaaagccaaaagcggcaggcagcagatggagaagaggaaagatcgcgtagtatcttcttcccccggttcttctctcgttcccactcgttccagtcaatatctgcccggggcccatcctcgggatgcctccattttcaacccgcaagctggccccagctccaactccagcaaaaacaggggaagggagggagagacagttgagagccagcaagaacccaccatccatccatccatcctctctcgttctgcatgcccctggataagttcctccaatgcccagaagcattccctcgctaagctgagctcctgtgactacgaatagctttgtcgttcctggcgtccgatgcactctcttccctctcccgcttccgttcctctccttgttttctcggcgctcttcttcgcggccctctgtttctgtgatccgagggccaacgaagtggacctcatatgcagcaaccggaccacccccctgcccgaccgccgggccttcgccaccagcttcgcggaggcgatggacgccgtgtcccctcagatcaacgcccagcaatacgcgtcggccgtgggcagagcgggcaacaacaccgtgtacgcgttcgcggagtgcatggaggacctcgaccggatcgactgcgacctctgcatcgctcgggcgaaggtccagatcctccgttgctcggccttacaacagggcactcgcggcggtcgtctcttctatgacggctgttatctcaggtactactctttgtgttctcgcggcggcgggctcggaaactttaaaaaggacggtgagatgtcagtggtaatagctgaagtttttgctctggatgattcgataggtacgatgattactatttcttcaacgagagtttgagtccccaagatacgacagtgtgtggcacggaagattttggagggaaccagacgatgttcatgaacaatgtcgtggagttagggaggaatttgagtttgcaagcgcccatcaatggcgggttctctgtggggtctgtgattcgtgggaatgtgtcggtttacgggttggctcagtgctggaaattagtgaacgggagcgaatgccagaactgtcttaacaatacggctgtgaggatcgactcgtgtccccccaaaaaggaaggaaggggcttgaatgccggttgttacttcatgtattcgacggagaagttttactacaacaacaccaaaccatttcaaataaatgaaggtgagttctggtataagatatcagaagtataaagaaattagaaaggatggccgaattgtagttcttatcaagagttcggagttcgtttgcacagttggtctttctgcttggtgatccctagattgttgactgaattatataatccttggttgcgtaacatattttcccttgaatttgcttgagatgttgatttgagtgagttgcctgtaatgcttgccaggagagcgacggttgattattctggctgcggtatct

SEQ ID NO: 10007 - DNA, 1125 bp, Eucalyptus grandis
  Intron number 2 from transcript Egrandis_v1_0.000456m (loc us Egrandis_v1_0.000456m.g) derived from phytozome v7.0 (c hr-ID scaffold_8; pos 53085358 to 53086482 reverse strand)
cctcctctgctcgtgattgctctgctctctaccaggttggtgtttcttgtttttgttttttgttctttttttgggttcgttcggcttgtttctcctcttgctttctttcttcgatgttggagatggtttttgcatcgtttttcggagcgttggttgatgtcgagtaatgtggtaaattcgttgagatgggttcgaagtcaacgaagtctgaaggtgttcttttcttgtttttcttctttcatctctgttcttttttttgtctgggaaaagtggatatcgattcgttccttgtttactgttgaatctgattaaagttgatgcttttgaggatcttttgtgaggccttttggcattgctgagtatctctcctttcgcgattctgttggttgaaattttcgaaatcttgcggcgaagagtcgaaagaagaaaagcgggtgttgtccgatcctaaagggttctgctttcaccaaggtttatcatcccattaacatctaaccattgaaaatactgatttctttgaccctgttgggatagagcatgcgtttgatttttttgagtattctttttcattgaaaatttcccccgaaatggtttccattgacctctttcttttcgcaatctgtttggtagaatgatttcaagatgcacattttgatttctccaacataattttggtctaattatggttcggactcagtaaaggatgagggtttcttttttttataagaaattttcgtgttcttctcatattggtgggttaattgatacttcttacattttgtttccggttcttgagaaagtggaaaacaagtgggcgtacggaattcattttcacatattggctggtaaagtctattggcggcggtgcaaagtatggttggatccctactctgtcctatattgaattggttttggatagaggagggcttccatattttgcatggcaaccaattagaccgagaagacaccattcaactgagttatgtacttttcgggaggtgattatggtggcagtttctctacaaaaatgaagtgctagaaatctatgcagtttcatatcagtgcattttttttcttttgataatcaaacagcctacttcattgtcttctatgcagggtcattcc

SEQ ID NO: 10008 - DNA, 986 bp, Eucalyptus grandis
  Intron number 15 from transcript Egrandis_v1_0.001408m (lo cus Egrandis_v1_0.001408m.g) derived from phytozome v7.0 ( chr-ID scaffold_1; pos 34461385 to 34462370 reverse strand )
cttttccttgcgtgatatttctctcaaagaaggaggtcatctactaaacttttatcttatgcattattcatggttttaccagacaaggattgatatttcttttcctttgtgatgacaaacagtttttatgtgcctagtactgtgaatgattgttcttgcaattgctgatgtcaaataaagggactagtaatgctcagatagactctatatttcaactaaatagtaacatgtaatgtctctcagcagaaccatcaatgaagctatagaaaattttgcttcgtaggttctctttagcatgcaagagttgttttgtttgatttacttaattataaagttttccagcggtttaaactgctggaaaatatttcgtgacttgctgtggctttgctagctttgatatagtagaatgctgttgattttcccatgccttaccatgataagattctagaattacttgatgtcaatttgatttgagaattgggtccctatgaggctgatcgtctcttcattacgggactggaaatgccatagtttcgggtcccataacttctttgatttctatgtttaaaactgataatttctgtctgagccaactaatttcactttgcatcaatttaaaattcttattctttgtttcctgaattgaaaaactgtagatgtctctgtgcctatgctgcgatgataataatcatggtaatcaggaggttcttttgctttcttcaggtcaataatttggaaaagaacgaaaaaggattcttttgtccatgttccgtatataaatgaaagagaagttaaaataccacagtaatggcttcctgtaacttttactaatcacaaagatgcagacatggattatgccattctaaaatgttggatttgaatgggctttacttctagtaagacacctgctgtatctcaatttaggtctggctcagattcttcattctgcaggaccattgccaccatcacgtcggaggtcccttttc

SEQ ID NO: 10009 - DNA, 641 bp, Eucalyptus grandis
  Intron number 2 from transcript Egrandis_v1_0.024092m (loc us Egrandis_v1_0.024092m.g) derived from phytozome v7.0 (c hr-ID scaffold_11; pos 36078391 to 36079031 reverse strand )
ccgaggaaggtctgggcgggcggccattgctgcaagtactgccactgaaacgggaacgggaacgggaaagaccgagaagaatctatgcaaggccccaaaaaaagggcaaaaaaaaaaaaaaaaaacagaaaaacgacgacgataaaattagagaggattgcaccgtttttacaaaaatttacaatcgggaatgataagagtgtgatttgatgagtctgtacagtattcgttcccaaagaattttattttctttggctcacccccccaattttctcacgcgccatggatgaaaaaaacacccccaagttctctgcatacgcagaccaaattctctgtgtccagccacttcgagcgttgcgttgcgtgacgcgtgaatccttccttgatttggcagttcatgcgtacttattcccgtcattaatttcgtgattgcgatttttatttacttcgatttgactgcgtgtcattggtagcttgcttgcttgtttatttttttcctttttaagtgatttctgtatcgtaattgattcgcttgcttgtttattttgtccaattttgggtgattcttctgaatcgtaattgatttgggttgccctgtttttgatgtttgtgttgcaggcccttgaaggaagagaagaata

SEQ ID NO: 10010 - DNA, 2385 bp, Eucalyptus grandis
  Intron number 6 from transcript Egrandis_v1_0.000003m (loc us Egrandis_v1_0.000003m.g) derived from phytozome v7.0 (c hr-ID scaffold_8; pos 58846394 to 58848778 reverse strand)
ctgttgaagcaatatcaaagccgaaagttggaaatgtatgtttgaagaggacctctggtctatttgatagtgtttttgttttttatagcagctccatgacctattgtctcctgtaattaacatctctgacaaggttaacatgtctggcatactttcatttttgcatgtatcatgtaccatgatgtcctgagttatccttcaaagaagaaattactttatgtacttgtagaattcttatgatcttcaattggacatctatcactgtcatttcgtttgaaatatgctcatgtgcattttctttggagctgaccatgatctgatttctagatatagttgttaagaaaggtatcactgagtggtttgttattgtcttttctttcattgaatggctacttgttaatttgtgatttcattattccatctattcttttcttatttgttgttcaatgcacatgtatgttatcacagtacttgggagtgattgtattgctgtttaggaatgtaaatgcacaggatgcctgcatttttcacattgaatatccataggagaacctagagatgattttcgtatctattttgctgagtttcttttgacgtgccagtgcaccctgaatgaagagttgctgtgcccctaatcatccttagaaaagattcaggaagccttgaagatttggattttgaattgtaaatctttctctagctcattgactgttcttatgtggcttggctgcactgatacgtctgacccaaaatcagcttagccacacaaaagacaagtccacccaaaattgaagtccttttgtgtgtgagcctacctggtttctcatctgctgacttagtattccttttacatcaactagcattatttttctttgtaaatggagcaatgttgtcaattgaatctgcaatctcttttattttctgtcgttttaacatgttaataaggacattaccccatcaaatagaccactgcagagcaagattgcagtgactagaaaaacaaaagcagaatcaggaatatggtggtttaaattagtggcttgagctgtaacatcctgtaattttttattataacagaatcctaacatatttaagacttaaccagaagttaatgtgttatctatctcaagtgtttaaagaggtttgatgatgcttttttagactttttgctgtcttttctgtaccatcactctttattgataaaacagtttcttctaaccgctgccttttggttttatgtttagtgaataatatgttggacgtgtatagagatatagtaaaaaaaatttcacttagaaaaaaaggctcatgtggaagattgcacaagaaaaatagaatgtaatgtaatgaaacgagataacttggtgcatatctagaaataaactatttgtagacagaattgtttgcagtttggcatttgtttggaaggctgagatgagcttaagttgtggcattaaatgaaaggaccagttaatttttttttttggtttatttatggaacatggaagataatgaagattcatgtccttttgcttgattaggcaatttaaactatggtatgaaagtaattaacaatgagatgtcaattatgttctccagatagatgattatagggaaaattgaactgaaaattatgttttatagagatcctatccattgtctgaatagggatatatagaccattcatcagtagagcctcaaacaggtcatggattgaatctgtccaggcccgattcctttacaaatgatatttaagcaggttgaattgcaggcgaagagactgtaatgttaagacggggttgcaacttcatagtacttttgttggttaaagcactggaatgatttttgagcattcttccttgtgtcgtggtgctccacaccagagtacttagtgttggggtccgtaaatttgaaagtatgaagatgcttgtgaatattttggttgccctttgaagagacaaaaggcttctccttatacaatctttttctccttttggacttatttcatgatatgttgactttttggaggcaataggatctagaacttagtttgcctggtgcgaacatgtgcctaccaatatgctaatgcattagactgaaaaaagagagttttagattcaatttagctgaatttctgtggctttggcagattaacaaaagttgttgcttaattaggttgcttatctgtttatatgcttgtttgttaaattatctatcactctaatgagatgctcataattggagctgcacttacgcatgagtgatagtatgaggttgatggatgtttttcccgttgatttttgcttatcttcttatgtctcactaaccttgcaatgaccgatgagctgacaccttcttcttttggcagacacctcctgggaattc

SEQ ID NO: 10011 - DNA, 5561 bp, Eucalyptus grandis
  Intron number 1 from transcript Egrandis_v1_0.026918m (loc us Egrandis_v1_0.026918m.g) derived from phytozome v7.0 (c hr-ID scaffold_8; pos 66300679 to 66306239)
cgcggcaagctctacgaattctgcagcggcgacaggtgcgcctccccttcgattccctctctctgtctctccgtgtctctctgtcgcgctctggcgattgcgagctagctcgctcgctcgctcggtcagcgtcgctcctcgcgctgcggccgtgattttttttcgagcttttgctgatgctactgctgcgattccggcggttgatgccgacgcgtcacctgccgtgttcgtttgcttacgattcgattttttagtggttcgttgcttatccgctttcaggatttcgtcctttttcgctgcttatcttttatgcactgtgcgtgtttgctgtctctctcggtccatttttgctttaaattcggggctaggtggattataggcctctgacccggtcgcttacgctattcggcatgggaactcgcgacattccttgtcatttctcgctcctcttggtatttatcttccttgtcatttcaaaccggggggaggaatggaagcgtcatgcaataacgaatctcgagatttaagcgacaagaaaggtggcttgttatctcatgttacagcgagcggtactttcgtcgttaaagagaactccgcaatggtcaactacgaaagaactgatgccatggaagtcaatttgtctttgtcaagaacctcgtgttcaaaagattcattaggaattttttgaacacacgtgactaactaaatgcgaggaagtttaggagtgaaaagtataattggcaattgtgatgacggaaagatgcaatattctgtgcattatcaaatgcagagtccacgagcctatttataggctttacagactgactatctaaagtaacatattatcaattaaaattaatcgggaccaattaagggaaatatacgaaatctcttaaatatatttctaacatccttgcaaacttaaagtgatttcaaagagtcaacttaagtttggaggaaagatcccaaaaatgcccaagtaaatgtattttggtgaagacatcaacaatctgttcagcagatgaagtagagacaagtcaaacagtgccatggagaatatgttatcgggtgaagcgacagtttacttcaatgctcttgatgcatttacggaatcgatatgtgctatttgggatagcacttcggttatcgcaatgaatgactattccattacactggcgtagtctcatatcttctagtaattctcatatcgtatcaacaagagttcgatattctgcatttgtactagagtgaaggatagggcctgttttttagtacttcatgagacaaatgaggtaccaaaaaagaaacaatggcccatagtggagtgacaatcttgaaagttatcagcccagtccacagcaaaataaactatcaactccaaagtagaacgagcaaaaaagtgagggccatgaaataatatccctattgaagtgaagaattcgaaggaccacaacaaaatgacttgtacaaggtgcaatcatgttcgaattaataatatgtatggtataggcaattttaggtcgagaaacagtgagatatataagactgccaactagctgccaatagggtgtagggtttaaaagaggagccccatctgtggaattaaatttggcattggtctcaataggaattgtaatgacatttttgttagtgatttgggcttgagagacaagattactagcatatttggcttgtgaaagatgaatgagatactacttgaattttaaatatgatcatcgccaataataactatattgtccacatataagagcagcatatacccatgaaatgtgaactgaacaaaaagagcatggttttaagaattgaaattgaaacccaaaaactccatggtggagctaagcttagaaaccatgtatgaggagcctctttgaggttatataatgctctatgtaattgacatactttgctagaaggatgagtatcagtaaatcactattcatgaatgcttttttaacatccatttagaatagacatgaaagcttgattgcgacaacaatgggaaaactatggatagaataaaggtgtgcaacaggagcaagtcttttcatagtgaactctatattcctgagtaatgccttctgccactatttgagttttgtaatggtccatattaccatatgcctttattttaatatcatatacctaattacatcctatatggacatatcgagaagcaaatcaaccaaaacccatatatgagatttgtttagggcctacaactcatatgctattgctttttgcctgatagaataagtactagcttctctatgtgcgagatacggaaagaaaagcgatggtaaagtaccaatggtagttgtgcagtgaaatagaaggttgacttattctagtggaacaacaatgttggtcagtgaagaaccatggatggagtagacatgttagaacaaggtagtatgcctataggacctacatcaagattagaggaagaagacagttttagagaggaagattcacaagtgaacagaggtgtgatataatctactgaattgttggtgaagaagggaacatgagtcgatgattgtagggattgaaagatgaaaatatcttgtgttcccaataggtaacatggtgggacacatgaaggcaattagagataggatccttacatctttactttttgtgctcaggtcatacttaaagaagcaatgtaaaaaggcatgagatactaactttgtgcgttcatgtcaaagaagatttataaaacgagctctatcaaagacttgcagaagattgtaattgtggacactaccacacaatgttcatgaggagaaatgttattgatgggtacagctgatattatatttagcagtaagacaagcctctctagaaaattgttcgagacaagaagcaaagactagaagagtgggtgtaacatccaaaatataattatttagatgctactcaatcattttgttgggaagttcttgattaagaacaatgaactatagttccattttggaagaaaattctaagaaattcaatatctctacattcatgtcattatcattatgaaaaaccttgatatcttgagaaaattatgtttttatcatgacaaatgtgagtaaatttagatcaatttttcaaaagataaaaatcatgtataatgagaatgattattcacaaagattataaaatagcgagagccttccgtggtaggggtggaagatggtcctcagatatcaaagtgaataagattaaaaggagcatgaaaggaagattcactaagatcaaatggcaagatattgtgttttcccaattgataaggtagagctaaatgatgacttgaaatcaaagttctcaatatagaggaaaaataatgacctaactgagaatgcaaagcttcggcagcacaataagcaaaagagctaggagtattcaaggagatgaattcaaattggtatcccactctacggcttgtccctatagtctactctgtccatggattttgcacatgacaaccatgggagaagtaaacatgaaagccaagtttacataattgttatattgaaatcaaatttaggagacggtatgggattgttaggcatggataatacagatgttgaaatgttttttgcatgactgactctcatttgtaaattatcaattgtgtgaatggtaaaggcatgtgaagtgaagtttttgactgaaacaaattagaatatgaagtcatatgattgtagcaaatggagttaacaagtgacaaatgagaagtatgttgagtgatagacataataaatgaaacaaaattctcatggaaggcatggagataagccaggaaagccaagaacaaggacaaaacaattggtaaactgatgatgactagtaaaaacttaggtaagtcaataatcactacgataccatctcccatttaaacccctaatttgatctgctagctcgaacacttggatcatgtcaagaagagaaggtgaatgaaagaccgttggaatcgatcggaggacggacttgcatagtagctaagaagtttcaagataactgcacacctcccatgttgatcagatccttcttgaaccccccattatgaaagagaagctttttcctatactctagtagaagaaaggaatgaaaatcctttaataagagaatgacaaacaatctattaagagaagcctttgcaatagcagcagtggcagatgcaattgcatgtataccgcaatttggaggtcaattggctgtcttataagttgcttaggacatagttgatggttgttggacatcgaaacttctaatttatccataatacgcattttactagtttcaacatagtaggttagacaagaactgcgaagaaactggtatttgaagaaccgatatggagaaaataaggccaaaaattgactttacatgtggaaaatttgggaaccggcctaagattgccaagaatcgatcaaaaagttgttgaattgttcagaaagtgcctcgaaactgatttgttttgattgaattattggtcaacgttgatcaacgctcgaagtcaactccaatcgatggcggtggcgtaaggcggcggatgaagttagcatgcgggaggagcgcctggaggatggatgtcgaacatagtggcttttggcaacgtgtatgggtgcattcagtgggttttggcggcgaaatatgggtggctagcttgtccgacggtggggattctagcggtggtgttcgttttattgaaagaaaacccccaaaatgtgtcggaatagcattgaaacatgacgggtttaatagataagagaggcggggatgtgtgaagtagtgttcatcggttgtgtgcaatgaaattttaggatctaactcgtccgagggtagtgagtctagtggtaatgtttgttttctaaagcgaaagagtctcaaacaacaactacaattgatgattcgatagagaacgaaagtgacctggccaatatggctggcatcatgattacaaccgtggagaaacatgaccgatgcagttggcgttactatgaaatagattcaatgtgtgctttctcgaaaactaagttaagaattgtgacgacaaagaaatgcaatattctatatattaccaaatgaattagcgagcttatttataagttttataagatgactatctaaaatagtaaaatagtaattacaataaatcaggaccaattaataaaaatatataaaatctcctaaatatatttctagcaattatgacgcaaaatcaagctagctacttaaattaagctagtgatacttttgagtacaagttgcaagccattttcattatgtgaatcactcaagagcttaataaattcagaaatatagaacacggcataaattgcgtctgacattgaacacagccaaatttcgtttgtatttatcatttttctctagcaacctgcacttgaagtctctgaaatttttcttccaatcttgtgccaattatgttgtatttctttacatgttaaacatatttcctgatatttctaacaaagtaccctgctattgtagctttaccgacatcctcgagcgatatcagaattatt

SEQ ID NO: 10012 - DNA, 1965 bp, Eucalyptus grandis
  Intron number 1 from transcript Egrandis_v1_0.055255m (loc us Egrandis_v1_0.055255m.g) derived from phytozome v7.0 (c hr-ID scaffold_2; pos 39051868 to 39053832)
ggaatccgagaaagttgctaacgggtactttgcttccaccttaacttttcttttttgataagtaagtttttagggaatttaccaaaaaaatcttaaatctattataattgtatcaatgcagtcataaacatttttaatcagtcaaattatccctctgaaaatttgctaatgtagtcattcggtcgatttcaactggaaatggttaacgtaaataattttttattatttttctgaaatttttagtttttatttttttccttctttctttctttttttccttcttccactccggcctgggcatccttgatggagggtgacaggccacagacgagggttggtgaggcttgcctccgccgaatctggcaagggcgaccttgttggaatttggtccttttgaagaggggaggccaacccaaactgaaatcccccaaaaaaaaaaaaaggaagaacgtcagaaattgggaatccatgaacacaatcattcgagaacacgattacatttgcagaataattggggatgtcgcaagcgaagtgattgagggtgaagcattgtccttctcttccacagattcgcttccttcttcgccttcgactccactccacctaccaaaatgggggacgaaaatggaatcaccacttcgtcgccgtcgtcatcatctcactcttttttgtgtctgtctttgtcctcaaagtaacggttcctctgctccgttgcatccaccggtgccactcgtgccgtccagtcgaagttcggcagaacgttctggctgctggcgaacctcctcatctgacccaacgacggtcctctcttgttggaaaaactctcgttctctccctccttgcgattctctataggacccattagaaggaccagattctggcgaggtcagccctcatggcgaggcagtcctcatctatggccagtgaccgtagaaggagaagaaaaaaagaaagaaagaaagaaaaaacaaaaattataagcaaattcaacaaggttcagaaaaaattataaaaatactccatgtcgatatcaacaatgcctcgtagaacggcctgtgtccgtgttagtgattttagccaaagttggccggatgaactacattaatatattttcaaaatatgtagaaataaattggctataaaaaaaattaaaaactgaattaacacaattataataaatttaattttttttagtaattagtctgaaaatttttctgttcatgcgaaacagatgtattatagttgcctccaacagagcaaatatcaaagaaacgacaacccctccagccaatagtgtcaatcaccaaacaatacgcttagaaaggactcgaatgctcagtatttcaaagctttatcaccaccggataaaatagacctgctcatgcgaatggaagttggctcaggtgaaaaggaccggacacttcacatttaccatgtctagctttgatttccactattagtagaccccatcgttagccatttgtaaatcaactataagtcctcgattttggcacgtgagatgccctggccttagagtggagtaacatacttttctcctaaacttctttaattaaaacaaaattgaactcctatcaatttaactagcagcaatcttaagccttgtaacaaacattacactgctaaagactcttaacgagccaggtgcacagccttattttctgtcaacaagatccatctagcaaaagagagaagaaaaaatgaaatgaccgctggccatcatcccccattgttatttgtaaaaccaaaacatcttgcattttaattggtcccatccattcttcacgtctgtcagtgccttttgatgagattaagtataatcacgaaattatcagtgagtttttttgttggacgggcatgaaggagaattagtgaaaaaagttatcgaaaatgttctaagcaagttgcgacaagattttcagtcgttgtttttgttgtttgacaggc

SEQ ID NO: 10013 - DNA, 2042 bp, Eucalyptus grandis
  Intron number 1 from transcript Egrandis_v1_0.013266m (loc us Egrandis_v1_0.013266m.g) derived from phytozome v7.0 (c hr-ID scaffold_5; pos 69895387 to 69897428 reverse strand)
acaaagctgctgccaacacctatccctatatccaggtaaagacaatttggactattcagttgaacagcttagttattggttatgctagtactccttaatcatccaacagtttggtatatcattatcatgttgatgacttcactgggatctgagttgctcttttcctgaagtgcattgatgtcattgacaagttcttgggaattcgttctattacttttccggttcatcaattaaggaaaagctttatagtaaagacatctagtaagaatgaggttcgcatatgtggttgtgtattttatgctctagtcaaggcgccttccatcctggttggcgcctttctaggtgtaaagacttaatggtggggttgtcaaatgatttttagagtctctttgtttcaagcttgtgtttgtagaaaaagtgctttgctctgggaatagttcattgaaaatgaaggtgacagtttcagcatccaatgtgtggtcggaaatgaatctatttcctcaaagaggtatcgagattgttgatctggtagacatgtggtagaggcttctgactcccagcggtgatgagggcactacgttgattgtgggccatgggccacaattgttaatttagttcattaagaaaacggaatttgaaaaaagctcaagagaagattttttaggttgcaacgcagaggtatacgaaagagaggtggaaggtggtgaagaaagccacgaaatgggaccttcattaagaaaactacttccactaactgactttttgaactgtgccaaataatcaatgagaaaattgtattcttctgattttgaggttagaaatgggaccttttacctttagtttgctcatttaggtaaacatctcggacatttcattttaacaccctttgggctgtccaagatgactctgttgttaccccgatcaggctgttgtataaatctctggcattaatggcatttgcattggaacaattttgcgtttctcttttatttttcctttatggattggattagactttgcctagatgcccaaactaaacaaggacgataaatatgactataaagtgcaagcagtgaccgtataacagtaggattgcctatataaggcaatttttgaactatcattgctctacttgattcacttccttccctggaaactgaggtttcccttctgacaatacaatgactgccctgaactcaatatttgacttgtggagatatagtaggagatatttttttattctagggctttaccatattggataaacagctttggattttaagagctcacggtgcagtttccaataatctagtctgtctattgtcagcactagtgggtattccacaactgattctttagtctctgtaatatcagttaactaaacagtattcttatagatatttaacaaatatgttccttttactttcatgttgcctcaccatactattaaagaacttgtcagatgcttactttgtaacagcacatgctgcttggatgattctttgctgtcgcattttgtttgccagggtttctagcttctctcactgtatttgcaatgaaatagttaatgattggtggattgccattgttttggaggcaccaataactgattactgttatatacaacagcaacagttgaggcacttcataaagttcgtcttggacagtgctttttggaattaattttgaatataggctgctatggaggacttcaaagtggtgttctcgtctatctttatggtttcttgatcttatctggtcatgaccattaatacagaaccctattttttgggaaaacatcttttagtttagaacatgcttaaagtagttttttttcccagaaactgagcatcgtcctgcaattaggaccagtttcgtttgaccagggattttcttcccccttttgttcaaagtgcataaacatctgcatacatttagaggcatatccgagtctcaatttgttttatcatatgggctgccttgaatgcatgaacatttgttttctatctgtcaggtgaaaaatcccactgctcgcatcgagc

SEQ ID NO: 10014 - DNA, 1301 bp, Eucalyptus grandis
  Intron number 1 from transcript Egrandis_v1_0.034004m (loc us Egrandis_v1_0.033981m.g) derived from phytozome v7.0 (c hr-ID scaffold_4; pos 37725877 to 37727177)
accttcagtccaccagcatctgcattgaccgccccgtaatctctctctctctatcgcgttggtattgctgtacgaaaattcgtgatgggctcattcccctccgtccaattcgtctttttttccatgctttttttgagcttgtaatcgcgggtaggtgccgattcatcgccgctcggaccattcgtgtcgtgggtctgcccttagaaattgtgggtccatggcgggattatccgccgtcgcccgaatcgaaactggttttcattgctgggctgtagaaagttcgtcagttgaaatgcaagatgtgggttcccctttgattgcctgctttcgccgcgtatctatcgtgccggtctcgggcagtgttgttggcattggattggtcataagggccagcgaaacgtttctgatcacggggagcttatggttgccatttgacgcggctaatgtgaatgttattttcataggttgcgtgctatttagcctgcggggcgcgggttgattttgttaaactgcgcttggtcgttgactatgattgggtgattgttttgacttccgttggggcgtgcttggatgaagttcttttttggctctaaggtgaatgttgtcatcatcaggaaactactgtgccccacgaaatggatagtctaggatgattctgtattctcctctctttgttgtaggtatggtattgcctttgtatgctaatggtgaaataaatgatatgcgcattgctggaagaaagatagcctcaaagcaaatcgaatttatacttgagacgtgtgtgtattctgctgagtaaaagattaacctgctttcattgttataaatcagatagcatgaaagtcagagattgaattgtgctagattgaaattgtggactgcatgggctacctcttctgatccctttccatgctgaggcagcttcatggtggccaaaggccaagactagggatgctatgtttgaaatttggatgtccttgcatacttggatttgaagattgtgactatgatttccttcataatttgaatatgctaaaggtttatttttgcaaaatatttactgcgcttctgtgtttaccttatttaggctttggaaataggattatctttcgtgcatagtccttgtaactggtgactaaaatatatcttttttcttagtatggttgtttggattctgagttcatgagacattccaccaagagtagtatcagaattagttgctgaaagcttatggtcacttgctggccatcatcgctttatttgcagcttttagcttcagtggaacaagttctcgaagaaac

SEQ ID NO: 10015 - DNA, 890 bp, Eucalyptus grandis
  Intron number 11 from transcript Egrandis_v1_0.002225m (lo cus Egrandis_v1_0.001705m.g) derived from phytozome v7.0 ( chr-ID scaffold_10; pos 6640465 to 6641354)
tgcttctgaactttcggaaacctacaaagcaacaggtcctcccattcttttaattaagagatttatcatacatctatttctttagaatctgatttgcactatcatgttcaatgcacttaacttggtgagcttatttgaccatctctcttttgaactaccatatgcttctgaacgttgcaaacctacaaagcaactggttctcctgttcccctttggtgaatgaaattatcatagagttagtcatatcattttcgtaggatattattgatgttatgatgttcaatgcaattagtttgataagcccacttggccatctcaataactttcatgcatttgatctaattctaatattttagttcatttgaatttgtgtggaggtttcagtatgtatctaagctatccctaatagctagaattggtgctctatttttgaaatgaagaacgtaagctatttaacttggctagtagtctcataatattttttggctggtaaatgtattcttgctgaccggtgagtgtttggtgcctgctgctcctttgggattaagtttcctaaactcaagaaaaaagtctcttcaagtgaacgagaacttaaaatttgtcttggccttgataggcacgcaatctaaataaaatgaaatataattgttgcattttttaactttaaggtgacttgttgtattgggtattttggtgaattttttcttcttttctgttactattgcttttccctcgcagacactgttggcaaccttgcaacacaatgtttgtatcctatgtgacgatcttagctctttgttatgatttaatctttgtcaggaagggcctatttagtccaaattgctatgagtttctaatgcattttcattctttatattttcatctgatag

SEQ ID NO: 10016 - DNA, 2011 bp, Eucalyptus grandis
  Intron number 2 from transcript Egrandis_v1_0.002459m (loc us Egrandis_v1_0.002459m.g) derived from phytozome v7.0 (c hr-ID scaffold_2; pos 25529241 to 25531251)
ttggccaaggttagcttaaaagaacctttagctttctatctattccttgttgagacgggcattcctctccccccttttattatcaaagaagtcacaatttctttttgcgcgacattgtttcattggcttggaagtagctaattcaatgtgcctaagtaaattaattgtggctctgatcactattactatagttacatatttgtttttatggcttggagatgccttggcatcatctctaatcctctgttgtttctatggccttttgtaacattttgatttaggtgagaactttggtattgttgctgcaatgccaaaatatcataatgctgtaaactgttaggcacacaccaatgaagatatgtaggtgagcaatattatgcctcatcacaaaattaaggataccaaatcttcctgaagctagccaaaaggtttaatctttgtttaactaacaaaatcatggtttagacattagccaaaaggacatcttttggcaaaactgaaatctgaattattgattgactttgattaagtgccatgtctctgtatggttataggttcttacatcaggaacaatggatatttcactctctaacttgattgattcaagagaaacagagggagaaaatcatcattaacaggaagaaaataaagagaattggcaacctaatagatatccaggagaagttgttctgggcttcatgatgctctgctattcttcagtagtcatacttgttttttctgggcaaaatgaatattcactgtgcgcttcaaattctgtgattttaactacaaagatgagaaattttggttgatataaagggattgaacactctatggacaacttctaacatgagcgcaatagattttcttttgctgagacaattcaccacagcttgtaggccactcaaggggtgatatgctgacatctagctgttcttatgcattggcagcataaactcaaaagtgaactacctctcattgcaatttatatgagaaagctttttcttttgccatgcttggacagcccttacgatcttaatcattatagaaaaagccccttgggagcctagggcactgttagactatttaattgttctattgcaaaatataagtgccaaagcttgattttttcatttgccacatgaaatgtgacaggcataccttctataactttctttaaagctaaatttttagagtttagttccctgagtaggattaaggtcataaaaaagcaggtgataagatcagattgaggattgtaagttccttctgaaaatttgaaattttatctccatctcatctttctgacgaggggaaattttttttctctttcatccatacacccggatatcaactcttaattaactgttagtggtagctcaaagatagaggtctcatttaaaagaagtctaggagagtacagtaaaaagaggcattctaaagcagcaccaatggagtgcacactctaatcttgccttttagaaatggaagaaaatctaactcacttttataaaacacgatttagttggagcatcaatggtggactacacatggtaaatcagggaccattccattctagctgtgttcagccatgttctgcatgccaggaaatcgtgatactgtgcaatttacattactgatgtatttgcttatcatttgagaaaagtagaagttcttttagctgttcatttttcatcccaggttatccatctcgtgtcatctgtataattgccccagtttttctttctgtaattttaattgtttacccttatctcttgtatgttctgtcatcctttctctcttacactttcgggcatcctttctcttttaatttttgtcatcctgcactgattgtttggcctcatgaaggttttagtgtaagtgttctcatctgttttaagtttgactgccaatacaagttaataaataaataactgacatgtttttctttttcttttttactttttgtcatctagacccttatctcaaccatctgattcatttggggaat

SEQ ID NO: 10017 - DNA, 7767 bp, Eucalyptus grandis
  Intron number 8 from transcript Egrandis_v1_0.010783m (loc us Egrandis_v1_0.010790m.g) derived from phytozome v7.0 (c hr-ID scaffold_9; pos 7814193 to 7821959)
gggaactggagggtgtgaagatttcagaacctcaggtactaaatctgagattgacctggcataccaactaatcattcctctccagtcttcctctgtccttactctgttttgctgtttctcatcacttttcgttgcaatcccatattccacttgcttctatgtgcagggagccttctatcttttcatcgacttcagctgttactatggagttgaaattgaaggcttcggagcaatcgacagctcagagtcactttgccgatacctgcttgacaaagcccaggtatggatcattcaagtgctcgtttatcttcctctagttgccgggggggccaaaaaaaagaaacactcttgcagatgtgtttgtaccggattcctatgtcgcccctctccaaaatgttaacatctgaaatgctgataagatataacatcctggtgccgtttccgattaacttttgggtaactttctgagcaccattttgtataggtcgcgttggtcccggggggcgcatttggggacgactcttgcatccgcatctcctatgccgcttctctcccaactctaaaagaggctttcgagaggattaagaaagcacttgtcacgctgaggcctgctgtgccggtgtgatgatcgcagagttgtcacagcatttacatgaagtagctgctgctgttgtacttcctgtcataatcatttggtcagatagacttcgttgccgtaatccatttgttgtcgtctctacttgttttcttaatcataattagtaaagataagaagcatgattagatgcagatttaagatatattatctcttaagtgtataatcgcatttcgttccaaaagaaaatgtccatgtacattgttatttcaaatttatcactcataagtgacattttactgtttgaagttttattcacctcttgatacttcaaggaatggacttttcaatggaaaatccgaaaaagagaggagaaaacagttgccgtgcatcgtgtccaatcccggcctttgtcatccgtaccattattatgggcaaggttaaatttttcattcagcttatttgacaaaaaaaaaaaatgattactttcgtcatttataaaaatgaataaatggaagccatttttgtgacaaaaatgtttagatattacttatcaccgttaatgaaaatattcagagatatcaatgaggatttcaaaaaaaatattatttaaaattttcatttttagtgaaataagcgaaacccagtatctcattttgatttttagcagaaataaaaattgtggttccttttacttccctaattcaagcgagactaaaagcgtgtgtatatatatatataatcaaatcatatcaatgatggtaatatacgataagagtgatgattttagatttcgtgcaaatttcatccaaaatttactccttgaaacaaattcctcaatttttgaaatctagatttgtatatatagtcaaatcataccaatgatggtcatacaaatcaaacatatggcaataataataggtgtaagcggttttacgtttcgtccaagttttacctaggtacttaggaacttggaacctatcttttcataattttcaagatcaaattcaaggtctacctaggttatatatgtattcttaattaaatgattgcaatgaatcataatctttaataaacaatccagtgattacaattcatattcagacattttatcatcggaaataaaaatttagactagtaagattacccactcatcattggatgccatggaatgttgtgagattatgcaaagatatagaacaagaaaaacacaaagacttattccaaatttcaaggtcttgattcttggttccgcttggataggttttccaatttttggaatctaaaaccaatcctgcatattttaaaacctataaccggaattttttccactgatccgattctcaagttttaatttctacccaactccacttgaatgcaagtatagataacatttgtaacacattagatgaagccaagcataccttcaaatcattcctaagaaccagtttgcatatacgtgtgatatacaaactaaacaaatgattgcttcatgaaaaattctctttcgatattttacttaaaaatctctgacagttggaaatctgtaatcatactccctcctaacacatggttgctagcattggagttcaagaccagcctatactcaaattcatcttaggcaaaggaaatttctattagcactttaatggtgattagtcccagctcctctcgaataaactacttcaactacaaaatgggtctcctttttgcccatgaattttaaagttttgggatgtcgactttctaacggcataaaatagaagccggctctccaggaggatgactccacgttgcttagccaatagtaggggtgagcagcgatctagggtcgaccctggactgaccctggaccggcccaaccctgccggtcctggtccggttcccaaggggactgggtcggtccttggtcctgaaatttcaagaccaacactgtacgggttggtcgtcggtcctaagagttttgggtcggtccaaccctggaccaaccctatatattatattatattatattatattatattaattcttttatatattcaaacctaagtaaaatgtctgttatattatattatattgagatgttctaccaatagcactaatagtaatttcaatttaaaacttttgttgagtattaattatgtgtcgtttgttttgttttcaagtgtttagaagttcaagtgaattaacaatatgtgaagttatatattcatggtttatattaagtattttgaactttttatggtttaattgtattttactaatgaatttcaactgcattttgctttttaatttgtgtcaaatggtagaagtttctgaagagtagagtagtactgcagttgctacggtgattttctagtcaagtggtgtgaagctcattttttggttgagtggactctatatgatcgaatgcaagaaaacacttttgcatatggtgttatgaatattaaagatagatgatcacaagaactttctatcttgtcccatatctcgatgagcggttagcatgtacaaaatttctattattgtgtcttcttaaatttgctaaatatgtattggtatttatagtttagttgcacaatgtcgcattgtcgatggatgtgtaatttgaatttgtaggtttgtttttttaggaagtataaaaaataaaacaaaaagaattatcgatcggtaccgggttgaccttgaaaccggaccaaacccattgggtcggtccggtccttggtccgaggctcaataggatcggtcctcagtcctaaaaattgagaaccgacattgtatgggttggtcctagggttagggggtggcccggaccaacccggaccatgctcacccctagccaatagtgctggtgctccctgacagtggcttttcacagtctctcacgcgcatccgaagcagcgacagcgcctccccaagttttctttccttccctttcagtttctctcccctcaggtacgtccaaattccttccttctgcttgtagctttcgctgggaaatttcgagttccgatgatgggtcggtggggaaacccatatcggctcctgttctgtctcgaagttggtttgatgctcgtgttaaatgatttggagtatgcgttgactgcttaaaaggttcaaagtttttagtgggattcgtattgttttgttgttggcagagggttccagtcaagtgggttagttcattcacatattagtttgctagatatcggatgcgatggcagttaagtcgtggcgaggccgaaattggtgatgtcatgtgagttatggcttatacatggcctcgggttgatcactatgagcctacgagtgaaagaaggaagtatgagcctacgagtgaaagaaggaagtaaagagtaatagggaatttgtaggaaaagaaagagcatattgtaatttatgctgtttgtaaatggtgtcgatgtgataacgtatgtcatgcatttttgtgataacgtatgtcatgcattttgttgcggtttgtgggtgatggaggttctctactgctgtttaagcagtatattgactattgaaaactttcatctcgccttattttagttgggttgctagatttcactgctgatgatccttttcacttgccaaagccgaagataatactaaggaaattcagctgccttaaataactgcagtggtgaaagcacaaggtggtccaggacaaatggatgttgacctcactctgagttcaagggtagatgctgtgaagccttgtaaaacattggctatacttgaccaggcgactgatcttttaaaagctggtgtacctgttattatgttagcagctggagaacctgattttgatacaccttctgtcatagcagaggtaaaatgctccgggtgccttaattatctgatatatataagaccgagtgaactgatattagtttctttcactttcgtttctaaggctggaattaatgctattcgggaaggctatacaaaatatacatcaaatgccggcacattggaactccgcacagcgatctgtcagaagctaaaaggtttttttctttgtttctcagttcattgccatctgagaggattgatcagtgggttgacataagtcctgtgcaggtcatttagttatgacaattactggttattgctttgcttattcatgctttctatgtctgtttttagaggagaatggcatcttatatacaccagatcaggttgttgttagtaatggtgccaaacagagcattcttcaggcagttttggcggtctgttctccaggcgatgaggtctgcccgttgcttatggaaatcattccagtgattatttatttatttatttatttattatgatacatgttcagttatttccttgttttaattccaattccataagttataaacactgaagagaggcaattttgcccattgttggcatctatgataaaatttgaacttttgaagtaaattagcagttgaaagcagctttaagccacttcttgtttgatgcaactttttctgataggtcacatgactttacatctgtgaagttggctgagtaatgacatcttggtcatgtagctttgtagtttgttatgaatctagctgaagatataattccatacttttattatcatatgctgttattgaattataaactctttgtattaaatctcgcttgatcgcgtattcatcctccccaagacacttaatttggtcacagcctatgatagagtatgtcatgaatggccgggcagggaagttccatgctttaggaatttgatttggcctactttaattctaatatcctcgcagttctatgggggataccattgggtttttgtttattaatataagcaatgctctagaaggatgtgaaattgtggtcttgacatagatctattttgcaggtaatgaattcatttatactttcattttgaaattgcatttaaaggtaatggctatatgttcgtaataagtaaaaggcatgcaaactctgaagttcaatagttgaaaatggtgagtgtgaagggatcgatcttattagtttctctagtgaagttcgagagagaatttccccaatccggacctaaccatcctccagatacatatcttgtatcactcaggcatcaaaacccttctattcagtcatccagtctaagcagcttctcattcagttttgatctaatgtacatgcattctgttagtctaaaccttctgcaatactcaactttttgctttgtaattttgcctgtcaatctcagacttgccacagttattctccctattctcccttatgaagaccccactgctattgtcttggccaatgcattggtttcgttagcctttctccttatatcatattgatcattcttaccatttctttcatccttgtctatgggtaaatcgttttttggcatctgtattgttttctctctcttaaataaagtcatctgaactttcccacttgcatgaaatttcctcgcctaatgccttttgtaggaactttaagtgctgttcttctaaatatggatttgtgcttttcccttgcgtattatggaccacattcttgtcccaggttataattccagctcccttttgggtgagttacccagaaatagcacggcttgctgacaccacacctgttattgttccgacaagcatctctgagaatttcttgatggactataagcttctcgaagccatgcttactgagaaatccaggcttctgattctttgttctccgtcaaatccaacagggtctgtgtaccccaaaaaattactcgaagagattgctaaaattgttgcgaagcatcccagacttttggtattagaagcagactaagacttcctttgtgcttcttttgtatgtttgattgagttgaccagttttggaaaaattccgtggcaaactcttcaggtactgtctgatgaaatatatgaacacattatatatgccccagctgcgcatacaagttttgcatctttgccaggcatgtgggagaggacactcactgtcaatgggttttctaaggtaattcgaaacctttccttctcgagaactaattgcctcctaaatttcaatctcataaaatttatcattttcatctagtttttgcttctttgctagcatatattctaccacaagtcctttaaagtatctgattttaaaatgttggaaaatctataggcgttcgcaatgactggctggaggcttggttatattgctggtccgaaacacttcatttcagcttgtgcaaagatccagagccaggtatagtgcagcatcaatatctaattttatagaaagaaacagtgtgaactgttgaagctgtcaatggaggttgcctaggagttgattggaatcaaacttgtagagaggaaattttatgttgatgaaatttgtatcatagtaagggcattggcttctgtcactcggggataagaacgccacaagtatcataactttcatatggcacttacttaaatgctataactttttttttttttgatcatttaagtgccaaattggtgaaaacccgctcatttgagtgaactttccagggattcaaccttcgtaattaatataaattttggctccaacgtggctttttaaaacaaaattgaagtccaatatggaaaattcttcgtctgatggggcataagtaaccaaaatgatcatcagttacataagtaaccaacatgttgaagtagacttgggatgatgcaagttgttaaggtgttagccaatttgtgtagcacaaatttttgaagtgattgcttactgattgaaattgcccagttctttgtctggcactatctatcagcactacacgaatggctgaattttgtttgacaaagcagtttacttcaagtgccagtagcatagctcaaaaggccgcacttgctgctttgtcaatgggatatgctggaggcgaaaccgtcgagactatggtaaaagcttttagggaacggcgagatttcttggttaaaagctttggggaactggagggtgtgaagtattcagaacctcaggtactaaatcagacgttgatctggcatacagactaatcattcttgttcagtcttcctctggccttcactgttttgccgtttctaatcacttttcattgaaattttgtattccatgtgcttctatatgcagggagccttctatcttttcatcgacttaagttgtta

SEQ ID NO: 10018 - DNA, 5463 bp, Eucalyptus grandis
  Intron number 1 from transcript Egrandis_v1_0.010346m (loc us Egrandis_v1_0.010346m.g) derived from phytozome v7.0 (c hr-ID scaffold_11; pos 15738438 to 15743900 reverse strand )
tccagctcttccgcggtgacaccatcctcgtcaaggtttgtggggttcacgcctttcgctgatcagttcgattatgagtttgacgtttgggtgatttgtgggtgtgttgtgttctagggttgcgttggattggcgtatcgtgatccattttttgagtgtggaatttattagagcttcgagtagagttttgtggtcatgtcatgtctggattttagtagcaatttttttttagctttgaggtcgatatgtgggtaatttgaaacctggaacctcttattgtggatttcgtgatattatctgagcttctgcagattttaatgtggttcgattctactgttttctctacactatgttgttccctgcattcaatgtatgtgcgaggcgattgaagcaaaagatctcttttttagctccggcagtcagttttaatgctatcatgctcaatgtcaacctcatgacttcattttattaagtcgcgattgagccatgcaagctagttagttacattactcatggtgattgaacatctttcatgatagaattctctctctctctctctctctctcacacacacacacacacacagagtacttgtgcacttgcacacgtgtgttaaattgctaaagagaggagatatgaggctgaaacttcatcttacgtacagaacaaccaagtcttttacaaaagacaaaatacataacgtaaaacacaccataactacccatgttctgcataaagcacttatcctactaacacctaaaaattaggataaccaacacacattatgactccactaactctaataactgaaaaaccaaattagcaaaatgtgcaaaaggaaataactattattttaacaatccctcccttaaactgatgtttactaacatttagtttaaagccttgactgttttcaaagtgcaaacacctagtaaccttttgagcttcacaaatgactccatcttgagggccttggtgaatatatcaacaacttgatcttcactcatgcagtagattagatcaattgttctatcattgctaagatctctcaagaaataaaacttcacatcaatgtgcttgcttcttccatgtagcacaggattcttggagattttgattgctgagttgttgtcacaaaaaaatttagtagctcctggttgcttgaattgcagctcctcaagaattctccttagccaaacagcttgacaagcactagctgttgcagcaacaaattcagcttctgtacttgacaatgtgacaattagttgcttcttgaatgaccacgaaatagcacctgtctcaaacataaaagcataacctgaagtgctcctcctatcatcttgatctcctgcatagtcattatcagtaaatcccaacaaattagacttttcacccttcttgtaaaatagcccaaagtctctagttccttgcaagtgacgaaagattctcttggcagctaacaaatgcatttgtgtaggattttccatatatctactgattaaactcatagaatacattatgtccggtcttgttgcagttaaatacatcaaactgcccacaatttgtttataaagtgtgctgtcaacctttctccattcatgatctttgtataactttaagccaaactcaactagagtgtttacaggatcacaatccttcatctgaaacctatccaaaatttctcccacatatttcttttgagaaataaagatcccatcatctgattgtaccacttctatgccaaggaagtaatgcatcataccaagatcagacatttcaaactcatccttcatagatttcttgaactcttcaaatatgccatcacaacttccagtaaatataagatcgtcaacatacaagcagacaataagcattttccctttatctccaatcttaacaaaaagcgtatgctcataaggacattttgaaaaaccaactttaagaaaataagtttcaatacgactataccaagcccgatgggcttgttttagcccataaagagctttcttcaatctataaactttatgctcatttccaatcttgacataaccagggggttgctcgataaatacatgttcctccaagtacccatgcaagaatgccgatttgacatctagctggaaaatatgccaagaattctgtgccgccaatgcaaccaccaatctgattgtgtgatgtcttgcaattggagaaaaaaacctttgtatagtcgattccatattgctgcttgtatcccttggctaccaaacgtgctttatatttgtcaacttcactattttatttcagttttgttttaaagacccactttacaccaatgattttttgtccatccagaagatcggatagctcccaagtatcatttctttcgacggcattaatttcatcatccatcgcttttcgccatttttcttctctaacagcactcttaaaagttgtaggatcatagtctgaaaacaatgcaaagtaagtaattgaatctccaattccaattacctcataatcttccatccaagcaagctttcttctaacgcagcgaacagattgggcttcttcttcattgacttcaacgcctgttggtgaaattccagcagctgtagaagttgtatttgatgaattttggggcatacaaggtgctgaaatttgctcatgttcagtatcattgtcataaagaacttgggtaggctgctgcctattccattcccaagtgttctcttcatcaaaaacaacatccctgctagtcacaatcttctttgttagtggattaaataatttatatgatttggatgcttcacttacaccaagaaagacacatttttcagctttgtcatcaagtttcttcattttcacattcgggacatgggcatatgcgatgcatccaaagattctgaagtgatctacaaccggtcttctcccactccaagccttttcaggtgtcatattctgaacaacaaaagttggacttctgttcaaaacatgaatattccaatttactgcttctggccagaaagtctttggaactcttcctcttgccaataagcttttcaccatgttgagaatggttctatttttcctctcagatacaccattctgttgtggtgtatatgcagcagtaagctctcttcgaatgccatactttgcacaaaaaacttcaaattctttttagcaatattcaccaccacgatctgttcgaagagtcttaatggtcttttctgcttcattttcaacacgagctttgaagcttttaaatgtggagaaagcttctgatttttcctgtaaaaaataaacccaagtttttctggaaaaatcattaatgaaggtaattaagtatcttttacctccattagaagatgggtttataggaccacaaatatctgaatgcaccagctgcaaaacatcatttgctctccatgacttttcttttgaaaattgagaatgatgctgtttgctaacaacacattcttcgtagacttgggaaggaacattaatttgaggaagacccgtcaccatgtttttctgttggagagtcttcaatccaccaaaactcaagtgaccatagcgaaaatgccatagccatgagggatctttcttttcagccatcaaacaagattaaatattttcaatctttaatggaaacaatctatttgaactcataggaacgactgcaatagcacctctaacagaatcataaatttcacaagcacccttctgaatggtgattacataacccttttcttgtaattggccagcacttaataggttacttttcaagtcaggaacatacaacacattagagattgtttccacaaaaccattcttggttcttatcttaatatcacattttcccatcactttcacaatagaatgatccccaaaactcacagtggaatgaaaatcttcatttagatgagaaaaagaagacttacttccactcatgtggttactgcagcctgtatccacataccaaatatctgactcgcgcttcttttcatcttgaacagccatcaacaacgtttctgcttccttttcttcaacaaaatttgaactctctgccttttctttattattaggtagcctagtataacattcagatgcataatgaccaaatttatgacatctaaaacactctatcttggatttgttaggatcccgtcctctgcctttgccttgaaattggtcattattggctttgaaattcctgccaacatctctatttcctcgatctccccttcctctacctctacctctacctctacctctaccccttcctctgaaattgttggaatgagtattggtagaagccttcaacgcttgctcatttactgttgaacttctgttcatcttctgttcatggaccaataaggagctttgcaattcatcaagagagaacgcatctatgtctttcgactcttcaattgaacaaacaacataattaaactttggtgtcaaggaacgcaaaatcttctccacaatggtgacatcgtccatcttctcgccatggaatcgcatcttgttgttgatttccattgttctggcacaataactagtgacagattcttcatccttcattgttagtgtctcaaaatcttttctcaaggcttgaagctgtgcacgcttcaccctaacagagccttgatatttcttcttcatagaatcccaaatatccttggaagtttctttgcaaagaatagtttccaagatgggacgatcgatagcctgaaaaaaaataattttttgtcttcaggtccttcaactttctagcttccaattctgctttctggggatctgtcaaagccatgcctgctggtggctcttgaattccagattcgacaaccgaccaatactcctttgatcgtaaaaaattctccatcaacatgctccaatggtcataatgaccatcaaagggtggaattgctggttgaacaaaattgtcggtggccattggaaatattgctgctgcaattttctcacgaaagtatctcacacctctaaaccttctttttttttaaaactctctcacgtttctctccggctctgataccactgttaaattgctaaagagaggagatatgaggctaaaacttcatcttacgtacagaacaaccaagtcttttacaaaagacaaaatacataacgtaaaacacaccataactacccatgttctgcataaagcacttaccccactaatgcctaaaaattagtataaccaacatacatgatgactccactaactctaataactgaaaaaccaaatcagcgaaacgtgcaaaaggaaataactattattttaacaatgtgatggcgttgtcccgcaatgtctgcacctctctgatgtaaaggacagtttttttttttatagcatgacaatataggtttcagattgtatgcaatgatttgtggtggtcttaaaatgctatcttcttttatccaggggaagataaggaaagatactgtttgcgttgcact

SEQ ID NO: 10019 - DNA, 1683 bp, Eucalyptus grandis
  Intron number 1 from transcript Egrandis_v1_0.005387m (loc us Egrandis_v1_0.005387m.g) derived from phytozome v7.0 (c hr-ID scaffold_7; pos 35501762 to 35503444)
ttcttgtgctgattattggtgattgggaatttgaactttggcataggatctattgtgaaattaacacagagactaatggatcttgcaattcaagtcatgcgagaagaagaaataatcagagaaatcaacgagaactgataaggacactagagatctatgtggttcggtccgagtgtcggatgtgaaaccacaggtcctatttggatttggaattcttacttggatcaggtttcttttatgggcttaaatttgagacaaagttgaacaggaccatcacctatctcttgtccagaccctaggattctggaggagtaattttaggacttcttaagaattatgagctgtttcaccatgagttgacaatgaaatttcaacatcagttgaatacaacaatctggtacctcgaatttcaatttgcatttcatgagcaagaaaagagaaaaggcagagcccaattttgtccaaagactgagggttgatttctacagctgtctcacttattgaagaaatttattttttagacaccatgtcaaatcccagcgcatgacatcaactgctggtaggttcatcattaaatgtattattgaagggaattatgtgccaatgtcgtgactaattcagtcattcccaccattcagtgtggagtgcagaatgctggggctggtctgaatgctagacagcatatgaatgggtgcaatattgcaggtactttctagcatatttgtctacctacttagatatagtcggttatcttaaataaaattatttgctaagtagcatgactgttgtagataataatggatgtgttttaagtaaagcagttcatgagcctttagcggggttggggctattgtggcttattcatggtttctccttgcccaaccttgctcaagggaaatgcatttccatacatgtcctgcaagaattgcaattattaatttgtctttgcactgccttgcctttctttttgttttccttgtgttagctcattatattaaatgagtatataccactgatgacaatctcattttaggccctttcagctcagatgatacaaaggccagagtaatttctgcaatacttaaatacacagaatcagcaagagtaaagtatttgattggtctatcatagttcaagcaataccgaaccttactttatcattcacaaagaaaggcacctttgaacggacaaaacatcatcttatatgttaatgcatattagttggacaggagatcattcttgtctagcagatgttgcatttaatccaagtgtgagaagcatttgaaacatgagtatgatttacaatgacaatggtctttgtagtttgaaaacatacacataggtataagtactcatgtatatatctttgattttgtgaaagacattatagatatgtagaatctttatctactctatgcaagctcaagtacataatcttctatttactggtatacaatcacataagggtaaactatgcaatagatgatgataggcattgttatgtaggtgcgtcatctaatgatactagccttgtgattgtgacttcagcattttgatatcctttcaaatttcatcaccctctgattttaattaaacctgattgtgactccacacccccccactgctgctgtcccatctctctctctctctctctctttcatgtgcacactgttagaggtggat

SEQ ID NO: 10020 - DNA, 5066 bp, Eucalyptus grandis
  Intron number 4 from transcript Egrandis_v1_0.000997m (loc us Egrandis_v1_0.000997m.g) derived from phytozome v7.0 (c hr-ID scaffold_7; pos 12030702 to 12035767)
gcactccttcccttttccctccacaggtcagtctctcaaacaaatgcatttttggcatttcatttgaacatatttgtttgcgtataattggacaatgcatgatgtgtagacaaaagtgctagatataattgtttgtaatatcaataatcatgctttgctcaaatttgacctgatctcatgtttcataccttaacaaagatgatcagaatatttgcctcaccacaataatccatgatcacatccataaaagtattaatgcaaaaaaattcagacattgataaccatgtgcggttttaatatcatttaattatacagatctatgtacataatctagtaatatttacttaacagattaaaatttttataatcctcagcaaatataagtatcaattgtacatctccatatatctttagaagtgttatttatgtaagctcataaaatcatattgtgtgtagtacttcaaaattgattatagagggattttaaaaaagttatgacaataaacatatgaaaacatttactttttgcaatttcaactataaagaacaaaactgaaaacatagaataacatataaaaatggcaaaaaaatatgaagtatagcccacttcatattttcttacgtagaaacaaactggcgtcgttccattaaacatgaagaaaaggggaagagaaacttcataattagaaaagcctaattcacaaattgcgtagctattatagctcattgtaccatgatcatcttcccacatcaacaaaactggaggaattagagagaattgctcttttaatcggagtgctctaaacttcaataatgattagtgcaatgaacttttttatatcttaataatattcaatcctcgaactgggtcttgataataaaataaataaaaataaaaaggccaatatgcatgaagttgttcgtcttctttgtttgcaaattgtacttgaatcactatactccaacaacctatcaaattacgaacttgtatcatataataaatattaactctggattatcatattgagtgagaattagtgtgatattgcgcacaatttatgtttggcaagagaaaatgcagattgttttttccagaaaagaaatggcaaaaaaaaaggaaaaaataaaagagagaataggacagctggacaataaatagtagcaattccgtgggtggttgccggcattgtgagtcatatttcataactagatgataatatttagtcaaatgtcctagctaaaataaaaattaaaaaatttcggaataaattatccaatcaacaacactactgaagagaaaatattaggtgcattaaatacaccatgttggatccgtattaaatcatctacaaatggacatgtgctaaagctgggcccacctatcagttgaacgatcaaaatatttgctccccctccctccctccctccctccctctctctctctctctctctctctctctctctctctctctttccttctttggtggccttgggctctgtctgttgcagtgctgttacggtgcgctcactagacaaaggaaaacaagaaaaaagaaaacaaaaaaaggaagaaattagacaaagtctattcgatgattttagcttctcccactctaagaaatgttcgctctgagtcatttcgtttcaccttgatcctcctcttcgcgacgatgggaaaaaagaaagtgaaccaaatctacagagtcaagtaaccagtaactcttctttctccccctcatcctcttaccttctgtttttttggggcgattgattgggtggtctgtccaatggttgaatcggaagcttcggaatcgcttctctaaagctcgcctcctctctgtgcgcgtgcttccatgggttccgagtgattacatgaaccggagcttgttggttatggtgggttgaagtggatctccgatgcagaagcgatttcggcgtcgatttaaaaaaatcttatcttcagccctctctccctcctccttcgtccacagctgcccgacctctgcccctcctctgctgtcgccaacggtggagttaccggcgccttgattaggctgaccctcgctatgtccaagccgagcatggccggcttcctctgttttctccgtctcatcattctacagatctcgaaatctggccgtccatagtgacggagttgcagatctggaaatcgatcaccgtcgctcgtagccatggacgagccgctgtcgctgtagccatggttgcagatctggaagtcctgtcgcgagtaacgatggcttatggactgccattgtcccctccgttgacgcccacagtcggctcgtggtcggcctcgtccatggccggtcacaactgctcgtggtcgttgcccgtcctgatctggactggagtcgtgcctccagatctggtttcgcccatggacgcaagcctagctcatccatggctcacgaggagactcccgcacagatctggcgaccactgcttgtccatggctatgagccttgacggcgagtttgagatctcgacggctatggactgcgagatcaaacagcgaaagaaaaaacagagaaacagatgtcagggaagaatggccatggatgagagggccggagcttgaatgcggccatggatgagcggcatcatgaacgggcagaccacaaagacgacggagagggttggacgccaagcaatggtcgccttggacgcggcgccgggaactccgccggtggcgacggcggagggaggcgggaaggttgggctcaatgtggatggagatggagatggagaaggaaagtgaggtggattgagatttttaatatttagtcaatgtcctggctacataaaaaattaaaaataataggaattgatcatccagtcaacactttcattccgtctcatgaagttctcctcatgtgaagactaaacgcaatgaatgacaacctcctcccggcacttctcttttatgggtcgaatcctcaggcacttgaaaatgcacgatgtcgacccaaatatgattgttttgaccttcttcttttttttattacagcttccatgcaagttttgttttgttttttttttttcctgacggagggaatttttttttttattctcataattctgcgcaattctttctattgttttatgtgagtagaatgtttaattataacaagtatctacacatttgtttactttttaattgtaagaattatcattaattatttatttatactgtcatttgcatgtataagttatattttaataccaagccccgcattctaagaatatttcaaaaagtcattataacactcaatcaacaatactaataaatttgggaaagtatgaaaataatcatctaatcttttggtagtgataagttgtaatagcgttaatttcattttaatatcaaatatgagctgtcatatactaattgatagatttaaggaagtgtggaaagtcaattctttttttttttttggtgacaggtcataattgcattaattatattgtaaccaaatgaaaaatatcaatacttacttttcaatgaataattcattggaggtcatgatgtattaaaaaaaaatcttgattttctccatacaaacaaaatgcgatcagcgggtgcacacccactttttgtcaaggggtggatcactcggtacactgcaaggttctattttatttttccacctcaaatttgaataaatattatttcaaggatgttattaatggtccaatgtaaaactagtaaattgacccaacttgtgtttgctgagatcataacattatgttatttattcaagtcgttatgttgcccatgcctattaagaaattattttctttcaatacaaaaaatttccatgcataaaaaagaaaaaggttgtgaacaattgaagttactataatttttttttttatatcgggttcgccatataaatttcatgactcttctctgcagtgaattgtattaatttgaagattcataagtactgttcgcaatttagtatgaataattagcagtgctcatggtaaatagaggaaataatgttgagccaagcattagtttcatccattccttattcaatacatacactgcttaagttcttcgcacccactattcatatccttagttgactagctcatcatcaccatgcccttgctttttctctaattgttatgcatgttcaccttgaagcaaacaaatctaaaacataactgatctttgccaactaacataacggaaattttcagcttgtatcactgaatctaaatgttgctcttttcaatagttctatcggactgcctagcaagctccctaaaatttttgccagtcttcgtgcttattcattacaaaaatacaacttgtcatgcctccatggaaccaacattgttttgcgggattcatattatgttcttcttcgtctttgtcctcatttaattgcatagagaaacagttgagtgagttatcattgatgtttagtcaacggctccattcatgcattagcataaataggagggctctcatttctttctctttcaattttgcattgtaggttttcttatgctttagatgctcttgcattcaactggaaatagcgcctctctctctctctgtgattgtgacataagagctactataaaaaagaaaaagaaaaatgaggacttaggaggagggggattaggatgaagttgaaaggtacagaaccagtcttagcaaccatttgaacgaacccaagttccatgtgcataaggcctatcagcctaattcccggacttttaagttatcgctatgatttgccaagtaattaagaaaagtcaacattgtctggtcactccaaaatcttataaatgcatttataatttcatgtttgttgcaatgcattatctctagccttagtcttcaatcaacttgtataaaggcatcaatcaacccctctctatttatgtcactaatgagatcttgacttctcatgatttgtgagaatgagggaagtctggaaatttcttctttacggtcataactcaatgcaatcacattcattgtgtcattttttttctcaatatggcaggtacaatttcctcaactt

SEQ ID NO: 10021 - DNA, 7337 bp, Eucalyptus grandis
  Intron number 4 from transcript Egrandis_v1_0.009775m (loc us Egrandis_v1_0.009750m.g) derived from phytozome v7.0 (c hr-ID scaffold_2; pos 57971178 to 57978514)
agcttggacaaggagggtccggctcagtttataaggttagccttcctcaattcctgttcagagttggcatgtcactcgtcatgctaacagataaatttttatttctctgtatagggaattttgcccgatggaaagcctgttgccatcaaaaggctggtatttaacacgacgcagtgggtcgatcatttcttcaatgaagtaaacttgatcagcgacattgatcataaaaatctagtcaaactgttggggtgcagcatcaccggtcctgagagccttcttgtttatgaatacatccccaacctaagtcttcatgatcacctttttggtttgtggcctcatctctgaatatttgagttagagcttttctttttcttattcctaactaattgaaatgatgaacatccaatttgatccagcgaaaaagaacgttccaccactaagttgggagacaaggtgtaagatcatcttgggtacggcggagggcctggcctatcttcatgaagagtcgaacttaagaatcatacacagagacattaaattaaccaatgttttgctggacaaagacttcacgcccaagattgctgattttggactagctaggttatttccagaagatgcgactcatatcagcactggtgtcgctggtacattgtatgtcacgtttcctttatcccaatttcacttgcctttgggtagtgcctgattagacatttatgggcgtcaaaacactagctttagagcgtgaattagttgagtttagtttaactacatcatgtttctgctgtgtgatgacgagaaagtgaagagggaaacagttaaaagcacggaaaaattcctgaggtgatagggtagcattgactgattgttggaagctggtgaaccacagatttgttcagatgcttactcaagatggatgcatatttctaatttacttgaacccttatataaatcgaatttgatttttgtaggggctacttggctccagagtatgttgttcgtggcaaattgactgataaggtagatgtctacagctatggcgttctcatgatggaagtactctctggaaagaagaattataccttctccgagagttcctgttccatcttacaaatggtaaagttatcttttgaaccatcactcaaacaaattcccgttattagattagaaacttatgtgagaacctgacactttgtcttgtaggtgtggaatcagtatggatcgggtaggctgtttgaagccatagatccaattctagaggggcaatttcaagaggaggaggtgtctaggttacttcaaattggtctgctgtgcgtgcaagcctctgcagaattgcggccatcaatgtcagtggtcgtgaagatgctgaaagaaagctctgaattacctacaccaacacaaccgccgttcctcaattctagtcgaagcacagaatgcagtaggcacatgagcgaacctaatagttctttccacttgtcagacacccagtctactggcaatgcaacgatgaccgagagctggatcgagcctagataacatttcgtttctgatgcatctctggctctgtctttccaaactatgttggcaaagcttctcccggtggtcacgtgccgactcaagttatgaaatggataattgacttatggaggttctggcgaggtaatatacgaacttcatgtcacgttccctgattcattcagatgccactagcagtttgaggatgttaccgtacacattctcgtcacaataccaaatagatctatttccccccgccatataactctaacggtggagcttcctcttaggactggtaattggtgttaacatatcataatcatgtttgtaattcgtgtcagcatataaagttggctaaatcatattatgtattcaagttttctctttagaagtcatgttttatcccatgttgtgtaaatgggtcttgtccgacattgctaaccctattcatcttcttgtttaatacatcagaaagatttccttaatctctcgcacgtgatgatttcaggtcactggggttgatcaacggaatgaccggagcaaggggcaacgtcggagccgtcctgacccaagtcatattctcccagggatcgaggtactcgaaggagacgggaataaccctgatgggcatcatgatcatatgctgcaccctcccgatcgccttaatatacttcccgcagtggggcggcatgttctgcggcccctcggcagggaagagcgggaccgaggaggactactacttgttggagtggagcaccaaggagcaggagagcggcttccatcaagcgagcgcgaagtttgccgacaacagccggaggaagaagggccggcgattggtggccgccgctcctaggagcccagatgctgagagccatcctcctgtgcaggtctaagtaatactctcgaggaagtcaccctcgtcactgcacatctagctttagagttgttacgcagattttcaagcacataactcttggtgataataaagtaaatctccgaattgcatggcgtgaatttgaagctaatctgggaattcatataacatgtccatgtctcctgtggtgaggttagtttatcgacgtcgacatcagttcgctagatttaacatcaacattttcttctatcggtatatcggtatattattgcgcttatgaatggttatcgatcaataatataatagcaatgaataatacatcaaaaaaagatgttggggatttcatgagaagaataatagcgaatacatccagataacaattgtgttttgtttagcaaaaaaaatagggtgaatacccttttggtacacatgtgataaatttatcccaaactatttttttaaccatgaaaattttcaaaccggtatacccgtgacaaatttatcccgactaactataaaaaactctaaactgatacatttatgataaatttacccccaaactaatttattcaatcgcaaaaaacctcaaattagtaaatttgtgacaaatataccatccgctaacttaatagtttgactgtaaaatttaataaaaactaacagagggtaaatttgtcacaagtatactaatttgaggtaaatttatcaaaggtataccagtttgggatttttggaggtcaaaaaaatagtttttggtaaatttgtcacaagtgtaccagtttggggttttttaatatattaacccaaaaaaataaaatatattttattttggatctttgttggagagaataagtttacgataattgttttaattcataataacaataaatgtctaaacatttatacgataaaggttaggaaattatttgttgattttttccaactaaatgcaactattgatgattgaagatgatgtaaacttttgttattagatttgtgaagattatattcataatcgcaacattacctaagccgaaatctcatagaaatgcaaggccaaataggcccaaaaacattttaggtttcggccataggcccaaaacgggaacaaaggcctagatgagccggaagagaataatccaaagtacattaaattagatcatgtcataatgcaaacccttttcatttaatttaacatataagcatgtgcatagattgcaatctacatatgctatagttgactttggttacataccatataattgacttttgctaccaaaaaatgggcagcggaacaccaaaaataagatttttgtaattcaatttttggtagaaataacaatttgatctatttagatttattatgattcaggatatttatatatctatctatttaaatctattagaaaagtccacttttgcacagtaagccgaatttcttgtgaatgttaataaatagtaaaatcttttctcctttctaggaaaactttaagagaaaacaacaattgaagaaaagcctataaatatatttacataatccgttagacagaaaaaatgagtttgaccaaaataatataatgtaaaagaaaatattgacgctatgcataaagatattaataaataaataaaaggagtatccatactcattaattgatgagaaaaaaccacaaaaaaccccaaagtttattgagagtgacaaatttaccctaatttttttttgtaatacaaaaaccccaaaatttatcaaccgtgacatatttactctaaactctatgacataatggcattttcgtcttttacttttatttattttttcctttttctcttcttcttttttcccctttttttcttcttctctctttcctccactgaccatggcgggggaaaaccagactcaggcaagggctgcctttgccaatgtcgggcaagggcaaccaagtgaggaatgcccttgcccaacgtcgataagggctgcccttgttggcctatgtgagggttgccctcacctgtgtcaagcaagggccaccctcacccacgccaagcaaggtcggccttgttggatccaaggagggtagccctcgcttgaggctagcttccctttgccatggccagcaaaggcaagatagaagaagaaaaaagaaaaagaaaattaaaattaaaaagtaaaaaacaaaaaatgccttgtagtttgggataattatatcacaattagcaaagtttaaagttttttgtatcacgaaaaaatttaggataaatttgtcattttttgataaaatttggggttttttcccttaattatttgtattgtacctatcaataattgttactgcgtaaatagtaaatttgctttgatttcatccatatgacacataggaaatttcaagattgagtaaatgttattcaaaagtgataattactttaaagaaaatgattggttaactgtatcaattttttttaaagtcctcattagactcaattatggtgaaaattaagctataagacatttgacaaggtcggagaatctaccatattgaatcattagtcaaaatgattatcattataaaatacaaaacccaagtattactcaagtaagtacactgtgtttgttttcacgaaaaatggatgatttataatttatttacagagtttcaataggcttaaattcaaggaatatcctttttacctattaactatatatttctatgtttgaattttagtattataattagatcccacctgggacttacgtcgcgtgtgaagctctccgttcatttattccacgtgtatcccatttgtccatgaaaggaagaataacacgtcgcaaattctcataatagtgaaatgaaatttggaccaccgatacgatgcacgtagtcatgcaacaatttcttgttccccccacgccatgtcgcgggccccaccctcccgctcgttattagtcagttcatcgtccagtctccgtccatgagtttcagatgtcgggaacggcaccgcgtaggagctccctcccaaaggtcaaacctccttcgaccgaacgcctctgtttttccagcgtcactttcacacgcaccgccccgagcaaagccaaaagcggcaggcagcagatggagaagaggaaagatcgcgtagtatcttcttcccccggttcttctctcgttcccactcgttccagtcaatatctgcccggggcccatcctcgggatgcctccattttcaacccgcaagctggccccagctccaactccagcaaaaacaggggaagggagggagagacagttgagagccagcaagaacccaccatccatccatccatcctctctcgttctgcatgcccctggataagttcctccaatgcccagaagcattccctcgctaagctgagctcctgtgactacgaatagctttgtcgttcctggcgtccgatgcactctcttccctctcccgcttccgttcctctccttgttttctcggcgctcttcttcgcggccctctgtttctgtgatccgagggccaacgaagtggacctcatatgcagcaaccggaccacccccctgcccgaccgccgggccttcgccaccagcttcgcggaggcgatggacgccgtgtcccctcagatcaacgcccagcaatacgcgtcggccgtgggcagagcgggcaacaacaccgtgtacgcgttcgcggagtgcatggaggacctcgaccggatcgactgcgacctctgcatcgctcgggcgaaggtccagatcctccgttgctcggccttacaacagggcactcgcggcggtcgtctcttctatgacggctgttatctcaggtactactctttgtgttctcgcggcggcgggctcggaaactttaaaaaggacggtgagatgtcagtggtaatagctgaagtttttgctctggatgattcgataggtacgatgattactatttcttcaacgagagtttgagtccccaagatacgacagtgtgtggcacggaagattttggagggaaccagacgatgttcatgaacaatgtcgtggagttagggaggaatttgagtttgcaagcgcccatcaatggcgggttctctgtggggtctgtgattcgtgggaatgtgtcggtttacgggttggctcagtgctggaaattagtgaacgggagcgaatgccagaactgtcttaacaatacggctgtgaggatcgactcgtgtccccccaaaaaggaaggaaggggcttgaatgccggttgttacttcatgtattcgacggagaagttttactacaacaacaccaaaccatttcaaataaatgaaggtgagttctggtataagatatcagaagtataaagaaattagaaaggatggccgaattgtagttcttatcaagagttcggagttcgtttgcacagttggtctttctgcttggtgatccctagattgttgactgaattatataatccttggttgcgtaacatattttcccttgaatttgcttgagatgttgatttgagtgagttgcctgtaatgcttgccaggagagcgacggttgattattctggctgcggtatcttctacgttggctctgctactaattattgcattagctgctttcctcattaggatgaaacttgtcaggaagactagaggtaaatggcatttgatgtagctgttacatattgagcgatcttcttagcatgatatattatcttaccctgctctgtcttctgcttcagaaaagaagcagttgggacttctggtggacgtagtgaacaattccaagcgtaacttttcctatgaattgcttgagaaggctactagttattttcaccaatccagtaagcttggacaaggagggtccggctcagtttataaggttagccttccccatttcctgttcagagtaggcatgtcactcgtcatgctaacagataaatttttatttctctgtatagggaattttgcctg

SEQ ID NO: 10022 - DNA, 1917 bp, Eucalyptus grandis
  Intron number 4 from transcript Egrandis_v1_0.026957m (loc us Egrandis_v1_0.026957m.g) derived from phytozome v7.0 (c hr-ID scaffold_3; pos 22285668 to 22287584 reverse strand)
acaacatagttcgatattacggcactgagaaggtgtgttccttctttctaagtttctttctgcagcatctttcactttggcatcaattatgatatgaccggaactgagcaaaatgtttaggtgaacatggctgtgattgcagccacaagatagttgtagcgtcatcatcactgcatgtttaagatcactgcatttgtggcttttaagcagtaacagcctttcatgaaagacgaagacattttagttccctctccaaccacaagaaaagttcgtgatgaattggctgttacctgaggtagtaattatatgagtaaagaatatatgcagagtagacgtcagtttatgtgctctctctctctctctctctctctctctctctctctctctctctctctctctctctctctctctatatatatatatatatatatatatataagcaattttttttccccatttaaagtgagactgtcatgtaatcaactctttgatttctagtggtagatgttttacgaattattcttcttgcaaactgaagattcaggtcaaactctcaggactaataaacaggaatctgaggctttgagaaacggcagccccgactaataaaacataaagggggaaaaatgataagcaagtgaagtcatttagttcaatagatatcctttaattgaccattagtcacctacctttcccccctcttctataactggtcgtggctgtagcaacaataatggagctcctctgcaaagctcaaattttccatgattctagtccagcgtcatttagttacactcctttttatgcaacatcatatagttcttaacctctacaattagagaaaactgaaaatggaaacgatcattgtttaagtaagggaagtatatcttatcttagttgctttaatgttcaagtaccttctggttatttatttttttcctaaacatagtttcacaataatcatcaaattctaagaatgtgccatgacgtaacttcttgctggagatgaaacatgcaaaagattgttgctggtaaacaaaatttggtttgctacacctacaatccaccacattgttttgtgggaaagagggattaatgcaatacgacttcttccgccaggtgcagtatgcaactgtctttgttggcactgctgccatttagaatcgtagtgaacactcataacttggatatttgtgttgtacgcggaaaccaacaaaaagaagagctcggtaccatgcgttcttgccttatttttccttttaagttcacagaattgcttttcatttgtgatctgacgtaaacatttactaaattaacaccgatcaaacagatttttacgaagcactgatcgattattgaaaaggtacttgataccttcaggaagcataactaacctcagggccttgtctaggggattcttgccttggtacattatgggaagggtgttgtgatgatccaatgattagtgtgatgttataaaaggcctagacatccagcttcattaggaagaataaaacgttaacatcaccgatgtagtttgtttcattttatttgctttttggtatggctgcctcgaatgaatcttgttaaaataccctgtattgttaacttatggggttttgattggtcttatatttatgtagattccttccacctaacagcttaacctttgcgttcaggcatggtttccaaactatgttctgcattaatttatttccatgcatggctctttttcatcaattccgtgtgcacttctcagaccatttttcacttgagaggaggtcttaaaatattcaaccgtgctaatttatgtgttttcaatgtgccttatatacatttcatcatccaccacgtaataacttagattttgggttggatatatgttaaatgtaattttctttactctcttccaggacg

SEQ ID NO: 10023 - DNA, 990 bp, Eucalyptus grandis
  Intron number 10 from transcript Egrandis_v1_0.014051m (lo cus Egrandis_v1_0.014051m.g) derived from phytozome v7.0 ( chr-ID scaffold_8; pos 361061 to 362050 reverse strand)
ctatttctacctccatctgaagaagatatatataggtaaataggctaactttaaagctaaataccctgttgatcttgatttttggtatgccaagtgaatttgacttatggtgtttgtgtttagaaattcatatgaaaggggtgagctcttctattgttggataaatttgaaattggaatggctgaagaattagcttttggcatgacatgagatgtggtgaagcccctctaagatctctttttcctactttattttcttggatggctagtaagaatgcgatggtgtcaggctatatgtttttgatggctaagtctgttcgtcggaatccaatttttaaaggagtttaaatgattgagagctatctttgattgactcctgtattgatcattagtttgctaaggctcgtagatccacccactgcactttcttgttgacttgtctcttggcaaaattctcttgtccttcgaaagttgtaccttcattaagcattcgggtaaatctgttatcatcttttgttgcttgtgactttgctctaaccttgcagaatcatattatcaactctttgaagattttttattaaccaaatgctattcaactattcagtgttgggaaggattttgggacaattcaatgtcaaagaaatcttttgtatttttaaagaaaacctcaaagaaatcatggtgcattgcacagctttatctatgtcatgcatatggaagaacatgagaaaagatttttgggggacttgaagctcctgttgattctttcttttttttatttatctgtggccatcctctgattctgtctactctaatcgttgttttatttctgtttgtttttctttttctctctttgctcctgtgctttctgatctattataaatttggagccactttcttttctgtgagaccagctcttatggtatgctaaattttctcatcttctagctatgcaggttattagatcacgtcttgtctttgccagtggact

SEQ ID NO: 10024 - DNA, 1699 bp, Eucalyptus grandis
  Intron number 5 from transcript Egrandis_v1_0.028529m (loc us Egrandis_v1_0.028522m.g) derived from phytozome v7.0 (c hr-ID scaffold_1; pos 10068875 to 10070573 reverse strand)
acaattgttggtaatttcatttcttagcctctcattctttcagttaacattaacctggtcttttgcaaggaatttgtgaaatttgtcttcaaccatatcccgagactttttctttcacagaattctttgtcttcttttagcatctatgtcagcagtggtgttgcgtttatattttaagctgaaagctgaatactttttctttcaccatttgccctttcttgcctagtcatgatgtagtcactgcttgttggtagattctctaattcttgtgtaatgacattgctgatttgctactgctggggtttataactcacatagttgatcatttgtcaagaagttaggctcatgtctttatggtactggtgacaaggttttggcttttattggaattgaaggggagtggagaaattaccattttgtgctagaatcttcagctctttgctgtgcttgatttctagattaaggagttatattgcgtatacgtaagtattagggttgatctcccctcataagtaatttttgtcaattagccataacaccaaaaatgtcacaaccccttttatatctcccttgccaaagcatttgtttcttcatataaatctaactcacgatgattggattagaatttatgtgcatgattgtcagtccatatgacgtattccgcatgaaactgtgagtttgcttaaagagaaaaatttattgccagaagaactggcttttgtattgacctagatgtttgagagcagctacttttactgacaatgcatgaaaagctatgtgcatggccaagttttctacagtaaacagggcatgatggattggattctaaagaactcaaattcatccaatcatccgaccagaatttgattttgtttcacctgtagcctttgatagatacttccaaacttgatttgatggctttcctattccaggagactcttatatgactaaccctagaaaatgttgaaagattggatctcttggcccaaagattttcgctatgatggatgatgcactgattaaatttgtctttgtgggctttgcatcttgcattggtcttgttcaggcttggaactttttccttttgggtttgtaaccaatttttacaaagtcaattattattgtgctgtaagtcaagttttatttccaggttaaatgaaagttttgatcttatatcatgggagacatttgtagtatgagagtattctcaacttctctcaaatcacccgttgtctgagattgggcagaaggaatgaaggacccattgtcttctttgtttaatgcaatcatttgctgaagctaatgggaagcagagtcccatatatgtacctttttattgagttgagacacttgtgcatctaataagtaatgactgattttactttgagttgatgtccttttgtggtgaggaaagttggccgtaatattatgtgagaaattttgatatcctgattgaggctgcttgggcatcctttgttagccagattatgaatttaacccggttgagagattacttttctgcctggttactcaaatgattgtcaagctgattgtctgctgttcgtttctgttgttgatttaatcatgttcaatagattgtgaattattttgtctggggacgtattcttttttatgattttgaggaactgggcattttgcccttttttgtctaatctcgtaatgttgcttgctgcaggtt

SEQ ID NO: 10025 - DNA, 8061 bp, Eucalyptus grandis
  Intron number 8 from transcript Egrandis_v1_0.017867m (loc us Egrandis_v1_0.017925m.g) derived from phytozome v7.0 (c hr-ID scaffold_7; pos 44174520 to 44182580)
gctgaaggtccagattttgttgataatatacggaggttagttcaacataaagagttcgacttttgtcttagcgatagctgctggactttctcctcctttctgagttaatctttcttgcctaaatacgactgtaaccagacttagaagggtgttctactgattagctttcttctttagcttaagagccacttccactgtcagggaaaatattcgaattaaagattttttgctagttactttcacattagagggagataactccttgaaatccctgtggcttatattatggtgaattctcggtggcgcaaatgggtgattgtggtaggtgattgcttgccattgttctcattgtgcgcatataccattcttgcaattttcccagaattcaaagggtctgctcagtactcgcacattacttagttcttgcaaacaaactgattgcttatgtcattttatattgatcaggcggtttgattatataattaaacacccagattggaaggagacttttccaaagaggcaaccgcgtgtatttgagaggaatggtctaggaggttggagaagatgcggtgattgacatgaagttccctggacaatcgtgaatgaggctctagctatttagggaaccatttacttacctgaagttccccttggagtacggacttgcaaatgtttaccccagaaactttcacctgggcatagctctcttccgattgtgtccacctctcagcaaacagcgtgatactgggttgggccatggggatgatgtttacattgaaaatgtcctagtcgccagcactccgttcagccatttgagaaacatgtctggtcagattgttcatgtagtcccatttgatctcaaggtaatctgattcttctgttagaattggcgtggcgtcatacgcatcatatgtatgccacaagcacgctgagcgcacttgatcaagtttcccaaatttttggagtgaagcccacgtacatgcattagagtcatgccagcaccctcttgtatacaccggcaggaccgacctggcattatccccgttacgactcttttagggataattgattttttattttttatttttgggtcggaagagaactgattaaacatactcatttgcaaattatattttcgggattttctaaaataaagccatgatatcatgttcataacagcaatcgaataataaaataaatagaataagaaaataaattggctaggaaatattttagtgattgtaaattctatcataatggattttttggtgattaactctcctagtagaagaattgacacaattgcaatatgtttaagacttttttggtaattctctcatttatagttccttgttactttctctagtaattttttctcttcacatcagatttgttagctttctcaatattttcacaatatatatgttaatattcgagttggtacttccattaaaaatataaatggagacactaaagtggccattaaatgctgacatgtcatcttatagccatacaaaaattcgttttccaaattttagaaaattaaaattcaaaggaaaggaaaaatcaaatagaagagaaggggaggggtagctacagtcgaggtggccgttttgatggtggtagagggcgtgggacgcctaacagacaaagcatggcagcatctggcacaggtacttcttatgattatgtggttgaactatcagtttttaccagtgaaaaaacattgcgctttcattgttacataaggaaaaatgatccataaaattaatattgctggtaatggagcttataattggagactttcttttgagtgtgctattccttggggcgctactcaatcgatctgcaacttcttcatcttttgccccttgtgggtttttatagtcttttgacgttgatgatatcaggccctttgggtgaacttcatttaaaatgttccaacgcaagaaatatcgacgttacatgtgtgctctgttggttatttcgtaattagcccggagttctcttttatggtttctttgttgctttctgtctactagaagttgttttctcgggacgttgcaaggaagaaaacgatgttcaattgcgggcttttgggtttctcttttgtttcgctgtaccctctttggtctctctttcagggtaggctagctggttttctttggctgctgtttggccattttctttagcccctttccacttactctgacttctgtctatgtgagtgtaagtttttgggtccgagatctcgctgtatagctctatatagctttctggtttaaaatcaatataattcttacatttatcaaaaaaaaaaaaaaacgacgttcaatgatgacgaatgaggcggcagaggagagcattgaaactcactgtgattagagtgagacgtgataccggaggggatgttagtgatgctatatttatttatttatgaatgaagcaagcaagacacagagagaccggagattttgtaattttggggaccagcgtgcgcattttcattgcaattttgatatatatcaaatcttttgatattctatgagtgaaaattagttacttttatctttagcccggtgtatgatgttcacatgagcgcgcatgcattggtttgcgaccggagcttagatcaaaggatagagaattatattggtgacgtctttgcctaatgaatgttgatagttcactatcacgccggtttaatatgagtgataacgtttttggtcctgagaataatttttgtttagaaatatttttttttatgtgttccctagacaagtttatgagcggaaaaatgttgtttgataactgtacaaattttctattctcgaaatagagattcgtacgtgaccttcaaattcttttgcaatttagatgttttcaatttttaaattatttttcttttatttttctttcttgtttttccttttgtcgattgtaggtcttggtgaggctcaactaatggggctttagcgaggttactggccttggccgtttattttttaattcggaaaataaaaaaagaatagaatcaaatattatttgatcggttaataaataaagcttagtggatggtggtgctgttgccacggatcttgaactcacaacattcactcacgggtagtcattacaccttttcagatgtcaaagaaagaaagaacaaaactcttatctactacggcttctgtcccgtccttgatgaatgattcgtgcacggtttcgaatgattcataactgatatggactttgacttttcttcccaaaccgttccttattatcattcactcattgtctaaacttaaaatggaattattcgaccgtcaagagtatgagtggcacttcatcaagaaaatttcatgctcatatttttattgatttaaactagatgacgtgacgggggtacatttacggtcctcaccttcgagaggcgcggaaaaaggagagcaacgctgcattttaattcaacattgttcttagtggcaagataaaaatttctttaggactcttttgagttccaagctatgctgaacctccatctctagcaaaacataaaaatgatatgaatgttgatttcgtcgcacattttatggactagaagtagatgccaaacggatattttaatcatatatccaatgtaatataggttacgcttgatagtccgaatttctaatcaggataaaattagataaaataaaatgtgaaattcatgaattttgttatatcatatctaatatttggtgattgtaatactaaaattagatatattcacatcatatcatatacactatttagtataaaaagtatatcaatacaaataaaccaaaatttttataaacagagatggagaaaatctcactcaacattgttgactattttatttttatttcccttattttttattaatttattttttcttttatcttccccttcaatcaaacaatactaaaacacctaaaatatctaataaatataaatatatagtcttatatgtatattgaatttatattataaaatagaattaaatttgaattataagattaaattaaaataactattttttttgtattttgaattttttatattaaaattcaactattatttatgttgaaatataattttgattttatcaatttaagaagttcattatttgagaaaaatgactttttaatttttaatattaaaaattttattcatctttattccatctcctttacaggataatatttatatttttcttatatctaattttatcctattttgagtaggcattaaatgtagaataagataattgttatattatcttaaattttatcttgagcagctgcagtgtttaaaagagaagtgtccgtaacaaaactcagaaaacgccgtgacgcctgacgttccgtacaactgctgaagtcgaactgccgaggaaacggccagtcttttttccgtctccttcgtccgatcatcgatcggtcaagagcgccgccggccatgatcctcgtcgacgacgttccggtcgttcccggctccgatccgccttcgccgtctcaggtaactccccttccctgcgatccccccccccctctccctccgtcgctcgctgcttccgatcaccgtcgtcgtacggagcttcgatttcgtcggaaaaggtagcggagtcgacggcggaacctatcgcgcgcttgaatagggtagcgacggaggggcgaccctcctccgatctcgcgggtttcggggtccgacagtcggagtaggcagaatgattacagagtccttggcctttttctttttctgctttgcggagcttttgcgtaatgcggacacgacgtgcgttggagctttctccgtccttccttcttcgaaagtctagcggtaatgcggttggataacgattgacggagaagaacgttggggaaaaatggaaaaaagttggatgttttaagctttgccgtgctcgtgcacctctcttgtgctcgatctgcgaaaactgtcggctggccggttagcgaacataagatgaggagctcgcgaatcttcttccgtgttcggcttccaaaccaatcgccgaggagattcgctgcaaattttaagtaaacgatgttaactttatctgattaatttgtagaaaacattgattggaagatcttctgggcgaaagcttgtttgaatcctggttgtatgcacatgtcgagtccaaatccttttactttatttttttgttcatccactatatttcttccagaagatgaacaccttgaggtggaaagagaattcaatcagcagtgcgccgtgctcattagattagcaatggtctttgacataaccttgcgagcaggcgcttgattgaaaagcagcccaaactagctaaaacctcattgcctaacagaagacagagtaagcaaacggagttcccagcttgaatggacagaaccataccatttctgaactgagaagtatacgatatggacgtcccaacttgtgctttccactagaattagcatgtaactggttgaattgaattgaattgctgtgggtgtgaacgtcactttctgttgtataagaattaacaaaagaaacttgggggtgaaaactgattcatgtcacctcttttgcagtttaagctcgtttcatccgctgcatatatatctctctcgtgatgacttcttctttcttacttgtcaacaggttctggaaatcttagctgctttaacagaccacccaactttattatctgcctcgcattcattcagaaataccccagagaagaggttttccatttcagaggagtctggattggggagcgttacacagcccaaatgtgtttatgtattccaaagagaatatgctattgttgaccctgctttggtggatgtatggctcttcccctttcctcatttagaataattggaatgtttgcttatctttggagtactttgtttattacttgcaaaacttctaatgactgttatcattctacatgacaggttgtcgggactgatgaagcaactacatgcgtggggcttgtcattcggaatcggtcaaatggaaagtatgaagttaatgcggcagaattaagagaggcttggaaacaacaaacctgttgcgttgcatataaatccctaaatctgcatgctcatctttttcccattgaatctcaggatttctattgcccatttggattctccagctattgtggaaatgggtcttgctcagatgttatcacaaattttttatcacgacttgcaggatgagatggatgtaatggttttgtatcttttatcaaaaaaagcaaagctgtgatgtttaatgattcttgattattttcacattcttatgcaaagtcttgttaaatgctgaaatgcaggttcatgtcattggcggttttgaggatgcttctcttaaagtctgacctgagatccccttcttagtgattatcagtggatgtaccatccacttaaaggcaaataaatgagtttgatgtgttaattgttgaactttgtatgcagcgaatcaaccatagtgatggatcggaaatccatggaaaagtgggcggttattccttaccactgtgtatcaaattgatcgaaacattgctgaggagacgagagaaatttcatatccagacattctttgtgcttggccacaatactagatcggatgctgatggacgtgcatatcctattattactgggttcctggtcagtgtctgttccagatgtacttttattacattggtaccttcttctaaatgatatttaataaagagatggaaacataaaagtagagcaatggaaatatggacaattttttgtcgatagaatcttctcttttgataaaaagcagtagtctgcattacctcctgagagacgtactacatctattgacaagatggcctattttgagtccaacactggcttctcattacaggactaggtgctgtaatccaagcaaacttttaataaaagaagctattctatttatttcttgactgtcttttcaaggtcacgatgtattgcattttcctgaatttcagcaattgtgaaagttaatttgtcaattttctgtgttccaataattcactaatatggtattattgtgggctgtgcgtcaaatgttaaatatttgcatttcatctgtctacaatttgatttaaactcttgttcattgagtgttcgtcaggtagagacatccaatgggtctgtatcacccgcctgttttgatagaacttccagatgtcccgatgaagttgtccggcgaattcgtataactgcttgcagtgatgacccgacttggaggggcaagttgctggagacctatcatactcaagatgataaattcataattgcaccttgctattggtaagaagattgctggcaaatttatagtcagcatgcattgccaatgcacataacaagcagacattgtcctgcttttgcttttcaaattattcaagtctcagtgacgctttgtatatgttgctgacacaatgtaggtcttggggtcagttttactatgcttcgacactgcagtgcctttctgactctgaaatgcttgacgagtgctcgacttcaccttatgctgaaggtccagattttgttgataatatacggaggttagttcaacataaagagttcgacttttgtcttagcgatagctgctggactttctcctcctttctgagttaatctttcttgcctaaatacaactgtaaccagacttagaagggtgttctactgattagcttttttctttagcttaagagccacttccactgtcagggaaaatattcgaagtagagatttttggctaattgcttacatattggggtgatataactcttgaaatccctgtggcatatattgtgatgaaatcttggtggcataaatgggtgattgttgtaggtgatcacttgccgttgttctcaatgtgcggcatatgtcattcttgcaatttacccagaattcaaagggtctactcacgcattacttagttcttgcaaacaaactgattgcttatgtcagtttatattgatcaggcagtttgattatataattaaacacccagattgga

SEQ ID NO: 10026 - DNA, 5926 bp, Eucalyptus grandis
  Intron number 1 from transcript Egrandis_v1_0.038735m (loc us Egrandis_v1_0.038735m.g) derived from phytozome v7.0 (c hr-ID scaffold_11; pos 29753979 to 29759904 reverse strand )
ggcctcacagctactccagaaactcctcagccccggtaggttaggtgtcagaaaacagagtggaagcaagtagaatagagagaatagagagtaatgtattatgtgcacttcattgattgtttcaatgtacaaagatgattaaataatgtatagaggatgtttaataaaaggaaagtatatcagatctaatcctacattgatgcaaaaataatcaattacaatttggagaatatatccatcacaatctgtgcatatcttcggcatatctttggcatatcttccaacactcctcctcaagctggtggcttgtatatgtctaagatacctagcttgcttaggagatatgcatgttgccgttgacataaaggcttggtgaatatatccgtaggttgttcggtagtcccaattcctcttgttttgattatcccttcttgaatcttctctctagtaaagtgacaatcaacctctatgtgttttgttctttcatgtactattggatttgtcacgagtttaagtgcagaatcatgatcacagaacagtaaggttgatcccttgacttgtacttcgagatctagaagtaagcttcgtaaccaaactacctcacatacggtcttcgccatggatcgatacttagcttcagctgatcacagagagacagtggactgtttctttgttttccatgaaagtaatgattccccaagtttgatgcagaaaccagtgatagatcttcgactcatagaacaagtcgcataatcagcatcacagtaagccgtcatttccatgttgcaatcacgagaaagaagaatcccaagtcctgagcatttcttcagatatttcacaacttttaatgcggcattcatatgagactgtttggggctatgcatgaactgactcagcatttgaaccgcataacatatatctggtctggtcatagtgagataaatgagtttcccaacgagtctttgatagcttgatgggtcttttgagtaacaaatcatccttagtagattgtagactcgcatcataatcagcagtggtcaatttgacattatgctcaataggaataactgctggtttgcatcctaatagacttgcttcagatgtaatttttaacacaaatttccgttgactaagtgagattccttgctttgaacgagttatctcaatgccaatgaagtatttgggtggtcccaaatctttaatatggaaagcggaatgcaaatatttcttgagacttgtcacaacggattcatcatttcccataataagtatgtcatcaacatatatcattagatagataacataccttttgtccatgtgaataaggcgtaatcatgtatggactgtttgaatcctgctcccataagtgtatccgtaaatttggcataccacagtctagaagcctgcttgagaccatataaggatttgcggagacgatatactttagactccccttgtctccgtaatcccagtggaatgtccatataaatttcctcatccaagtcaccatggaggaaggcattgtgaacattcatttggtgcaatgaccaatcacgaaaagcagcaattgctaagaaagtacggactagaacatctttcgctaccggagaaaacgtttcatggtaatcgaaaccttctcgttgagtgaagcctttggctaccaaccgtgccttatatctttctatagagccattggctttatatttaatcttgtagacccacttgcaaccaatcggttttcgatgagacggtaaaggaacaatgtcccatgtatgattttccattagtgggtgcaattttgtctccataggggttgtgccattgtggatcatttactgcctcactataatttgacggctctatttccttagacatacgactgatacaacacgtatgattcgaggataactgatgaaaagagacatatgaggagatagggtaacgagtaccttgagaacttgaagttgcacaaacatagtcctttgtccatgtgggcagacatgtagcacgtccagagcgccgtggcggattattctgtggtgttggctgtgaagacacttgtgattcttcatttgaccctggagatgttgttgttgatgaaggattatgctcctcctcatttagtgtatctgaagtatccacagctaccgttggagaggaaattataccttgtggcagatatgatgaaggtgcaatgatgtatgattgtccaggagataggtcttcttcagataaaaaatgatgagtattcatgcccttatcatactcatcatgtaaagataaatcgtcaccaaaaggaaaaatagtctcatggaaaacaacatcccttctaacaaagaattccccagtggacttataaaaaacccgatatccctttgtgagactcagatatccataaatatgcattgcctggcttgtggacccaacttatctcgtggcttcactgtagtcacatagcacaaacaaccaaaaactctcaagtgttaaagttctagtttccttccatatagcatctcaaaaggtgtcttcttgttgagaatgcgacttggaattcgatttatcaggtaagctgcagtgaccacacaatctccccaaaaggtcttggaaatggaagcctggaatttaagagcacgagctacctctaaaagatgacggtgtttacgcttgataataccattttgttgtggggtatatgtgcgagaactctcatgcaaaaatccgtttgaagaaaaaaagaatgcacattcactattgaagaattcccttccattgtcagtacgaatacattgaattgactttccaaattgatttttggagagggagaaaaaagttcttatgtgagaaagaacttgaccttttgattgcataaaaaatatccatgtggcacgagaaaaatcatccacaagtgttaaaaagaaacgagaaccatcacaattgggtgtgtgatagggcccccggacatcaacatggattaaggacaaaggggcctttgcacgagatttgctattgtcaaaaggtacacgagcttgttttgccagaggaaaaattgaacattgagggtaaggaaaagcagcagaatgacctagtcgttgatgattaaggaaaaccttatcattggtagtaatgttacacaatgattgcttattcaatccaatacaagatgaactgaaattactggagaaacttgtccaaaaatatagcccttgcgaaattctactcgagcccatcagtttgccagtcgaaagggcctgaaacagacaatgatcatgattgaataggacacgacacgagttttcttcacgagctcgagaaactgatatgagattgaaatggaattctggaacataaaagacattctgaagtgtgataagaggactgaggattactgtgccaatcatcgtgacataggtagcattctcatttggaagttggattgagataggaaaatctaatttttttttttttttatttcgaaaagaacctttcatcgcagataatgtggtcactagcacttaaatcaattatccaagcagtcctcgaaattgaattcaacaaacaacaagaagtacttgtaaaactttcggtactctaaaaaacatccaacttcttaagagcctgcataatctcttgatattgatcatgagtaattgactaatttgatctatcagtatgctgccctgtcacctgtaaagctgtcggaaaatccctctttcctttttctccaggtttattatgcaatttccagcaattatctatggtatgatgtggacgtttgcaataatcgcagtataacttaacttttcctttaaaattttgcccattgttctttgatgacgtggcgaaatatgatccgttggatggtttaaaaactgaagccatcgcggcctcatttgggccgttggatccatgcgcgaaaaaggagtgctgtgggccgttggatccatgtgttgaaaaagaacgctgtgggccgtccgatcctactagagagattccgcgtgtgctgtcagatcaagcgaaaggattgagcccacgtgaaccgtcggatcgaacaattagatcctgacgtttgttcctttcttgaaggatttagggtttgctcgtgcaaaccagatctgctgtgcccatccttcttcaaactctttggtcatggctcctccgtgactcgcatgagctgcgagtgccatcccgtcgccggatctgtgtagatcggagccaacaagacactggctttcttcttggacggcgagctggtagatctggccaagagtcggcatgggttccatcgccaagatttgggatcgaaaattctggtaagactcgttcaagatcagcaagaatctggtgatctttttcctctctcgaatggcgcggtactgctataaggtaagatttgggccctctaacttctccttgactgcctctaatttgttccacaaggcggagagcttgttgtaaaccgcggcgatgctcatgttgcgctgttttagatccgagagttgttgggtcaaggaaaaaatcttaaccctatctaattttccatacatctccttgatattgtcccatatttttcttgaatcttccgtcagtgggagtccgacagcgacttcgaaggtaatgtagttgccgatccatgttcggactaactgattgcacttccttcacagtcatgccatacgttcatccaacgggatcggtaaagtgccattgataatttttttttgtctttcgtgaccaatgctcgccggaactccaccgaccagcttgagtagttgtcggggcctgatagttgttaggtgatgagtcgtagctctggtctgtcgcccgtcgccgtgtagagcggatcaccaggcttcggttgaccgctggcggtgacgaatgggtacggcaagaaaccgggtagggatttagccccagactcgaaatacctgattgaaaataatccgcattcattgggttcagcccagtggtttggcttgccctgaaagcagttggtgggcctccattgggctgaaccggctctctgacgccttgacccatcgaccatggatttgtctgtgtgggcccgtagatccatgggctgagtggcatctgaataggaagccattggatggattgcctagaagcatgctgggctgcgatcggttgtctcgaagtggcctagcctgcgatgggctgtccttggttcggctgggcctgatttccttgctcctgtttcggctattcttgttacacagatgactcttctgaggtttttcctccagaaatcgatgaatcttccttaaccatgatgtcggtaagaaagcaaaaaatggtaaggaaatttttctgattttgaagtgcttaaatattgattcctacaccaaagtgctaatcttgttgtgcaggtttagtgttcctacaacaacaaagacaagaaacatccggagggcaatcaagaagtgcggaagtcagaagaaggaaccttgctctgataccatgtcagaaaacaaagaggattaaataatagagagtaatgtattctgtgcacttcattgattgtttcaatgtacaaaaaggattaaataatgtacaaaggatgtttaataaaaggaaagtatatcagatctaatcctagattgatacaaaaataatcaattacaatttggagaatatatccatcacaatttgtgcatatcttcggcatatcttccaacattaggcatgcggtgttgatgtgtgatttcagttcttttttgtgtctgatctgtttcaacagaccaacccaagagttttgagaacaccttcgtaccgggatgttttcgaatgtctatggaatgcatcacgtcgtgcagcatgactgcaagtatcttctttcatttcgaatttggcttgagtgctatatcttgctgcagaggatatttatagacaggacccgcaaactcatcca

SEQ ID NO: 10027 - DNA, 702 bp, Eucalyptus grandis
  Intron number 4 from transcript Egrandis_v1_0.013355m (loc us Egrandis_v1_0.008568m.g) derived from phytozome v7.0 (c hr-ID scaffold_4; pos 37062512 to 37063213)
ctgtcattgttccaaattcgttgttttctagccaggtgagtattcttctgaagaggtggattactagcagtgttatattttgcatgtagttgcctgaaatttgtagatcttactgtatccctgtcggaaggtcttcaccaatctcttggaatattataattactgttctttgcaggggtgcaatattaccctctatttagagctgcttccgcactagagtggggtgttacttacagagtttagtagattagttttaatattgctgatgttacgtgctcagatttgcaaaatacctgaatactcactagtcttgcttgagctaaaaattactgttatttgataatgattgagtggtttgactgttgataatcttcatttgtatgcttgactgtttactactttggaccttttgctggatgaggtagtcccctatgatattggatctcactggcaatacctcttgctggtcgtcccataaaaaaaaaaaaaggaaaaacaaataaaactgcaaggagttgtgaattttctggatctttaggattgctgtattcttttcaatcaaaattgggcaattttagttggatatgatgttgtttttatctgctttgttctgtggtaatagtaactgcaaattttagtcagaaaacctcattatcagttcacaaagtttgtaggtgattgtaaataagtcgcgtgctgaat

SEQ ID NO: 10028 - DNA, 2047 bp, Eucalyptus grandis
  Intron number 5 from transcript Egrandis_v1_0.013883m (loc us Egrandis_v1_0.013382m.g) derived from phytozome v7.0 (c hr-ID scaffold_2; pos 23240460 to 23242506 reverse strand)
caagttacactcccttgattgttcctcagggcgtatcaattcctggctggaatgcctacagtgtatgcctttctttaccctgtggtatcaaagtgctgctgtgtgttctaaagatgcataatcaagctttgtgtggtttgtctagtatttgaaaaaaaaaaaaaaaattctgaggatctacatatacaatttttgagggacatcctttacatatcgagctgtagcttcttacctctctgcaaatgatgtcatgaattttgagaagatgacatgatcctgaataattagttggtactaaactgacaaaggaaacttcttctgccaataaactgaagattggtgttctggtggttatttctgaagttattaaactaaagatggtgtacactggtgccattgtagaaggcagttctaggccacgaaatggataaggaagtattttgtgtcaatgaatgttccatgtctttttagtctcctgtcttgagtatggtaatcaactatctacgaagcatacctctcttaacaagtattggtcttttgacaatttctgatgcttaaaatgttcctagatcatgtaactttcttttatgttgtccatgtgagagggatggtgtgggattagcctgaggactgatgaggaattgttgattgcagagttggactgggaagtttatatgatcaatgaatgtgccatgtcttttaggtttgcttgtctccagtgtcgttagtgactcctgggcaaagcatttcccctctgacaagtaaagtcatatacatactgatcttttactcccaaaatgcttctagataaggtccgttgttattcctaagatattccatcccctcatgttcatggtgatataacgttttacatgttgctaggaagttggaggcctctctcaatccccaggataggagtatgaaagtcggtagagggagggagggagttcacctcaaaaatattttgcgaagatttgctcgaggattgctgaagaatgactgtttgcagagaagttggggagatttagtgaatgaattccagttctctgaattgacgtttgagttcattacagtaagagctgtggtgtattgcctaaggaaggactaggatgagcccagaggatcaatgagggatttttgagaagttgtttggtttatgagggtggtaatggtcgttgctgtggcattgaattcactgcactggaacttggcagtttccacacgaaaatttattgatatttagtgtaacagatttgacataattctttgattggtgaagaacatcaaaagtttgaactgtataataaatcttctgcaatgataaaattacaaaatgttagtcaacctggggcactttgggatgcctacgatgaatccatgttatggtgaagtgatgcagtgttgcatcccaaattcttaggtattaaatgtgccatcatcaatggctaatagcttgccggaaattagccatatgaacatcctgtctataagtttgcactcttattgagtgggttaaatctctggctgtggatttttgttgaaaaggaataaagatgttgtgcgatttgatacagaaaagattgtaagtacctccaggatagtggagtatatatagatgccaggagtgccttacagaccacggtgaaagtttgaggcatgttgattgagttgctgtgctaggagttttaaggggatttgtgagacggtatacggttaggttccatttcaaataagagatccaagttgcaaccatatacattaagggaagcaatagttaattattctggttattcctaagtagctgcatatttctcttggtatggaccaataaaattaagtttgtgcatctgtattgatataattttataatctattgtagcacaatctagaatcacagctgtgcttagcatgtcctttcttatgatattccactgcttaaggtgcttcagagaatcttaattctgttatttttactgcaatgtggcgtatatataagagtcttatgttttcagggtcaattggggtcagtttcatcttcagatagcca

SEQ ID NO: 10029 - DNA, 2600 bp, Eucalyptus grandis
  Intron number 1 from transcript Egrandis_v1_0.002068m (loc us Egrandis_v1_0.002068m.g) derived from phytozome v7.0 (c hr-ID scaffold_3; pos 7695734 to 7698333 reverse strand)
aggttgctgctgctgccgcaggttatctctctctctctctctctctctctctctctctctctctctctctctctgtggcgtattgactggtcatagaggatgaagtactttatgcagctgtttgtgcgatttaagatgaatctaattattgttcataatgacgtgtttgccaatcttatgaaattttcattttcattcgagaagaattcccagtcaaattttcaaggacacgacaaaataatttgtgttccattcaaagctatatgcattctcacagcagagattctcacagccccaatttccagagctcccagaagaaacgaccaacgttaattttgcactaaacagccgtttagtgcatttatcatcttctaataaaatcaaagacaacaaaaagtcggtacttaacattcaatttgatctctttcacactgggaatgaggagggtaacaatttaatgcccccaagtctttcggtcgcacgagaccggcattttgacacttagcttgagagtggaggggattcgtgggttatggtcaatcaacgccacgccgacttcataacaagattggtcactgagagttacatttgagcatggaaccttttaatttattgccagataaaacttcccccggagggtggggttgtgtgttgttaggggcgtggttgggttgttttcctgagggagtgttttatcaaaggagaattacgaaaaaaagtcataaacctattacaattatatcaattcagtttcaaatttttttaaatctaatttagttctaaacattttacaattgtgtcagtttaatttattcggccaaaattggccggccggtgctaacgtgaacgccagctgtccaacgaaagctgacatggcaatttttaaatattttttgtagcaataaattaaaagagatacttcttgtggttttggtttgtggtttaagagtgaagcactatttcttgaatttttaaaactcaattgtacttccataataagttttaatactcaattgtacctttgtgaaaaaaatctatgatttttaatgcacttatctcattgatcttagaattgagaagtttgccatctctattatcttgtagttcaccaatatacaaatgtacatagatttatggatacaagatttgatcttgataacaacacgtgaatggaggatttttgtttatggtcttggatggtatagtgggactactatcatctattctattctttgaagaatatatagctctcttatgactctcatcccactataaatgtagtaatattctacgaaattatgtatgcatagtgaatcctatcagaaatgatcttgcaaacgatacatactacgtagtaaaatagtcacttcagggggaaggctgatggagataatttcaaattactttctttggaaaaatatgtacatggtacatatctctacataatttcactgatttatttttgggataataccttaaaaaaccccaaactggtacacttgtgacaaatttaccccaaattatttttttgaccataaaaaaccccaaactggtaaacttgtgacaaatttaccccgactgattataaaaaaccctaaactgatacatttatgacaaatttaccctcaaactaatttattcgactgcaaaaaatcctaaactggtaaatttgtgtcaaatataccctatgctaaattatattaataccacaaaaaaaaatcataaaaattgtaaatcgtgacaaacggaacgtaaaatcctaaattgatatactggttaattgtcacgtgtcatttaacttaataatttgagaataaaatttaacgaaaactaatatagggtaaatttgtcacaagtgtatcagtttgggataaatttgtcaaaagtataccaatttggggtttttggtggtcaaaaaaatagtttggggtaaatttgtcacaagtgtaccagtttggggttttttagggtattatccctttatttttccaattgacccaaacatcatggttaacaagattgttcaagctgagccagtgatttatttccatggaagttgtgtgtcattaatgatgaaataaaacaactaagatttctagttccaccaaataattgttaatgcatgcaagcagtggatgccgagaggcttgatatataataaaacttcacataggtctgacctcacaaaattcatacaattgcaatatggggcttggattctagagtggaataatttgatgccatgaaataaagaaatcaacttatttgtctgcaccaatttatccattcttatttgttctaaatttactttcatgaaagattagtttctgattggtatgcaatatcatatgccaaagaatatcaaaggcaacaacgaatgcctgcaatctggtaaataattatattccaacttcaaacttctattttactttttcttaaacgttttatttctataataccacatcaagtttaattggcttctgatcaataccatgccttttcaataataatttccattatgtgccatgttgttattgtttctccatcttttgctcacccttgcagcacttgatctaataaagaataagcaagtccaagcc

SEQ ID NO: 10030 - DNA, 3044 bp, Eucalyptus grandis
  Intron number 1 from transcript Egrandis_v1_0.011241m (loc us Egrandis_v1_0.010544m.g) derived from phytozome v7.0 (c hr-ID scaffold_4; pos 40506609 to 40509652)
ccgccccgaacggcaacaccgatcaagacatcgaggtaatggcatcacccgagcctctcgatctcttttacagcttcatgacatgacgaccgcgtctccatatatccatctatcgagcataggcaagtgcaaacgcagaagggatgatgatgatggtgagggtgatgagttttcatttgcatcttcatgatgtgtgttcatcatttccagttttatgctgttacattgaaagagataggagaaagggatggggaagggccggctggtttagagatgtagattcatcaggaagacttttcgggcaaatttgacttgcccgcattacattgcatcctgcacatggtcttgacataaatatcgctcgtgcgtaacatggggtaaaactttttaattcgcaataggaaaaaaaacagtcatccatgtccaaaaaagtatatattctgaacatactgcacaggccaaattccagatcatgagatcacgctatcatttacggcagaatattccctaaccattcaaagatatggaaataacataaccataaattttcttaaaattcttcgatatctaaacttccctttttttatttgatgggaaatttagaacaggcatgtttggttgtggttcttggtctgtatgatctacctagaactataagagttcataaaattaaaattgtcaaattggacaccatctttactctgaaaatggtatctaaattgtttcattatcaggtcacattcagtgcccctgagcttgatgtagaactcggaatctaaatgccagaatagtcaaacttagagcaatcagcagttcgatactgtactaaactaccaaaaggaaaagtccacattcaaactctcattttgaagctttgattttttggttctttggcctttctggcctgacattcgagttattttatgggaccacgcgttggaggtgacgattgattataaggaggatcgtacgacgtttgattcgacgcttctttcgagagttgaaaattggagagacgaccaaactcgtaagcaaaatcgagccgactcccataattctggtcttaattctacgccttatcctttagatgaggcctcgccagcttagctcgcctcgttttatacgaagtgtgtcgagacaaaccctatggaggagaaaaagatggataggtaaaattcataaaataaacagataaaaatgtcttacgtgcttagacatgacttgtatattttaaatgcttgcgaaaataattgatattattgcatcgttcttcccttcaaattaatcataaaaaacaacgacatgtgaggaaaagagagttggctattaataaggtgttaacttatatggtaatgaaatttgttcctccttcgtgatcttggatttaaggttggatcggggatgaattagttggtcctagtgatgcattattatatggattttgtgtggattcacacggcatctgttttttatttaatttaaggttacttgttttagtgaaataaattacaaattcattttaatataatcttagagattccatctagtttactacagaatgcattgctttaaggaaacaattaattacaattatggactttagtaagaaaccttgatcctctcaaccataggacatctcgatctatccaggtttaggttcaagtctcgagagcatttcgagattagtctttggaatgcatcgagttgatactgggaagtgcgctcctaagattgtccgtcaagacatggtaagatatgtgaaaactaatgcaaatacttctaatcattaaagggaaatgacgaaaacaaagccgactagacaatatgagatcacgatatctatttgcatctacataaaagcaaaaatatacgcttacttttttggccagcatttagaaagttattcaaatctttaaaaaaagaatcaaaatgttatatggatattttacatgtcgtttgggtctcatcaaagtattagacatcgcgaatttacaaaataaataaataaaataaataaaatgcgtgagccgtgatgaggaaagcgaaagagaatctaaaaagagtggataatggatccatacaggaaataacaataatattcttgaactagcaactaaaaattcgaaaaggaaaaaagaaaaaggcttccaccgaaaccgaaaggacaaggaggaggaggagaagaggaagaaggtgaaggaaaagaacaaaacttgagggtcacgcactgagaaaagttcagagagagagagagagagagagagagggagagagggcgggggacggagtcggggatgcgggagcttcatcgctgcggctctacgatggcggaacccatcatttcttcgtcctcgatcccgcctcttcgattctccttcctctcatggttcgttttcatgcactctctctctctctctctctctctatcttgactccctctgatttccccttttgttcttccttttgcttattgctggttttgcctttcgttcgtcgggctttcgtttctgggtaatccggttcgggcgttatcgttgttgctcctgtctgggttcgagagatttcgctcacgattacgctgctgtcgggtgtttcagatctctgccatggcgctgttgttttgtaggactattgggtcgtttctggggtccttagtttggctgcgggattggggatatcgtcggcctcttgggtttaactttactcccaatttgagttgtttgccttcagattctgtctctctgtggggcgagtgagatgtgacctcctgtaatctgttcgctagtttggagtcgaattgcttcttcaattgtcggaattcgcatgcagctcttgcttcgacgggtgtttgcaatttggggcgtgtcgatcctcgatgttctgctctgctcatcggggggaatttcctgcatgtccttacgtttgtcgtctttaatcggggaatgtttttgcaatgacaaaagaatcattctttctgtttttttttgggggtgcttatatggaatgcagaaattgaggaattcagctggtaggcaagcttctgt

SEQ ID NO: 10031 - DNA, 989 bp, Eucalyptus grandis
  Intron number 11 from transcript Egrandis_v1_0.008624m (lo cus Egrandis_v1_0.008624m.g) derived from phytozome v7.0 ( chr-ID scaffold_10; pos 30687340 to 30688328)
ttcaattctaaaactggggtgagtctagagaaagctacaaatttttgtttagcaacgagattttgttccagagtgtgttcactgttctattaccttttcactgtgcatgcataaaatccattgaaattatcaatctcatccacttcttcaaagttctttggaccagaatcatactcgagacttttctgtagcaaaaacttgttctttacaaagattttgtacaagccaaagtaactggctctaagaaaaggcctattttgtgtactgcgaaaagtatgtttatgaatatctcactcaccagtttctctgaaatctaaaatttacatgcacaccactttcgttgcttattgacaaacacatcttctggtatccaaacaagttattatgatgaaatggattctggaatgcaacttggctgtttcagctctctagcttcaatcacgtcttccaaataataacttttggacgcttgatgtacctattatatcttcattttccattgaggatcagcggtatccgtcttttctgtttagagcactatctcatctcaatattctgcctttcttttgcttcttggattggatctcatttggttggcatctgaacctactttcttaatatctctcatattacaatgttcccagcacctctttgtcctctgaggacttaagaagaaagtgtaattctaggttgaagggtcatgtaatctatcagcaaatagaaagtgcccatttatagtggctaaagcgaaacaatgataacttctcctaaaatttaaatgttttgattcatataatgacattagcttttcttcagggtttgacaaggattcaatgtcctgcgttatataacactctgtctccttcatcacttttacttatttgattgcgttacagagcattcacaatggtttcttacatgctactgtgtggctatgccaaattcactacatagaatgtctagttattcaactcaaatttaccaggttg

SEQ ID NO: 10032 - DNA, 3741 bp, Eucalyptus grandis
  Intron number 4 from transcript Egrandis_v1_0.000967m (loc us Egrandis_v1_0.000967m.g) derived from phytozome v7.0 (c hr-ID scaffold_4; pos 7887297 to 7891037 reverse strand)
tgaagggaagttagtttcagtcagttttggggcaggtacgttcttttgctaattgcaatcaacaatatattctatagtggactctgggaaagttatgaatcattgggttactcttagttggccactatactttcatttctttcgattcaatcattctttttgagtggttgtagaaacttgattgaaagactttgagatctatgtagagtgacccatttgaaagataacagtcagcggtttgagggtaagtcaccacattgttgaataagcattggtgtaatttaaattgttgaatgagcattggtgtaatttacttcaaatacttaagtgatcctagattttcacctgtataaattttggaggatgtttaacactgtagaatctgttttagccactataagatgaaaaacaatttgtatttgggcagccaatctggatagggttaacagctgcttctttagtgcgtatttgttttttttatgttacattttagttggacacccattgaggtgactttgtggatatgagtctgaagtcacaccattttgcttttcagaagtatattacgaagaagtaaatgatcttgaggacctttaacttatacctgtaatttgaattgtatgcttattcaactttgatttgtagacaagcagaatatgagcatttggagttataatacaagtcatgaatcagaatgtttcttgttgttccaaatttggcaatataagtgaaaggtgtttctatttttaagaactgtgtattattgaattttgacttcgcaaaattctagagaaaagtggaatatatgatcttgacattgatggaaaatatgattataacatgtatgcaaagagaggaattgttgtctctcacctcaattgacaatcaaagataagcgggaaatactcaaattgaaaagcatgaaactttagtatctctagattaaagtacccatttgttataaatgaagaaatcattgagttttattttatcgaggatacaataaatttcctcacaaaggatattcccatgctgtaaaagattgaaattcaaatgtcatagctagaacttcaggcagatttgatcttgtaagagagtggctagacctttattaatgctggaaatctagacatcgtattgccttcatttgagaggagcacaggttcaaaactttaccaaaatgaggatatatgggtgactaggtggtgatgaatagactaagggtgagctatttcttcaatctataagtaagttttagttgatgtactttctttttagcaagtggagacctgacatccgggatggtagaagtggtacccatttgttataaatgaaggaatcattgaggtttattttattaaggatacaataaatttcctcacaaaaaaaatattcccatgcagtatatggatcattttccagtctctagagcaaaagattaagattcaaatgtcatagctgtaactccaaaccgatttcatcttgtaagagaggtatcactcgggaatttggctagacatttatcaaagctggaaatctagagattgtattgcctttattcgagaggagcatgggctcaaaatctgtcaaagatgaggatatatgggtgacaaggtggtgatgaatagactaaggatgagctatttcttcaatcttcgagtatgttttagttgacatactttctttatagcaagtgaagatcttacatctgggatggtgcaagtgttctttgagtggaaattttataattcatagttacttttggaaaaagtgacgagcataagggaagatgtcatcaaagtaaggcagctagagcaaatttatcttgacatgacttggttaatgaatcagctgaagtgagaatttagaattaaaaaggtgtgccagggagttcctatggtatttcacaagacgaggtttagggcggtggtgtatttaatacccatctgctatcaaggttttgatggaagtgtgagaggatctaagtgaacagtgatatagaaaatgaactgtctcataaacatatttgggacccatactagaagattcgagaaagaaatcataaatgactatgcagggattgctggtgtgtgagtcttgaagaaaattgatgtagatgagtaaaaaatactcagaagaaagtgacaagacaatgatttagagatatacctgaagaaaacatgttttattgattgatcagttgtcaaagatgtatgccacggtgcaacttgttagtaccccggactttaagaggaaggagtgaggttcttatttcactggcctgtgaacctgcacaagttaccatggagggactcacatgacttgcaagaagaagcaccatgatgtatcatgccatgagcttggatttttgccatagatgaaccaagagtgcaaattagtctaggctggaaatgggaggatattgctggtgtgtgagagacttgaagaaaattgatatacatgaataataaatactcacaagaaagtgacgagacgatgatgtagatacatacctgaagaaaacatgatttgctgattgatcacttgtcaaagatgtaatccacggtgcaacttgctactactttggaccataagaggaacgagtgaggttcttattttactggcctgcaaaccagcatgagttcgtcacttgttgtctacaccatggagggactcacatgacatgcaagaagaagtgctatgatcaatcatcataagcttatattgttgcaattgatgaagcaactatgcaaattagcctaggctggaatgggggaaatattgagctatatggatagtgatcaaggaggctttattgcaaaatggtgatgccctataatgactaagtttcgccgcaatgggctaatgaatagtgaggtttttgagtaaacgttctacaaagagtcaaaaggatgtttaaaggtgagaagagaatattatgagcatggtcttggataattaagatcatcatatttgaaaaggcaaattgaagtgattatatcttttgttaggggatagaaattcgaaacagatcctgggcttgaaagagaaatgtagaatagaactgatcaagacagaaacaaagaaatcaggtgaccttatattgttcctttcaagggaaactcaatgatgcaagattgagaatagtcccaacccctatctatggaataagctaggtggttaacgcagattaggttgatattgagaatgtataaatggcatagatgatcattttatgaaccaattacccccaatgtaggattagttgagttgaataaatgttttcctttttttttttttttttttgggtttttggtcaaaaattgttttcgaaattgacacgaatctcttttatgaatactacagatatgttatcctatcaaattttaaagcttgattttctttatgccacatggaaaggtcgctacgttttcgtcagcagattttacatagctgatcgttacctttcaacgtaaggtttggtgttttggttcaaaatttgtcatacattctaggtattttctttgttttggtgcacttacatccatacttgctggattctcatgtggcatttttttttttttttaatatgtatagttttttccttccgagaaagaaaagcgtccattagcagaatgtagtcaagggcacaaaggaaaatctatgttttctgcttgtactgctaagtctaattgtattgccttttaatggctcaattttgcagctccaactgtgcaattg

SEQ ID NO: 10033 - DNA, 2087 bp, Eucalyptus grandis
  Intron number 8 from transcript Egrandis_v1_0.043103m (loc us Egrandis_v1_0.043103m.g) derived from phytozome v7.0 (c hr-ID scaffold_10; pos 34300435 to 34302521 reverse strand )
taggaaatttagcttcagaggcaagaccaatctctctcttttttgtactatcttttggtgctgctgtccatatcgtagatttttgagtaatttgggggcaaatcaaagtggatttttccggattatctgtagggaaaactagtattttcatcatgaactgggggtacagtaaactttgcatagcatgtttttgtaattacactttacatcttcatattgacattactacgttagccatctgtgctttactccttttgtgaccagtaataaaattacatcaaaagaaactgtttattaagaaagtttaaatacacatcaaccatctgtgtatttttgcaactatcatcatgctcttctttagttgtaactagtcaagaagcccgtgctatgcatgggtctcttttattgttatcaaataacttaaacttcaagctagtgtttgaaaaggtctagaaattgaattgtcatgaaaaggataaggatttagaccgaactttagttctgatcttaattatttactataaaattaagaagaaattaaagtgcagtctgggttctataatgttttcttcatatcagattgaattgtattcctttcctcttcattagttaatttgatgctaacttttacaattactaaatgtagatgtattgtattacactctttgagcggcagcattatgaggagacaaaatctcacaaaaatttcagataatttcagtttacaaaatttgacaatgattagaagacaaattagaattagaggtgaaaaaatgctttaattaatttcaaatgaaattgtatataattggattggtgattgcacatgaatcaaatagttcttggagaagtacaagaaataattttttaaattgtaatttcatccaccctatttatcttgttctgcaaatcttgaactcaatttgcttacatgataattgttatggaaaaattaagtagtaaaccaaatgatgtcagagattacttggattgatcttcccccccccccaccccccctaaaattttcagttttcagtatttaagatttgacttctgtttaatctttgaccacttcaaattgctaaaactatataagtacaaacttttcagatcttttagagtcataaatattttttggtagtttcttaaaaataacattctttttacatttacgcgaaggaggcttcttttactttgataattccatatttttcttaattagcggttttaggttttgaaagaaaaataaaagaaagaatgggtttgaataaaaaaataaatacttcatttagcgaaacatgttttcttggttttgtttagttagggggacagatgtcactcaaagagagaactgcatgtcaacactgatagtccccttgcttttgcaccaagatacatatatagtgttagattaagttaaatataattaacgcaacctcattgaatgggtttatactgaaataattttttgagactaatttattctgttacttgtcataaactatttgatgttggtactacattagttcatacttggagccttatttagaggagagaatttgaggatgtgggtgtgtgaagagtgcgtgaatgagtagagaggaagagctgatgagcttattctaccaaggttaaacctacttatatggaaaatggctccgacaattgcaaatttaaatttggccttgcacgtgattaaaatgacacatgtaagtattcagattttttggtgatgggcatttgacagagattgtggaggttatggacgagaaggcagttttgtgaactacgacttgtaaaagagttatttcttttgaaatgatagggtgcatctgaccccatagagcatgataccatacgtagatttcccttatgtctttcactcaagtttagctctctatagcaccttggaaaggtcatttataactcagcaaaattaatgctataattgaatcgttataaatatgtgtgcgtgcccgcaaaactgtataggctcatttttggaaattatttgtccaattctttgggggaaattctgagtcattttaaattgcaggtcactcagcttgaactccatcgccattttc

SEQ ID NO: 10034 - DNA, 257 bp, Eucalyptus grandis
  Intron number 2 from transcript Egrandis_v1_0.008187m (loc us Egrandis_v1_0.008187m.g) derived from phytozome v7.0 (c hr-ID scaffold_3; pos 12575390 to 12575646 reverse strand)
atttacatcctcagtgtacccatttgattgtccagatatcctttttttcaacctcgtttcagctattaattagaagaattttttttttttcaattaggtgagtagatcagtatttatgaggatacgtgacggtgatgtctggctgtggtgaactttccagtaccctttgctttttgtggatttcatgacattatatctcttcattgttggtgtgaaccttaatggtggctacagttttggtggacggaagtttgagc

SEQ ID NO: 10035 - DNA, 2606 bp, Eucalyptus grandis
  Intron number 4 from transcript Egrandis_v1_0.028052m (loc us Egrandis_v1_0.028052m.g) derived from phytozome v7.0 (c hr-ID scaffold_6; pos 43303963 to 43306568 reverse strand)
tcttgagtggggtcataagaggagctttggaggtaagctctaatccattatcttacttaaccttggctcatctcgtttttgttatattaggcgtgaccttatttttgtttacttgttgctgcttttggtttgttcaaaatataaacaaatcttggatagtaaactgagttcatcctcaatcatatttcaatagaaactacaaagaatctcaatgaaattatatctttgttgtttttcctgaaataagagcagccgcttcttgttggtgcttggccttactggttaaagaactgtaatttccgaagttggcaactgaactttcgatctttccttgttgatttccaccaatcagcttgttgttgcctgttgcaatttactggaaagatgatgagttgtgaatctgaagcaggaaaccttcagtcaatttccttatttaacaaacttatgtagtgtatatatggtttttatgcttcaaacgtagtgcccagaaaccttttttatttgtttagagaagattagctagaatgttatggtcagagtatatatcctttagcttttcgtttttgctatctactccaatttcattttttgtttagataatgacactgcaactacaagtacatgatcttttgcccgttttacaattcagtgccgaaacttctttttttgttcaatcaagtacctcaacttttcaaactgtgagtcaatgtgaggcctctgttagaattgcagtaggaaaatgccaatgtggacaccaccaccttcaaatagccattaacagtccatattggcatccaatgtggcctcttaagacaatggcatattaacagaaacatattgcaaagctaaaatcattcaagtctctctctctctctctctctctctctcccccttcctccctccctctctccttatcccgcaacacctaaatgaagttggtgcaatttttgccaatgaagcgaaccacgtcataaatagtgtttagctttgccgaatgcgtgagccacatcagaaaaatcatataacgtggcaatttattagataaatgtctcacattgattcacatttgaaaagttgaagtatttgattgaagaaaaaaaagtgtaggtactgaatgttgaaagggcaaaattttaggtatttgcgggcttatcacccctttctaactcgatggtcaaaaaggatgctatgaaaaggatctgtaatgttttgtcttacattagagctaatggttgaggatctttggaatttaaggcctcacaaaatctccataaccttatttcactcttaagtttctggagatttgtactttgacaagtcccttccagtatatgtgatattactttgtcaggctttcatgcagcatattaaattcccgaaaatccgggccatgtctcagtcctagtgtggctaattatcctctcgtaccggctattgatcatcaccttgataagttgttgcctcagaaattagctagtcagatgtgtgcccctccatggctggatttctcctcgtgcttctcagtctatggggcattagcagttgtttccagcccttgttccctcccaagggcaggttcttaagctttactctcctgtttgccactagaaacaccatgttcggcctgacttgcatgtgttaagcatgccacctgcgttcatcttgagccaggattgaactctctaagagatccctacttgcattacttatggcttgttttttattttctttttccatggaatataagcaagcagctagttagggaaaaaaaccataaactaaaggaagagagcaatgaaacatttaaaattgatgatgaccgggtgatttggtttttccctcaccaagagctccaaatgaatacaagagcacagcgttcaagtgtttgcgttttttaaaagaagcagctcaacattcctcaacagctacatgccattaaacaagtgctttataaatgacagagagcaggcaacacgcctcaacctgtccataattaagaaagtgcagttcctctgtgttctcctgtcaagatgatgcatcactcagtggtccaacatgaaagaagctcaggggagcccttgtctgccaataaatggaatctgtccatgataaaaattttgttttcttgaaaacttacggcatttttgattctttaaaacatagttgtttatgttcttattgagacttcctcccttgacacttggatgctggtatgaggatggatagcatgtgctatatgttatttgaatgccaattgtcacattgtgcccgttagattgaggtatcaaagctgctgtctctgagtttgactctaagctgttccatatcaagtatctcacattagagacaatgttacttcctggatcctggatattgctttggcagattctgctgtatgatatctggatttgatatagatttttctcctggagacttggttaaaagtagcattttaagaggtaggcatggcaacttgagaggagccgaccgtatgtgtttttttctgttgagtagagatggcgatgttactttatgccacacatgttctttttcgttccctcttttctgatggtgctgaacgtgctacctcctttgttaaggtttca

SEQ ID NO: 10036 - DNA, 7634 bp, Eucalyptus grandis
  Intron number 3 from transcript Egrandis_v1_0.020022m (loc us Egrandis_v1_0.020022m.g) derived from phytozome v7.0 (c hr-ID scaffold_8; pos 68244633 to 68252266)
gtgaggcaggcctatcatgctcgttataagaaatctcttgaagaagacatcgcatatcacactactggggatttccacaaggtactcctagcttttaatctcattgcaggatcatcctgtcgatcaaatagatatgaagtcaattttctgtagttgcactgcgtgtgaaagtatatgtttctcaaactgatgccttgaatacacaaggccagaagcttggagatttatgaagagaaatactaaaatatctttcaagtttgttaggtatgcttctaatggcaacttgtaagaatcacagaaatgtgaaagtcttgtgcttttctatgctattctgtttggctgtgtatgacctcatagtttcctagagcttgactttgttgtttggagctcaacaaagcatgcttattgctcacgcatacactgcagctgcttgttcctctggcaagtacctttcggtatgaggggcctgaggtgaacatgacattggcaagatcagaggctaagatacttcatgagaagattcacaagaaggcttacaatcatgatgagctcatcagaattgttactacaagaagtaaagctcagcttaatgcaaccctcaattactacaacaatgagtttgggaatgccatcaacaaggtatcctacttattttctccatacctacatactacagtattgccaaatttataatggtgtcaagtggatcttgatctggaacttgaacttaactaagcaaaggattcaccttggactctctgctctttggattaccttcagaatttgtgaagttgcagtttataatgcaattgcacatgcgtctaaaagcaagatattgaagtgctcccacaataatcctttacttctctggatgtttggcattgcaaatgtatctagagatctactctgctacaatgagattcttgaatgtgaccttttggagagtggaatgccacgattaagattttctcttgataccggcagcttccccccacattttcctgtactgataaatgaggacagatgaaagatctttttcatctgatacctagatccgtatccatcattatcataagacaaaacttgaaaatccatattctttggtctctaatgtaacaagattgatgttttgatagtagtgaatcgtcctcagatagtttttattataaaagagaagctgaaacctccctacataaagactaacttgggctgatgtcactttgatctgcaagttgcctagttgatttctcctgatatatgtgtttatgaccactctaatggtatcgctagatatttttcatttatatatgttcctattctgtatgtcagttgttagctgttgaatttctttcaatttcttagtagagatttttaagttcattttaagacacagcttactctgggagattgctttggtgctgtaatcatctggaaacctctgtatgcaggatctgaaggctgatccaaatgatgaatttctgaaactgctgagatcagcaattaagtgcttgacttatccagagaagtactttgagaaggtactgcgtctggccatcaacaagctgggaacagatgaatgggctcttactagagtagtcaccactcgtgcggaagttgacatgcagcggatcaaagaacagtaccacaaaaggaacagtgttcctctagatcgggctattgcaaatgacacatctggggactacaagaagatgcttctcactttggttggacatgaggatgcttgagtgagacttgtgtctcagtgttccgtgcgaggtagatttaactggctgcgagatgtattgttatggttggagttgagttgagagcgtcttgtttaaggtttcgtgtgcgctcgtgatttatgtttggggaactttttgctggtttgctatggttttaagatagccatggaaaggtgcatttagcatcagtatggtcatgataagctggtggttttgcacatttatggtgtggaatccaactaataactgggaaaaacgggactgagaagtgattgtcgaggaggttatgtttatcaatcttaatcaacttgcttgcttcttctcaactttgaagtcgtaaaacataattgtcttcgctacttatgtgaggggttgtcttcagagaaatgacgagagatgtgatagagatagcttaatcctatcccttgaaagccacactcaagtgtcacggtcaagaggtttccatggctaaaggaccgtgcatcttcaaggaggacctccgagatcaccatgatttcccgcaagagagcttccaaaacattccaagggcgggcgatatgataattgagtcgaagtctagaactctcctatcattagtgtccatagttggtagattgagtggtacaaccttgtctgctcgatgaaaactcgattaacggttgtaatgggagggcttctagtataagaaggttccctccccctcatttgtatccatccaaccatttcagtaatcaaaaagttctcaatccgaatgaaccgggtgagcaagcgagcgatcaatccgagctggcttaggtgccccaatgatccgtaacacaagcatatgataaaaagaacaaagttgtaacagcaacatggtattattgatgattgctatatattgctctttatttctcaagaatcccagcaaaatgatcctctaaagatgtaaaggaatctgcaaatacctccattggtcaaccacacccagacaactgaaaattgatagcgttagattatcccaatatgcttgaagccgaaggggtacaaggaggaggcggagtactcgaaagagatgataccaccggagggagagctttgcctccgtttgccaagcagtcgtcctcggcattgccaaaccgctcgactatttccaggtctgggaatgtcagagctaaatgagagtcacggttaaggtggacactacagagcaatggacgggcacaggttctttatttcaaccaagaaaaccggaattcctattttttcttggataaacaaagtaacaaagcgtgacccaagacgggccccctctaaccggaccagatggatttatgggccacttggttgggccggctcgacccaacagcaggcttaagttctattttggagagcaccctagtgatggaaatgcaaggaaaagggcccaaaagttgtgttcgtttgagttaaaaatatttccgcgaattaggctccatttagaaaccttttatttttttttggctctccaaactagaaaggatagaaattcatttagtaacatcaattaatttttctattccctcgaatagaaaaacgattgaggaatagatttggaatagaaataagaaatagaaaaaagtaacttcttgaatttatagaaataagtcacttttttttttctttttttcccgtcttcttccttgccgcttgtccccccctactaccgcctcccctcggccatcgggcggctgtggccggtggacggcaaacaaaggacaggatcaacaaccggcacatagtgaagaaaagaaaaagagaaaaataattttaaaaaaattattaaaaaattaaaagaaatgctacgttataagaaaatttatggattgtactaaacgcatttatattctttttctatttcgagaatataaattttgtgtagttaccaaaaatgttcttttacttagaaattattctagagaataaaaatagaaaaagactatttcttaaaaaaaaaaaaattctaggaacaaaaatgttactaaacagacctttagtttctttgactttcatgtgtttggtttattgaaaataatttctatagaaaaccatttaaggttgaacaaaatattcatacttaaaataagaaaaatgaattctctaatgaaaatgatgttcacccgtattgttatataaagtaaatggccttttctatttttaacatatcccaattgttccaaccccccccccccccccaaaaaaaatacttgtctcataaatattctattcatgaacaatcaattcgtaatttaattttaatttaatctctcacatatttcagcattcaaatttgaatttttttttcccatccaaccagcaccatcttaaaaaaaataaaaaataaatctcaatacatttttctctttccacgtctattgattcatttttttttttgtgttgtctgtatttattaataatttatttctcgttcctaatttatttgttgcgcatatgcacattcgcgagtgttatataccgaaggtgcttaacattatttcaaaaatcttatataaatgattatataatcacttaaaaaatttcacatgctttaattaaatcttttccttatatgttaaagaggaaaaagcaccaaagtcctacattttgcttactgtgatatatttacctttatgatgtggacacatagtggcaaacaaagctaagtgactcaaatgaaataaaaactgcgctgttttgactgggaagtatgctgacttggtgcaaattttagggctctttgttcatgttcttgttgggaaataatccagctgtttgtgtttgctgtgtttctattcaagggacagaacacacatgactagacatgggaaacaagcacattcaggccaaccaaaaaattgacttcattaagtggtaatttctctgtgtgattctcataaaaaacgtcagtagaaagaaagagaaaatacatgaatctgggcttcatttggttacgatacaaacggatatgctcatggtaattcgtcgaatgaaaaattctcggaaaaagaaagagagagagagaatttagttaagtagaatgttcgagcccattaattttttgagttgcattgagaatagtcatctccatcataggaaacacttaagccctcatcgttactcaccgatcatcgctacagcccttgaggggcacatagatgccgctggaatcgtgacctacggctaagtcttaaagttgctggtatggtcacatccttcaactactgactaccgtttgtcatccatgctttagccataatactctccagcaccatcatcaaatcaacgagataatatttacattacgacgtggatcttttcattttaagttaagtgatcgtcatatcaactttatgttgagataataattgggatgggacgttgtctttttcaattttaagccaagtgatcactacttcagctccatttgccatcaacatcccgtaagtctttaagtccgaacccttaacatattcaatcggaccgattttcctgcgtaggacgctcgatttgttattgtcggtgcgagggaccctagccatgcccgatctctcccaccacaaaatatgaacgcgataaaatattttcttccgggcgtgaggaaagggagagcgtgtgatccaaagtcagaatagaaaaataattcattcagaaaaatacaaatgaaagtttcttcttttgaggccgggcagaggcagatgggcatgatgcctccaaatggaaaagcaacaggagagtagtcatttactttttgacaattggcaactaattaaataattaataaaaggaagtcgaacaattcaaaccaaaagttggtgtgtacgtgggaacacgctttcagatccgcatttatagcaatcaaaatccgcccccacctgtcccactgtcctaataaaagaaaaaaagaagaaaataaaatcatatcctaaagctgaatttggcaataactttaacttattcatatcataccgagcatctcctcttttaggttcaataattctcattaattaattttctaaaaaatcccaactttaagttcaatccaaatttaccccgaactttatttatcaaaaaaactcaattttaagttcggttccaaatctactactctaaactttaactttaatttcaaatatgtcattgttagtcttttgtccaaaaataactatttaacgtctctctcaaagaataattttattttggagataatttccacgttaccttattaatgttgatttgttaccgatgtggaaatatcacgccaaaagcctcatggtgattttggacggtcggttaacaaaagtaaatttgagattaaattatacgtagatgattgctttttcaaaaaaaaaatttgagataactttaggattatgctcaaaattaataatttctttagatcaaaaaagatccaggattggatataaagttgtagacttgtttttagacaaaaaaaaagaagaagctcaggttagaattgagacatgacataaagtttgagattcttttttgaggtagaattagattaaatctaaagggttaatccggtaataatcttgatttcccttaatatttctctgtctgtctttgtaaaagcccggcacagcatcgtcttcggctcctcgcgatatcaccaacttgcttccgcacagagagagagagagagaatggcgactattacggtgccaccgtcggttccgtctccggctgaggatgccgagcagctccaaaaagctttcgcaggtctcctgtattcatcatcatcatcgtcatcgctaaacttttctctttccatctactttcgtgttgctctgaacattcgactacgtggatcctcttcgagctgtcgtttcgtgcttcgatcgtcgtcggtttcgggagatcggatgctcatctgggtgtctttatttttttttctttttaatcttagcacaatgcatgtccttctctgtgtttgtttcgatggatctatgatcccgtgtcctgctgcggagtctctttctgatctgtgtcatggattgttagttccttctgatcaagaatagtttttagcgctagacgttcctttgtccgcgttgatctgatcagtcttgtcttacatgtcccctctttgcttctgctactggatgagctaatcaaaaacacagagaagaggcaagagccattgcttccgagttcatttgactggtgttaagcacttctacacatggagtttggtagtgattattgattatgcgcattttgtaggacgagttcagtggaaaaaagttcaaggatgatgttgaataattgataaaagttctgagaccatttgtgtcgtaatcgccatttttcttctgggtttttgtcaatcacgcgggctgctcttctagcgtatgtatccgcagcgcatttttgtacgttctgatggttgtttgtttgtggtgggcgagcaaattgtttagctgttggaaaatttgtgtccgcaggatgggggacgaatgaagatctgatcatatccatactgcctcatagaaacgcagcgcagcggaaagtaatccgacaaacatatgccgagacatatggggaagatcttctcaaagcgcttgacaaggaactctctagtgactttgaggtcagttttctattctgcagtgtgaaggatctctccaaaagccggttcttgctcagctgttgtcctctttgtttcccgtctcttatttccatcaaacgtttatcagagatctgtgcttctgtggaccctggatcctgcggagcgtgatgcgttcttgtccagtgaagctaccaagagattgacttcgagcaactgggttctcatggaaattgcttgcacgaggtcttcaatggagttattcatggtgaagcaggcctatc

SEQ ID NO: 10037 - DNA, 1583 bp, Eucalyptus grandis
  Intron number 2 from transcript Egrandis_v1_0.030080m (loc us Egrandis_v1_0.030080m.g) derived from phytozome v7.0 (c hr-ID scaffold_6; pos 53468991 to 53470573)
gaagagaaagaaggcattccacctgtccagcaaaggttctctttctctctcgtactttttggtgctgttatcgcatcgtttttctcttccttttaacactgtactaatttttgaattttgaatttctccttattttgtttcactcctgcgttgctgcaagtctaactgtgatttcctggaacttccttaggtactatatggtacagttttccttgcttcatgtgtagatttggtagattgtgaaattctgtgatatccctgatacttatctggtccagttaatccactttaagaaatactactatgggttctctgacgtgagtgctttgcataatcattatccttggaatcggattgaatgacagggttctctcttctgtcagcttattgcttggttctgatttactctttttctccttttctagcgaaactaataactcatttggtggtaaaagatgaaaactttcttggcatgcatttacttttgtctgttgtctagggatctcattctaggttcatgaatctttatcggattccttagatgggctgtgtttaattagacgtgggattgggtcttcgtatattttttggcctttttcattttgtgaaatttttgtttcgtgggttcttcggctttcgctgaggagacagttgtgaaattgctatccccaaaaacaaaaggaaaagagagatatctaaaagtctgcaatgtttatgggcatagattcattggtttctataacgtcaatcatgaagtaagctctactataacgtgttttatcccttcaattctaaatctctgatcctttagctcagagcagaatcctcgctgctttggaactttgggtggcttggttggtaatgataaattctggggaaaccttgttttcctggtctcttcattggtgtttatttctgagagttgtcttcaagctatatgtggcatttagcttgttcaattgatgattgcaatattacaggcttgttttatcacttgcttcactgtgaaagaaaatggtaaagctctctgtggtcaatgttttgctttcttgttctaggaaaatgcaactttgttagtcttgaaacttatgagaccgttcttcatccacttaattcagttttttattttcttatatgagttcatggtagtttggttgagtgagtaatttcattgtagggatagacactgtgcagaagtgatactctcccatatttacatggagggaggtgatcgtgaaaattggacctgatcttatatctacagttttgcttgcacttatatattgatataatcccatattttcctgactttatcaaaaggtcttggtgatatgccgttttgacatctgctaaacactatgccaccttttaatcttttcgttcttaattatatgcattcccaatgtggctgcagcaaagatcttctgtgagcaagtccatgcagttatgatcaatggtcttctccacttccattatttcattttttttccctcatcgaaactgatattgacgtggatatttctttggtaatggattctctgaatcttatcatactctctttcaattggtttacaggcttatat

SEQ ID NO: 10038 - DNA, 1596 bp, Eucalyptus grandis
  Intron number 2 from transcript Egrandis_v1_0.045817m (loc us Egrandis_v1_0.045817m.g) derived from phytozome v7.0 (c hr-ID scaffold_10; pos 21816088 to 21817683)
gtcgccatcgagagcgattacacggttagtttcttagatttcgctccctttttagagaggtcattgcatgcacgcaaaccgcgtactatgttcacctaatagtacatcttgatctcatatgaacctcacatggaatccagcaaatttaatgctccaataatgttggaagcatggttccagatcactcaacaatttcattattagatctatcaataagaaaaaaaaaggaaaagggaaaaatctaccaaatatctcttaactaattataagaaatatatcaaatactgtgctaactaataaatcctaactaatgatgtttgatatatcaaattttaatcaaataggaaagtacacttttaacaaatcttctctaacactccctctcaagtaggcgcatggaggtcacgaatgcccaatgtgctaacgagaaatgtaaaccgatcttgactcacgtcttggtaaaaatgtttgccagttaaagtctagagggtatgtgctcaattttaatggcctcggactgtgtgtgttctagaacaaagtggcggtcaatctcaatatgttttttttgttcgtgaaatactgtgtttgctacaatgtgtaaggcagcaatggctattgcaataaagacccatcggtttgtcgtgcaataacctaaggaaaacaagaaagtgcataaccaaatcagttcaatggtggtagctgccatagcatgatatttaactttagcagaatatgagaaactgtgatctgcttcttggttctccaagacactggatgacaaagtaacaagtaatcgaatgccaagtgatcgggcaacttgcccaatcagaatcacaaaaggtagtcaagcaaaatgaagtcgagaatggtaacaaaatctcttgtcttggttttttcttgggatattgaaaaactcgtatagcggattttcaatgctatacgagtttttcaatgctactcctttggatgttgcatctactgaaaaacctatgtggacaagataacataattaggtcgagtgctacgataaaaattaacaaagattttgtaaatctctaatttttccctcatcagatagacctaaattgctcagctataattatcacacaaatattatacaaagcattgcttaacggaaaaggaaaagggaaaatttacccaatattatttaactaattatacaagaaatattatgctaacttataaatctttacgataacagataccctgtaagtaaagtaaatcttcagcaaatcttttctaataatcacctctacgggagaccctttttttttttctttttttttttccttttcttttaagcaagtagtataggcacgacaacaatattgtattcaataccctgactttactccaacaacacaggacgacgaatacgtcaacaagctctcctcaagttctgctcccccagcatgcgtatcacaaggatgggcatgggcaaatgcctgcatgccgtggatgtcttcaggagggcctgctgatgaacaccgagaaggtccgatacgagccggaaaatgtggggtttgaggccgctgtagagaccgagcagataatcctgtcggccaccgagctcaa

SEQ ID NO: 10039 - DNA, 1271 bp, Eucalyptus grandis
  Intron number 5 from transcript Egrandis_v1_0.000450m (loc us Egrandis_v1_0.000450m.g) derived from phytozome v7.0 (c hr-ID scaffold_6; pos 35455755 to 35457025 reverse strand)
tactcctcaagtgctagagaaagacattcaatccggtgtgtctctagaagctacaatcacataccatgtttgggattgatgctgatgagggagatatttatagtttatcaagctggcacaatgacccatcaggattctacggaataaagtcattagtagaattggtcatattttgcaggaattcttaaagtgagatcatatctaccaaagtatctttgttgtagggttgaaactttggatcccattagctcccgtagctttcatctctcagtgttagtgtcaagtttgtcatgatttgaggaatgtgcatgttagtactttaaattcagtttatgaaagaaatggtaatatagatgcaaaattcttaagccacataagtcgaagccaatatggaatccatcctgtcttgaagctcttacatcgagtggaagtggaacagggttatcatctgaaattggttttgtaatgagtctttgttaaagctacttttcgagtcagccaaatgagaattaatggatctctaacattgaagtgtaccctattaagttagacaaaatgagtaagtgatacgtttagattactcatattataaatgaatgaagtagaaggaatcaatggttggttgaattaaagcccaagattataagtggatgcttataagctggagggaatatattaatagcaggtatattgcatgcttgtacaagctttgcaatttggccgtcagattcactttcctttttacatttaaagtggcaaagttcatatgtaccatttgaatgaatgtttattctctaacataaaagtatttacattgtggaaggccattcaaaggacatgtataattatgaagataatcttctctctctctgtttatcatttgcacgtaatagcttcacttttggtaatataatatttgtattgttttttgaagccatggtgttggagtttctgtttgttggcatgaccatctagcatttcacatatgatattgtctgcattaaactcatgtactcttgaagtgtttgtaatacgtaaaccatttctatgcctagtgcatacaaggataatagcatgattgttccttctgcattttagatgatgccaatagagacttttaggaacttttgtgcctgcataactttactggataatattttgattatcaattcttaggttgttagaaaaattattcttaggttgttagagttggctcttcagtttctgttgttgaaacttatcttgctaataagttgagttttcgcaggaac

SEQ ID NO: 10040 - DNA, 7201 bp, Eucalyptus grandis
  Intron number 1 from transcript Egrandis_v1_0.051956m (loc us Egrandis_v1_0.051956m.g) derived from phytozome v7.0 (c hr-ID scaffold_8; pos 38860954 to 38868154)
aaagctgattgagggtggagtcatagacaacgagggtaaggacccagagccagaacccatgaacagtcaaatctagagaagcctcatattgtgtactctttgtgacatcctgaaaaattgaccctgtctcaactaaatgaaattggctttttatcgacgcacctatggtcttttttctctgagctgatcactcatgagataactaacctatcaggtaaagctattaagggatataaatgcaacagacttgagaattcaatcagaaatcgactgctcgaccgtgctaatcggcaagggtcagtacgacaccgttaaaatcgattagagactagagatatgttgattcgacagaagcacgtaattaaattatggatgattccacctgattgcaaaattcatgtccaacggcactaaaccgatttttctgtctattctgtacccagtacccgtaattgaaaccttgggatttttacaacaaccgaaagttgccaacaagtcggagatgcacaaatgcggattgaacattatcaaccatgggtcaaacgcaataaaattcataaaagctacttggtaggttaggtcacgttaaaatcacgcccaatcaaaattaaccacgaaattgaactcgttttcgaaaatcgaaaattcgagcgtgtcacgatttatttttaggacattgtctcatcctttgaagaattttcagtgagcccaaattttggtggaaaatcaaaatttggcaaattaaattcaaggaaattcggatgggcaaaattgagggaatttttggactacaaaatggattgattggtgaaggaaatgcatagaattcatatgggctgagtgggtgtgatttttggccatcaaattgaagtattttttggagaatttagaggaaattaagggaaattcgtagggctgctgcaaaggggtgttttggccttcaatttgggttggtttttttaggataatgtgaagaaattagcttgtggaaaaagcttggatagcatgggcagaagactttggggctttgacactcattgcatgggatatttttcttggaacctcattggccacaaggtggacttcttggtcccttgtctcccctttgttccccctccttctcttggtcgaccagccccctacaaaagccatcctcaagttcttcttcttcttgcttcttcctcaacatcatttttcctccattgttgaagctacgagcacccaggaccaagctaacacagccagaggccctgcaagccgccattcgagtcgtccgcgtccttgtcatccccgctcgccagctccgactacctcgctgcccgccagctcgaccatcgtccagcccagccgcggcctccttctatccaaaccctagcccagctctccaccattggtctgcaagccctccaccatcaacccgcctctccattgcagccatccagccccctaaccgagcccgaagccagcaatcctcaaaaccgggtctcctaacttgggctgaggcttgcaaggctttttcagccacttccaggcctcctttggagtcaccataggcctgggtctttgtcgccgtcgcgccgccgtcgccgtggacccgttagctcgcttaaccggtgagttaacttcctaatatccaattatggggttaattgcacttaaagggagattagttaggctaattagggattagtgtaatccttagtagttcaactagttagttagtgtgactaagtagttagaatagttagttcctaggctaatctagttaggtggctagttatgtgatatagttagtttaattagattaaaattagttaacttagtttgatttattagttagtccaattagattagactggttaggttatttaatctaattaagtgttttagtttaaatagtatgcaatttatttaattaattattaattagcgtaaattataccgggatagccggttatcagaattttacgccgattgtcatggtggcgttgatttgtgaaattgattactaatttatgcaattgggtgtgacaccccgaacccttcgcaggtcgtcaccagcgccggtgttacatcttttaccatctctatctcttggctaaattaagccttgccagattataggcatttttttttttttaaaaacggtcccatgcgcgactcatagcggaagcaaaattaaacatctccatctctcccttactaacccatgatacaaatacacaccaactacacatcaggattttataaataacgttgacgctttgcttacatacatacatatagcgagatggggtttttcctcgggtcggtacaaaaggaacagaaaaggttaagactctgccatgtcccacctaaaatctcaaaaaggaactccgacctctaacatcatatgagcacaaaaaccctcccatcacgagcgtcaactatctataccaaaaagcggtctagctcctactcctcgcgtgcgatctcacacccatcccggtgcgtcaggtggtggcggcggcagcatccctcgcatagcaccatctcgacggacgtgcacggacaaaaactcttgtatgacagggcccccagccaggccgatatcatacatgactaagcatcgtactcggataaaagtcaatccgggtaccgagggacagtctatctcagtcatctccacctcgacgtcagacggaataccgtaaaacacgccacgcgaaacagcaggcagtggcatagtgctaatctgaaatgttatccccaaaaggggtgagtacaaccactcagcagatagggaaatccaatcacaactcagtgcaccatgcataccatcatacaattcaggcatcacttacctttttgatgacaagcgtattcatgcatcatcatagcatacatatcatcattaaccatgcatcaccatgcatatcacatcatatcatcattaaccatgcatcaccatgcatatcacatcatcattaaccatgcatcaccatgcatatcacatcatatcatcattggccatgcatcaccatgcatatcacatcatcattaaccatgcatcaccatgcatatcacatcatatcatcattgaccatgcatcaccatgcatatcacatcatcattagccatgcatcacaatgcatatcacatcatagatcaatttccatttttatttatcaattgatccccacattatcttttctcaaatcatcaccatcccttcgggcagaaacctccgacagggtatcattatcaatccttcgggcagaaacctccgacaggattccatgatcaatttgatcatcacccttcgggcagaaacctccgacagggttcccagtatcccagccatctcatggccactgggcttccggccccccacattccgggcatctcgcacctcaactagcatcacgaggaacctcccttcgggcagaaacctccgacagggacttccggtctttacccttctaaccggggatctcgcaccctaatcctggcatcgcgagtcactcccttcggacagaaacctccgacagggcttccggccccccacattccgggcatcctgaaactcccagggaatctctggaattacaccaccaggccaccagacaacatcctccgccacaacctcttactcacataccactttccactttttttatcatccttttcatcttattatttcatggcatatgaatcacacacacgcatcatgattcataatcatacatgcatcaatgccatataacaatgcatcatattcatgtgcatacatacacccatgtcatataacaatgcattataactcaataaaaatcttggccaataaaataatccactttttattttattattattttattattatatttatttattttcataaatattttatttaatatttatgattttccaaaaaaatcataatattcaaacaatcattaaaaaaaacaattaaaatcacaatttcacacaaattcatggtcaaatttgcatttcacataatttcccaaatttccacaaaatacacacaatattcggataatggccagattacacagttttcaaatttattcaattaaaatactcatatgacctccgaaaattcccaaattttacagggtgatagaaaacacattttcgtgcattcttcatgtagaactctttgccaaattctttatagattaatttatacaactccatgaagcttctggaacctctaccgtttcgtccagaacgtacatcaccgaagaacttaggtttgacccatcaaatctctttcttttcttctgaaattcgagtatgttatgtatcaatgtgtcctttacaagtttcatgaagatatctaggttaaataaccaaagcatgatcctcttttaagtccttgaagcctcgggtatctcggttcacttcaaccgaaccaaacatctcaaagatccagccgattaactaggctatacttgttcatttctcttcaaatttgagtatgttgtattttaggatgttaccaacaacttccatgaagacaacaaagtgagatctccaacagaaatcaacatgcaaccaagaaatcatcaagaggtcagtaggaaattcgcagatctgaagtctccgtataacagagcttttgacccctcatatcaccttcgttttccatgaaattcgagtatgtcataactcaagatgttagcttcaactttcatgaagacaccgaagccaaaatcacactccaaatacacatgcaagctcgaataggaaactgtctaccacaaaccgaacggaaacagccacataacatgatcacatgcaacccttacctcggttcttcgcccaaaccacacctaaaatctaacatgcaaccatcaaaacaacatgcaagagaagttatgaacccccacttgccttaaagaagaacacacagcaacacacggcggcgtaggacggtcggactaggcggacgtacggcgaacgggcggcggaaactctcggctccacctcctccctctcggcctctcctccgctcaagctctctctcgcacactctctcttggacggaaatgaagaagcaaccggccactctctctccaaatccccctttttatactcccctaggctcatcataggtaatgattgatccaccacacctatggccaatgcatgctctttactttatgccacttgtcacactaatttttgaattgatttgggcttgggcttgggcttaggcccaaccggccactcctccttgggctggtcaaaaatccttcttgggcccaatgggccgactagcttggcccaccaagctctaggctaatgggtccaaggcccatttcgaaaataagcctattttctcctcttttttttttttttgaattccttttaattaatatttcgaaattcaaatttcatcttggccaaagccttgggatatttttaattattgaaatttaaatcatatggccaagcattaactaattaaatttaaatttccacaatcacaagcaaaattcatcaaattaaaagacaaattggctaaagcataagccataaaattctaccacctaattaaagacatttaacacaccttaaggcttggctttgaaattccgggatgccacattgggtgcttggtgatgattttaaattagtatttcaaaaatatgaatttttggtatttaattagaaaaatactgagtgtcaggttttgacaccaaattttttttaagtactatataaaatcgtggaattttaaaatgagagaatatcacgttttatgattcgatttgactgtgtaaccaggcacaattattttatcaggtatttttaatatgaagaaaataagccaagtccattatttgaaattgaggcattagagtgcaaagcacgatgtccttggcgagaatggatgtgcatgtgatcactatcggaacccatcacgatgtgtttacaacggacaatgcctgattaagttcatatacctcatgtcaacagatgccggtcgcagtggaggctaggctgatgctccttcgggaatgccatatagatgtagacattgtcatacctgatgaagcgggacgatgcctagttatgccgatgaccgctgactattgagttggccatggccattgggtcgtaattaattgggacacacttgagtgattgatatagtcgtgcctgagtatgggacgaaattgtgtggcacagaatggaacttgtcataacgatttggccttataatcgggacccctgtgattgattgatatatgaaattgaagtgttccaattatcgtttacgcttgctacatttatatatgttatatgatatgtactaatatgcagggaggtgctgaggcgaggtaagtcctttatggtgtatgctagggctgcctctaatgtgaattctcgtcctaatcggagtctagggtgtagactcgctgagatttatctcaccccgtcgtggtttaaatttttcagatccataattagaggtacgtcatgtatgttagagggtcccataggaggtaaactttcaacactcctatttccctatttccgggacatacctgacccgtgagttagttgagtccactgtttggttcaatgagggtctacctcacttggtacctcatcgtttcaaagcgtggtaccttaacaaacccaatagggtttgggagggtcctatgggaggttttgacgagcctcctgtcgggatcggggagtgggaaatagggcatcctatggatatcgacacccctgatggtgtcgtggaggacccaaagcccatgactagagagtccgaaacttaggtggctcaatagctctttttgagatagacctcctatatataaactgtaggtttgacctagctgtatatataagtgggttttatgaaaaaggcattagcatgttttactatcccatgtgtttgtttgttggttggggagttattagttcgcttccgcgtgtacataaaatgaatggatcaatgacgagtcccgggaacgtcgcaattctatcaaccatcaagggatgttcgcgcactcaaggtttggggcgtgacacactctctctctctctctctctctattgctttattggcagggggcacattaaagaatcatgcaattagcttatgtgcttgtaggaacaagtagtctaaaagataatctaatttcgcctaaaaattcatgcagtcattgctctg

SEQ ID NO: 10041 - DNA, 866 bp, Eucalyptus grandis
  Intron number 1 from transcript Egrandis_v1_0.017752m (loc us Egrandis_v1_0.017752m.g) derived from phytozome v7.0 (c hr-ID scaffold_466; pos 8195 to 9060 reverse strand)
ctggcaggttgtttccgaagttcctgtctttgcgtggcctttgtgatctgacttaccaatctttcgtacccttcgctcaatgagaaaacgggtcagattctacatcatcaaacctatgggacttaagagaatgatgaaagggaataaaaaaagaatagaaatttaaaataaaaaaaaaagagagggaaaaataataaaaaaataagtagataaaatgaagtagaagaacccagatttcaaatgaacaaattaaaacttgaaaaggatctttctaattctcgaacttcctgctaacatcgagtttggtaatcatttgatttgttgctgtctagttagtagttcccagtcaatttgaaggccacagccagtggtgcactagggtcaggttatttccttcttctaggtgttatgtatggattcttgcattcgtgaatggggtatagataagtgacttgtctactccatctagagcacaatgacatggttttttcattcgggagtagcgtactgctgcatatactcacggataatgtgagtatcccagtgaatttgcaatcataacctactgtgatcgctcaatgttcagagcccttcaccaatcttataagaatcgtctattttgttccctcttgtggtcgtttcgtacatttccccgaggatcttcgcagcttcatttcagcattactactgacgttgtcgctagcttttagtaacaggaatgctgctgcttgcaccccctatggtggatgaatatgattgattaaataggtcgtatgaagcttcgaaatattacaaaatcctatttgttctttgattttgacttttttaaccctgatttctaaatagatcggagagagagttcctct

SEQ ID NO: 10042 - DNA, 3135 bp, Eucalyptus grandis
  Intron number 7 from transcript Egrandis_v1_0.002622m (loc us Egrandis_v1_0.002622m.g) derived from phytozome v7.0 (c hr-ID scaffold_7; pos 6076700 to 6079834 reverse strand)
agcggtcattgttggtgagtttgtgacaatttcacaacctgtatcgtgttcatgagattgtgtctgtatgatctaatatgctgtttctaacgggttttcatctggggatcctgagcattaacaacttagcaaatggggatcccctgttttatctatcctcatgtttctaatggttttcatctattaaagggtcccacattgcttgcctatgggggattctatgaaccttatattctgtagtctatccctcgacctattggcttaagtttttagattagactttctaacatgctatatgagccaagtttttctctaagtttattttgcttgtgtggcccctgtttgtcaactacacatgctgttccatatctggtttttcacgtggtatcctatatcgcttgtctatggggtttctaagggccttacattcatatagttttccctttacccattagcttatgcttttgggtgaatcttctgacagcctaattgcaaaatactcaagtatgatcaatttatgatctagtactatccttgtatgctggttctttatgtcagttgtgaaaaggtaccctaatttgcaaattttagaaaaaacatatttaattatcttgttggtgtccacgtttttcctttaagtttcacatggaaactttatgcgatacatattggtcggaaacatttgaaatagtcgaagccattttagcttctctaacataagatgagggtttttcttcatttccatcaagttgagttgaacagccataaactgaattcaatctactcttaatttaatgccatattagttcaatcttttagagtgttattgcttcaagaagaaagtgccactaagggatctctgtgctgttgaaagatcatggactggaagtttttggtgaaggaccaattagttagattcttatcttggtaccctgcaggcctgcattttattattattcctcattgaaaattggctgtctattgattagtgtcttcacattctttagtcatcatctgcacaattggaacttttgttctctagaatgattctgagatcttcaaggcaaagactttatcatgcttgagaacaaaggatttcaataatagaaattatcgattggaagcgagtttacatgcaatgcaagggagcaaaataaatgagtagataaggttgtggtgaaccacataagcatatgcagacaaaatttatcatcctgtggttagttcaagtaaattatgatggggataaattggatgaatgtaaaatcgattctcaagttcaaggtatctccattgtgggtaaataatagagaagtagatgttgttccagatattaatgtattgactctatcaaaccatcgacattgcttgtatgaaaggtctacaatggcctttaatacatctcttccctccgcctcatagcttaaacttttaggttggatttgtaacatgctatcggagccaggtttgctttatggttgttttgcatgtggctccctgttcgttgattccatttggtctcagtctggtttgcatgtggagagggggcggtaaagtattctatgtcaacattggacttatatacatgtgatctccctctagagaatatcttaaacttagtgaagatggagtaatgcatctgttcatgatgcaaatcagttgccctagcagacttactaaattgttttgactttgttagttatgttaggatacttgtcctaatccagttagaactcagcctagtagaattggaacttttgtcattgatcttgtttgattggtttccttctatgtgagtttcctacttctacttggaaaaggattgctgggccaatctatttgttgttggtcaatccatgcatctttctttctattgttttatcactctattcatatttgtgacttccacattatgaactttgtaccgcgcacataagttacacgcgctctagaagagcgcgtaggagagaattaataaatagaatatgaaaattaataaatagaatatgaaaaaagaaaataatatgttttcctgtccaacagtgaatgagatttgttgtactttcagttgttctttgcacttaaactgtatgatctgattttattctttaaagtgcattcttctgaatttggggccttgtcatgatgccttctactcttctgagtcactttgatggcaactttcatgttgaattccaaccaaaatagatgtcaaagtttaggtcaagctgttgtacattctaagtgtcagttcatttgattttcgaggtttcctccaaaattaaggattacatctagatttccaaatgcgttttgtcattgatgagaggtagaattataatctcctcctctttcatataatatcctaacggtaccttattttcctgtctaaggccatagtaagagataaatctttgtagattagttggaccacccatcactttgttgctctacatgcctagaccattatttaatagagaatgacatgaagttctttagtggatcttaagaacaaagagtagtctgataaggtgatttaaatggacattcaattgtttcaaacatatgacaagagaagtgaaatggacaaatttgagtgagatgaaagtaaaatgggcaatgatccttattttcttaaaacacgttcttctctggagttgcatagacttttctgaatatgcaaacgcaagttttggcctctttgactggttccctgtacctaatcattgcccatcagactagccaggcatattgatatatacattcaagacacccttgcataagagcaagcacaagaggttaaaatattaaagattgaggtagtgtaagtaataggagttgtccataaagttgtggcctaaggaggatggaatgggaattcttctattatggtgaataataaatgaagtgggaaaacttctcttatggtgtgaatacacatgactggatcacacagttaacagttatgtttatccgatccccttccctctgacttcccaatcgtcaaatctctgtctgagtaactttagcatgttctttgtactgctggaatgaaggatatggcctggaaaaacgttgaccagtttcttccccgtgacagggtgactttctacttattgtcttgaagaatcttct

SEQ ID NO: 10043 - DNA, 1840 bp, Eucalyptus grandis
  Intron number 1 from transcript Egrandis_v1_0.045412m (loc us Egrandis_v1_0.045412m.g) derived from phytozome v7.0 (c hr-ID scaffold_2; pos 53153157 to 53154996)
ctgctcctggtatctctctctctctctctctctctctctctctctctcgcatgcacgcatgcaaacgcacatacacaacccacgcattcccgcataataattgctgtgttgatatttatggactgcagagtatgcaatgggaagtgatgtttcaagagaaggagatgtctatagttatggcgtgctcctactagagatgttcataggattgagcccaacaaacgagatgttcaaggacaactatagtattcgcaattttgttgcagaagctgtgcctgaacgagtcttggagattactgatgacattcttctgcaagaaagagagctgtatgagccccagtggtcctctgtatgggcattgcgagacaaaagacataattcaagagagtttggcgacattatatgaaattggacttgcttgctccgttgtggcgcctagagaacgggtgagtatcaccgaagttgcagttcagctgcgtttgatcaggaacaaactctacgcatctggtttccatggataatcatgacaggaaaagagatgaaataccttagcaacgactgactgcctgtgctcttttcagaagtccggtgttatttatttctgcacttgcccattgctctcgcttcctctcaatcttgcgtaagcaggctcatatgtattttcaggtactactgattgctgtgatataggaatgataaacttgtgcactactaaatgcacagataaatgagtacacagttcccatgcgaagggtctaggtatctgcaaatgcaatttgaaccttgaagtatctcttgtttacaaccagaattcctatttttatcatattaaatcatatatatccttactcaagaatgatccgcatgcaagtttaagtaccagtgtcgtatactgcatgcagttgcggggttgcatcctgcaagatatgttcacgggaaaaagacccacatattgattgtcatggatgttggaaaccttcagttggcgctcttctggatatgccccaaatgggcaaacccaataggtgcttaatagatgaactcacatgctgaaagaagtaccctgcagttggagggcctgcttgtctgatgatgaattcagcatccgtatcttcccctctgaaaaatgtgacttcatttgagatttcgtacctttgctacgtgaatgcttctcaccgtccagcgaccttttgcactgagaggtcctcaagtagacatgattctgtgcatttaaacaagcatgcccgagcttgtctacctggttcaaaacaaaaggcacattttccatcttttccatcttttctctcggggagaatgcatgagaccgctcaattgtcctgtggcatcaaaactttgctaaaaatttcgatggaaagcccatgctcgctacaagataaaagataaatagcaaccatatcttaccaaacaatgattactaagcaacatcacaatttttgtcatcctaaaaatctctcatatattccaaatataaattaatcttccttatcctgtaagaatttaaatcaatttcctaaagcaattcaaatttcattagctttttccccttattaaaacattttttttccatttttacctctcgtgtgtatgccataatttatggaatccgacgtgttattatgctgcattttttgctcatgttgaatcacactgattttcaaatcatgtccgaacttttggaaatgctttttttgattttcagaaatgagcatactatgtaatacttgttgccaaaatctttcgctcacaaggttcacaactttttaaaattgcgctggaaatttgtagatataattgttaggctcaccaagcacggaagatt

SEQ ID NO: 10044 - DNA, 875 bp, Eucalyptus grandis
  Intron number 3 from transcript Egrandis_v1_0.047928m (loc us Egrandis_v1_0.047928m.g) derived from phytozome v7.0 (c hr-ID scaffold_7; pos 1075043 to 1075917)
tactttgaaggtcgggatcactattgtctttttgtttaattggattatatgcttcggttgtccacttgcctcttaattgggttgttgtggttgcatgtaccaatgtgcatctgaacttttagtaagtttcccttcacgttctcatggtaaggttgattgtgatatttcaagtaaaatcaatgggaaggccaattgtgatatttcaagtaaaatcaatagggaaggtcaatgatatataaattaatattcactatctattattaaagtatttattttgatttagttaaataaaacacattgactatataaatagacaactatcgtttgtaacttataagcttttatggtagcccaaaatactttactggaagctagatccatcccctattcgattagggacatattagatcggcagtatattgcttcacctacacgaaatgggctaacttgttacattgacgatggactatacaaaaaacttgtcccgtgattatttgccactttaatatgaggaactagacatttcttactggaggaagacagagccgtgtcggcagggagagagagggaggaagggggtttgatcaaagcgagagttttttctattagataatttctttcaaacctacaaaaacctttaaaaaaaacaaaaaaaattggagctgcactaagaagataaaaaaaagacactactgatctttgaatgcgttcatgctttttttgtctacatatagcatgcaatgcgaagaatgctatatgtagacaaaaaaagcatgaatgcatttaaagaccagctatgtctttttttaccttctagtgcagctcaaattcctttttgttttttgtaagtttgagacaaattatctaatagataa

SEQ ID NO: 10045 - DNA, 1644 bp, Eucalyptus grandis
  Intron number 6 from transcript Egrandis_v1_0.000119m (loc us Egrandis_v1_0.000119m.g) derived from phytozome v7.0 (c hr-ID scaffold_2; pos 2502113 to 2503756)
tgtttgggtttcaggtatgtacatttcatattcaactattcacttagttttatttttttatttttttattcctctggttagttgtggagtgcaataaactgttttcatacctccgttcatactcagatttcttttggcataccaccatcagaattcttgactgtaatctgttgaagaatcaatagtccttatcattatgcattcttgtgatcactttccctttatctgtgcaatgtatatcatatgaggtgcaattttgcttatcatgcatgcaccctgctttgagtggatctagatattgattttaagggatttcatggggctatagtagggtggttctatatgatgtgcataaaggaggagagaagagagaatgaaagccaggttaatgattgtaggaggattaaaagtagttacattgacctgataatatctcttcttgcgcaagaaaagtacctgtattgttatgtaatgtctatactacaatgctaataattgcacctggctattctttctggtgtcaaaatattcacaatcatattattttacttatgggcattacacaataaacttcctatataggacaagatgctgcatacattttaaaaaagtttggaagatgatatgcaaaactataatctttgtgtagtggtttagacttacaatgctctgtttttaaatagatgggttgtgtagcaatgcccaccagtccatattttatagtctcttgagtgagcgcagatttctgtcatttgcttctccaaatgtttttcttggattaagctcttactagtgattgcatgatcttattatgaagctagagtagatagtaaggatacaagccagaaaatatagaagggaggaaagcaggtacaagggttggacttgcctcttactggcatagtttctgcggaacttctctccgaaattatcacacttgcaatttacctttttatatacaaatacttgttcagttgaacatttcacaagtcataggtagctgttcttctctctagcatacctataaaggactggtggatcaacctttgtgctggtatcatgacttctgcttcagagatacagctcttctaactctttcagtggcctcaccacaaaatatttgccagtgctaattgaagcttgtcaatgtaacctattgaataatattgtgttgaggagttttttaggttttgcacctttttcactacatgctgatgataacgagattcccttgcaatgggttggttaatcaattgtctagttgccaatgtctccatggattttgtcttgttttagttaaatgtgcaaggtttaataaatagtggtaatcatttaaaagacataggatatttcagttgagattagctggtgccattttcccagcctgccaggtagattctttgtagtttctgaagtgcgacttcactaaagacattgcttgtccatgtttttctctttgcttgataataacgtgtgataatataatttttgtgccttttatttttgtagcagaagtacgatagggcatggtcaccaactattctgtccattttaattttttcatcgaagatgattgataggatgatctaattttttgttttatctgcagaaagacaacataaggaaccagcgtgagaatattgt

SEQ ID NO: 10046 - DNA, 1872 bp, Eucalyptus grandis
  Intron number 2 from transcript Egrandis_v1_0.027757m (loc us Egrandis_v1_0.024044m.g) derived from phytozome v7.0 (c hr-ID scaffold_10; pos 21171847 to 21173718 reverse strand )
ggggctctcatctccgcgcgctgcttgtcgtctcggtgagttactgtttgctctgattcccttttcgggtttggttcgtggattgattactcgaggttggttctggaggtgttttttttttttttttggttctgaagtatcatcgggatggtttctgccgagttggtctactgaagttcgctggagtggtgtctggaaacagtggtgataagcggcacagtgctagaaatagcgtagagcaataaggtcggtgcaagattctggcgttttgaaatgaagtcgatgatgtgcagaactgtggaatgatgatatgatcgactcttaagttgtcaggtatcctgaacgtaaaaaggaattcgcctagagcaggcatgatggttgtgctgaggtgtcccggattaggccctgatgcccaaataactttcatcagtaagaatgtgaaaaaaataaaaaaaaaataaataaataaataaagggagtttgaggtgtttgggatggttgagtgtgaggtgatgttgattttattttagtttttggctatgagatgttgatttgttatcttatatagatgcaaaccggagctttgaccctagaaggaatgtttcgtagttccatggcatgagtgccttacaagatgtttcagcaaccagtcttgcgtccattagcttgtttggcagaaagtaaaagaagcatcattagcacccattgcaggctgtgtgattacctggcatgaaagttgggcaatcacaaaagtacatggtttattgtagaataataattcacctgacccttgcaaagatatgaatgacgatggtggggatgtctgaacgtccatacacatgagtagcttggaatctatgtttgattccttataatccagtatttaaacacgacagatttcaaccattttcttaactcatttggatcgaacagttcatgcttgtcagacttttgatatttgattagtctacacaaatgaacacgaagagtctttcaatttgaagcctttgttttaattgtaaggggaacaatcggcagagacaagggagaaggtccatgtaatgtggctaaaaatctttaagtgcctcgaatgtaaggatcttatgggggactctgtgttgaaccggatgcatggtgtaacttgatcaatgtagcttattcatgtttaccctataatgttatagtgtggttatttaattcctgggaggtgagataagctggctctctgttgttggagtgtagttcatttccaagcctttgtacaggttgtttatttaatgttatattactaaaactgctctagtaactctgtccattcttcttaaggtaataagcaaattatttagcatgtacttgcaatgtactaattctcagttatcaaaattacaattactatcagctatttgtaatgcagatttttcagctaggtaattctgcatttgcaactgaattttgtgttgatttctagttaggtacgtacattagtcagccaaatgcattgccaactatggtcatttgccatgtaaaagtgccaaaaattgggacaaattacctaactactggtctgatgagggtattaacaatattctgataagcatgagcaggtccacagagtgggaaaagtatctgttggctgttgttgttgcccctctacttttcaagttacagctgtataagtcagtatgttatattctgtttgataagcaaatggagaacctttagtttcttaagcattgtctggcctgaattgggtcactttcagaagtgccataattaccataattgatgctctgagtacttccacaatgtctattttaacttttctgattcttggcagattggaacaattgcttttctcgctttgacaggact

SEQ ID NO: 10047 - DNA, 7123 bp, Eucalyptus grandis
  Intron number 1 from transcript Egrandis_v1_0.026655m (loc us Egrandis_v1_0.026655m.g) derived from phytozome v7.0 (c hr-ID scaffold_6; pos 31466523 to 31473645 reverse strand)
gtctcgctcgccaaggagattctccactccgataggtctctctctctctctctctctctctctctctctctctctctctctcgcaatgatttcttggactggatgttctgtgccgacgatgattcgattattcttgtgtagagcgaattcgtgagtgttaatagttcgtttcgcactgagttctggtgattcggtgttgcgcgctaatgaactgcgttcggaatttggttagagcgattagagttcaagtagaatttgtgaatatgatatcgagcccttctttagttttattgactgaactttgcatatttcgtgtcgtcggtctttcgtgcaagagcatgaacttattggtggaagattgtgccataggaaaggaattgattcaattaggatgctaattcacttgatgcctgaaaagtgcatgttacgcgtgtttcgatttacagttcgttatgtgtttacatcgggagctagcttgcatgcacccagcttacgtgaggtttgccttgcagcaaacgatgttgaaatttttttctttatgtagaagagggttatatcaatccgatagcttgcttaaggatggtgaactcctcgataaagaacctacatagcttggaaggtgaaagtcggttgtgattaattacatgggaacttgataatggctatgaatttatgaatgcatccttctttggcaccaagcatcttaggtgaagaattgtaagcgaacatgaaaacacacaactctagggatttctcttttttgtttctttttttttcctttttggcttgaaaacctgttgggatctctcattgaatgaagagccagaaaataaagtcacagcatttttatacatctcactcagacgaatgagttgcttacccttggtagacagcagctctctctctctctctccctctcccccgctccctctctatgcatgcgcacgcacgtatattttgtgctttcctattagttttatcggcacttctctcatccaactatttctgtgttctactaattgataaaagtggttctatggatggttcttgtggtgaattatttaccatcctctttccttcagtttataactcaggatcctggtactcttgagcaccaaatcagaacagcagaccgctcttgtattgcatgccttttctctttagataaaccatgactgactgcttagaaatctgcagacgccttgtactatcttcatatgatgttcttatcattccaagcctgaacatttaactgctttccatagaggcaattgatttgtcttggaaaaaaatgaagatggataatttccaatctgccgtttctctctgctttccttatcttctcttttcttcttctcctccattactcttttactcactctgatgctagcaatggatgttagcttttcactttgtatagaaaaaggtctaattacattattaatagtaataataatgcagaaccttcagttctaccttgaatttctgattttccaactctaccgtgaaggtacatgtcagcgagccagcagtattccactagtgacatgatgaactgctgatatggctcagcatagggctagtgtggtgataagattagttattaagttaaaaaatggccttcaaaaaagtgaaagtgaaaagatggtcaataatcagaatgatttgccctgcatgtcctaatctgcacatattcttatagttatctttgaagctgtcatgggcggtagaaattagattttattttcacatataaagtgatcatccttaatgttctttcatgtttttttacaaaacatatatttgaccatatcaggacctgtcagtctcttattttcatttagcaatttcgctggacatcgacagtgatccagtaaagatacatggaaatgagtcccctgttgggccactccttaggtcaactgctggggctgagtcagcataattgaaaatcagctaaagttttcagtctttgtaggattcaggccctaagacagctattaaaaaatttgaagttatcttctattggtgcgggtaatcatcatctaattatatttggcttcagggtattgattataaaattttgaggataactagagatctgtgagaattcttctgcatgtaagttcactagagagggagaaatggacttgcagactaagaggttgaagtgaaaagattcagcatttaataagatgaagcatgtttgataatgtttattagttgactttccaattaagtaaaaagttcgtgaaattacttaatggtttactaactcaatagattgcaaatcagtttgctaaaacctacatatactatccacaatttcatattaggtaagaaatgaattatactcagacttgaaattttgctatcatcaaacaactttttcttttcattttaagcacttaggtcgacacttaaagttcaataattaaattttcaatactcattttcaatattatcaaacaagtggtgagttcttctgttgttctaattttcttccccattgttcttcctcttattctgaaaagtagagataagatgatctcaatgggaaggcaccagagtcatgtcaattagttttcaaaggcttgaggggaagccatttacgaaaagctcaaaaagtagctcaaggatacaagcatatttgtcttagtttccttgccgggtgtggccttggtttctccgttttggcacccctttctgttgttgcagtttttgtggctttggttgttgttgccctctttttatttgtctcttctttgcctctgttttggcttctgctgctgcttccgtgtctttctggtgcagttttccccggctcccttccactcgaattgacgcctgtgtccttttgagtgcaagttttttggagccggttctcttgctgtacatttgtgtagctcttggttcaaaagtcaatataatacttacctcttaccaaaaaaaaaaaaacttgtgacttcttttaatgccaaaaatgagaaatttgcatttgttcttgtggccttgtttggttttctatggaaatggaatcccatttctgagaaactgtttccattgtatggaaacattacaaggaaaaagagcactgaagcactgcaaaatcccaacagaatccaattccctagctgatggaggtaatcaaaatctcttcccatagattcatctattgtacttgttctgcctccctcaatgagctctttccagtctccgttagtgcacatgtcctcacaaaagatggaaaattcctctctctctctctctctcgacactgtaattcctctctctctctctctctcgacactgtaacagagtaaccaaacaacggaataagaattctatgcagggggatccgattacctggaattgtgtccatttcctcatccaatttcattctccaattggatggcttgaaatgtactgatgcagacttaattccttcaaaggctcttcggttgctccctctctgtacactagaaaaaggggggaggggtcacatattatgtcttcctagccacatctttcaaagaatggtttttgacattgatgaatattgcatgaacaccatgtcttagtctgtagtctgactggacaactctaattcttggttccgcttggggaaaaatatatctaactcatggtttctgcttttgtgccagttgcacagagcaatgaatgtgaagcattgcctttgacttctaggctacatggaattctttaactgctaccaatgtctacacatagaagcatataagtcaaaccggaaagaaaagaattaattggctggggattgtcatagtagtctttggtgatgccttcgcatgttgcctaatcaacaagtaggcaaggagtgacatctcctgtcttgtgaactttttccgtcaaattgatctaatatatcgtgaaattcaagaagttcactgatgtgcatttgatgatgctgtttgccagaatttgggagagtcaataatcacgtttgtttattagcgggaaccttcctctataccattaacttcaaattgaacagtgactgaggatacaaataggaataagaagaaatgaaaagggaaggtttatgggcattgcaggagatcaagccaaccttggatagcagaagatgtgccatgtaaccatgattgcagagcagaaatcgttagctttagaactagaaggaaacttaagagatttcctttcccagctttcatagttgttatatgacatgggtaccaactcatttgaaatgcaataactttaagaaaatggtctcgtagctagctaataagtttcattgtagaagggtgcagatgcctaaagttgattttattaattatattggaccttttcattcatacgtggtgcctaattatattcttaaccaaaacagtgactgaagaatattttacatgcctgtgatgtttgtagtatgctatatcctcttaggtaatatttcagcacttcatccaactactatgttattcgttttgaaggtataaaagacagatacttgtcctcaagctcgatgctgtttgaagataacaatgcgtggctatattgtttgactaaaaattttatatcccctctattgagtgtagagcataagtgttatggttgtggttctattctatccttatagtaaatgtttacctgcgcgttgtgcgggattataagtttactcggaaaattaagaagaaaaaacagataaataaaggatccacagaatcaaggtcaatgaaaaaaattaagttatttactcataggtggtctttccggaaatgtaaatatgtaaaaggaagatgggatcgatattcaaactctagtataaaaaaggatgaaaccaagacctggcaaaactttgaactgataattgcaggaattagatgagctgtgatgcccattggaactatgttagtgtacatcttcatccttgttccacattgtaagataagattgacaatattttcaactgcgaaagaaaactaaatttcatgtctctataatatagtattgacgtatttgttttggttttgtcagtaaacctaatcagattagtaaataactaaatggctaaattgacttgaaaaaaaaaaaaaaaaaaacaagttgagatttcattcgtcctactcttcccaacaatgcttagataattgttagtgtatatcttcatccttgttccacattgtaagataaaattgacaatattatcaactgcgaaagaaaactaattttcatgtctctataatatagtattgacgtgtttgttttggttttgtcagtaaacctaatcagattagtaaataactaaatggctaaattgacttgaaaaaaaaaaaaaacaagttgagatttcattcgtcctactcttcccaacaatgcttagataattgtaacaaaatcatggaaagatgctaatcggattgctgaaaagaaatattttcttggagatcataggggaaaacattcaaagtaattatcaattcgaaacaaaagtagtagataaaaaattaagttttggatcattcaaaggtggggtagaaataaaaatggtaagacaagtaatggtgtaacaacaaaacttaatggaatggaaaacttggacattggaagagaagcaaaacactaggaatatctgctcatctatcaagtgcaagaggagagaacgaacaattttttatatcccagaattgatgttggcgactctaaatgtccatctcagacatccatgtgatagtattaaattcataaaataactatatgacatagaattaatgcactgaggagaggcccaatctggcaacctacaagctctgtaataacatatttacatagatgtatatggtatttacattttcattggtgcaaatggagtcactttttatgtatttgttgttgtgacactaatgctatgtttacgaaatgggggaaaatggggaaaatgaaaattggagtggaaaacaatgaaaaatttaaaatttctgtgagaagaaaaaggatggaaaatttagaattatgagaatttccttcacgtagtttcctctcctagagtctttcaaatatagcctacagatattcttagtttgttacgcacgattgcaggtcatttgttttctacatgtatgttttagacttaagattattaggaagaactcctatctccctgacattttctcattgctcaaaggatggcacctgtccttatgacaaacagcatttaccatttgacagtggccatcaccacttgacattcctccagcaattttaagcttaataaatgtgcttaatctgctgcttgatatccctgctcactaagatcttcctcctcttccattgcactattaaattcatttcaatcactggcaatatttgtccatattctattcttaatggccaggaacttggtggactttgtaaatcatgtcaagctctcccaatacactctagtctgttttctggtattatgatgccattcgctattgtatgcttgaatctcacctgcacttcatgactacttgtttcagttttggttgtacttttttcatcagatttctcacttctacatttctaatcctagagttcaggaaataatgtgtcaaaagttgcataaaaaaatattctttcataggattaatgagtaatctagaatggtgttgttcatacaagatgctgcaaaaggcttttgatttaaaattggccggcatcagttatttggtggttagctgcataccatgctgatcatagttcagttagttacattcacaaaagctgtttctcctatacaacttgtgatacttgtaacaagctaatggtgattataggtgaagaggattatttgtcttgtttgatagttatcgaattgtccttttggtggactatgagtgggatcttcatacgaggcttacaagttacacagtcatgatttagctcagaatcatttgatttcagataaatcttagaagttaactgatgaaaacatttgcatcacactaaaagtgttgatagttgcttcatttgtgaactgcgcctacccgtcaaagtcatgtgcagcagttggtgaattgagagtgctctcagttccttattttgcttctttttttttttcttttggttaccaggtacttgg

SEQ ID NO: 10048 - DNA, 1134 bp, Eucalyptus grandis
  Intron number 11 from transcript Egrandis_v1_0.014407m (lo cus Egrandis_v1_0.011885m.g) derived from phytozome v7.0 ( chr-ID scaffold_8; pos 3457232 to 3458365 reverse strand)
gacaaggtatagtgattcaccttttatgacgatgatttgcaaatcgttaacattgcgttatccaactatttggtgttagacctagtggctgtccataattgattgttctggttcatgcttggaccacttaggagtgtgcctatttagtcttccaattcttgggatttgtaactggatatcataggtctagttcccagtttttgggaattctacctgcaccatgtttctgacctgatgctgaaactttctaagattgttgattgattttgtttagatttgcaaatgcttggcctatcaatctaacgtaacaccaacgagcctgacacactaattatagatatgctaatctggttgtcttttctattttcaagtcccaatgtaggacagtgtctagttggtaaaagtcttttgaaaaatattctatcctctctaactctttcgtcttattccttccgcggattttactctttgtagttcttggcttctatcagcttcttttctcatgatcatcttcacgctattacatctgaaagccaaaataatatcttgccaattgcctgcattctggttcctggctttgcatgtttggtccttgattggaagtggaagtggaagtactatggctagtatttcaatttttgttttctgtttgcttggcaacatgtgaatgaaaatgaaaattctcttacgggatgaaaaatgggagtatatgcttgtattccatcaaagctgtaaaatacaatttttctttttccttccaaagatctgtgcttttgttagaatgaataaatactggatacaccaaaatgtcattttcagctttgaactcttttttcattcataacatgctttccattgtctttgttgtaaaataatttccagtgtgtttccaaacgtgtttttgaagctgccgcattctgaaatgaaaatgaaaacagcatatacaatttttctggaaccaattacatcttgccctggagaattttgtgcaactagttgacacattaattgaaagttcatctctagtgtcattggtttagtattgtaagtgtgcattgtccatgatgtgacgttaaccttctcttattggattcctttgatatagttcgtcaaagaagagaaggaccaggacca

SEQ ID NO: 10049 - DNA, 609 bp, Eucalyptus grandis
  Intron number 4 from transcript Egrandis_v1_0.039204m (loc us Egrandis_v1_0.039204m.g) derived from phytozome v7.0 (c hr-ID scaffold_10; pos 28124734 to 28125342 reverse strand )
aggtaaaccctatttttcttcaccctgcttcccatatttgtcacttgatttccgcatggctaaagtttctgttcagtgtcataattgcctttgtatgataactttgttgattgagttggttgttgcctcaaattgaatgtatcttgatttaggaatcaaaatttggtccggtgctatagctatgttatgtaacaagtatattacttgaggcaacatccattttctaacgaggcaacatccattttctaatgagaaatctttgcgaagttctgtatcactgtcactgcttttcttataactttttttaaattcaattttcacattatatgtgtaaaagcgttgctcttctttttgggattatagtcatgaagctgagattgtgaaaaaaatttctaccgaaatctctttggtagcttttaagtcagcaggacagaatacagttttttgttatctgtttatccaacatgcagcaaatacgatttctaatgatctataagctgtaatagttggctgtcacctagctagctgattgttaagcggaagctggaaattcaatcaacctttaccatatatatttcctcattctctgaagttggacataattccagg

SEQ ID NO: 10050 - DNA, 7796 bp, Eucalyptus grandis
  Intron number 18 from transcript Egrandis_v1_0.002131m (lo cus Egrandis_v1_0.002128m.g) derived from phytozome v7.0 ( chr-ID scaffold_3; pos 53817116 to 53824911)
tcttgtccttgtatcagttgcctcagtacgcccaggtggtgtcgtctcactgatactaatttagagcttatgatgagcgatgggatttaactttgtgacatttgttgctgttgtacatcaggtgatgacttcttttgtcaagttgaagctttctgcgaatgcttcagtgacatgtaatgtttggcctttccttagagaaggaaatgttctcagataggactctacatcgataattgccgtcttctctcgtttggtacttatgccatgtctcttgaacttcgatgtcatttagttttctggtcggattgaaattctaattgtcggtttcattctcatcaacttaaagggcgaaaagaaacagatttcgaggaacccccccactttttagctgttaagagcttgagatggaatgaaatatgttctggttagatccctaggaaacaagtggatccatcaactctaagaatggctgaaggtaaaggaaaaaggctgcgaggactgctaaaaaagtatccccctgctgtagcctttacttgggtattatttaccttttttgtatggattaatgccagcacacggatgatacggaatctgagcctaagatatagtacctcccttggtgattccatccactgggtgattattaaatggaggctttcatactagagttattgccttggaagtaaagcaagatttaccgtgcgaaaaatatagtggacatgtggagtggcaaaatctcttttctcgtaataactgtgtatatgttgcaatcaaggggttccactaaatcactgtagtaaacatgttttgcacgatgcgataaatgcactgtcggcatgattcgtattcgaatgtacgcggtggtgctatatattgtattgctggtgagtgaaaaagccagaagcagctgtaaatgtaacttgttttgagcgggattgaggggaatttgcaagtatgcgtggctcatctgaaatgctggtctcacggtgatatcaaattctccgctggttctatgctcttcatggggccagaacgcaccaattgcctgcgctcacatcggctttcgtcatatcatttacggcaaggcagatcctttgccgcattaggggcctcatgttgcaagttccgttctccctcctgcccggcgaagtgcataataccatcgtcggtctcctctacccgacgcgccgaccggaggttctcggatctttgcttatcgtgcctacccagcaggttatgcatgcgatgggctaaaggcagagtcccatcaaacatgatcagcctcgtctgacgattattgactgtagaaattcctacatctgaggagagttctagtccgatgatgtcgagttgatctgctgtgttcctctatcgtgacagaacatgcgtttgcgttgggcaacaaagggtttttcttttaaacaaaattcaatcgagagaacacgggatacaaaagccatgaacttttatctatctcaaaagttagaaacaaatatgtatatctatagataaattgatatcgttcttagatatgattataataactagatacaattcaaaatgaggttctatttttagtgccatacttattgttgattcagaaaatgaattgaaatgaaaagatatttcaaaattcgggaatcaaagttagaagtcctgagttcgaatgttttaaggtcacattcgtctcttcaattaaattttcatgcttagtaccaaacagaagactgatcaaactaagcgtgaaggtagtgttaggatatttaaataataagtcgtatattcatctaatagtttaagcttttacaatagttgacagtgcaccacaaaatcccacacttctctttagatagttttgttcggtctcgagatatagtaaaggtgaaaaactcacatttctcctctttttaagtataataacacttcaaaggagaagagaagtatgagggtttacagattcactataaactgttttaaaagtttaagcgattagatgagagcataacttattaattaaatattttaacactccttctcatgtttaatctgatcggttttctatttagtactaagtgtaaaaatttaattgaagagacaaatatagggtaagttaccaatgagatctgcctttggctaatctaacgaaaaggtatttaaaggggtagttaaaaagctgtaaggctagcttcccctttcccaatgggaaagaagccctttgtttctttcttatccaaaagcagagggccaagacaggagcaagaacccttggatccatcgagaaacaccgtgccatcccctgaatttggaggcgcaattattacatcttcatgcatcacccacttattccaaagattaatccttaaaagaaagagattgatttctatttaaaaaaattttaaaaaatgacttacgaaaaggaatgagtgaatgaataatttttttttcattatccatgaaaatatttacgcataatttgcttcggcggctgcgaaatctttggtaatttttatttgatcggaaaatttgtgataattcagacacaaaataaaggggcgagactatcagccgtggtggctctactgggtaggctcctacctttgaagggaaacgtcaagtgttcgaaactcttgcaattgcaaggaggttggtagatcattaggtgtattacgcgtggcgccctggtggtggattctgagctagcgtcacttggggtttacgtggcggctgtcaggcaaaaggttcgctctagtggtgggtcatgagctagcgtcacttgggtttacgtggcggctgtcagccaaaattcctccggccaaaaaaaaaaaaaaaaaacaaaggggcaagattttttttaagaaaagacgcacgaggcaattcaattcctgctcctgtgtgcctcgacctttctttgtacggggtttctctctccggaacattcgtggcacgcgtttcttggttcgttcctttttctcccagtttggacgctcacttccggagagatcgttcgtcattttacaccgtggagtgcccatttttttttccttgaattttcggttggaagtcttccatcgccttcgagtaaattggtcagtcaggtttagactttgtttttggctgatgataatctcttagcatgaattcagttatattgttcagtaatgatctggatcttcaactacaggcagatactgttggtcgctccatggatgttagcaaaggtgcctgagaactctacattaatggggaattttggtgacatgcccatctttaatcgttgttcttgaactagaattatgtggcgtgtgctattctatatgctttagattttctagggaaacgttgtcatataaattgcaacatatatatttgttcactttgttgttttctgctccaaatttagatctattgtgtgtatagcagggaaagaaatctgttagtctcatatatcttgtagacttcgataatctattgattcacatagatggtattgggattttcctttgtccttcagtctgaacgactattgccaattcatgcgctctggtgcgtcttgagcctttttttttttcctttctgaggatctgtaagatttcgtccaccatgagctcagagtttgattggtcgaaacagaagggaaccatacagaaaaaactactgaaagagtttcagaaggactaacctttgagcgacaacggagaaacgtaagtggtatgagcagaaaaaggaccaaaactcaataaactaagttacaacgaaggacaagactttcacgacaagcctttgaataatgcacagacaagataattttgtcatttctcgctatcactcctatctattaagaaggaaatgaacccaatgacaccagttaacaaaggatgataactagcctgcctttggaatcaagtgtaactttccttgaggtaaattttatcaaccgtaaaatcctgatgaatatttttagttagttaatggaagaactttgcctttagatgtccttcttcgttattaatttagactaccattctcaggtctttctaattgaggtttgatgcagaatcatttccctagtaggctgaatgatgaagtgtctttcacagtttcactcatagtgttcaaattgggtgctacagaattctcatttactgaagtgaatactattcgagcaagcgccagcaaggttacctgttgccacttctcatcagatgggaaagtacttgctactggtggacatgataagaaagtaagtacaggcagttatgtggacatgataatatgttgtcttatgccatagtctgataatgggatggttaaatttctggattatgcaggctgtactgtggtatgcagatactttaaagccgaaaacaactctggaggaacattctttaatgatcacggatgttcgatttagtccgaccatgtctcgcctggcaacatcttctttcgacaaaactgtcagagtctgggaggctgacaatgttggtgaacataatatctcatcgacactcacgttttttagatttttgaattcttttcgtattcaaagcttcttgcaacagccttctgatatactgaactacacgaggtgccagcccgactttaagtactgatgaaatttcaaaactttctgccactatgatacaagtgcttttgatgcaagtttgtttttcccggagcgaacaatctaatggaagttattgttttacataccccagaaagttacgtagaacatgacctacacttgtagctctaagcaagcagatgtaccggcatgagttaattgacaggactctgaatttatagttaagtgcatgatggtgaagggtgaagaagttggtaatctttcccttagagctgaccacagaaggttttggtcctttagaggaatggagcaggactttcaattaaagctggtcacccgttattactcagatacttagatattcctgtctttggcttgttgccacttgcaacatcaataaaaaatggctttgtggtcgattttagctttgtagccctaataggagttgccattgtttcaaaatctgaacattgaaagtttgggaacatatactatattgagtcgatattatgaatttatggcctaactgtccatgtgaatggttttgcaatctgactcttgttcaaaacctagagagttgcttcagtatgtaagttctctgaatttccacacttgcttacatgagatgatcgtctcctcttattacccttgaagctggaattctagaggctgctgatattgataaattctgccatgggtactctcccgtgataataatcaagtgaagatttggctacttccttcatagatcattttgaaagcattctcttcggagctcaatgaattgctgtttttggactgcagacttctgcggcatttattgtgtggcttttttatgaaatggtgtctgtgactatgaggattgtatttatccttcttggctcttatgcattattttggcagctcaatgtcgaggctccttcattttaccctgataatgatcatgttttaagagtttcctgtttcggtagttgttggtcaatgtggagggcaaattcgcatgtgaccttcctaagatttatttgactgtctctgttttgttcgcttgtgatagtacgcatttagcttcacttttattggctttatgtctaatgtccatgtgcatatggtatcatcaatggattatttgttcatttcaggctggttattctcttcggacttttatggggcattcttctgttgttgcgtctctggacttccacccaaataaagatgattttatctgctcatgcggtggggatggtgagataagatactggagcattaataacggcagctgtttgagggtattcagggtaaaaattaatatgaattgtcatgctaatcttgttgctccttgtggttttaatgagatggtgcatcaagtgcatctcggttctctaaaaatgtataacttatgttgctcgtgaatcagggtggcacagcccagttgagattccagccacgtcttggaatgtatcttgctgctgcggcagataatgtcttatctatattggatgtagagacacaagcgtgcaggcaaactttgcaggttgaatttttagtaacttcctcctttttattcggtctagttaagtggggattgttattgggtggaaaaaggggatattgttgctgagtgaatgattgtcttacctctagtaggtatgattgaatgatgttgtctgcaactacctttccagattctatgccattgaattgtatgcttgctactgatggctttagttcatgctctgttatcgtgttgaaatttgaaaggacaatatgttttatttctctgggcactagaagaaaagctattatttcatctctctgccaaaatcttactgtggtgatgggagttgttttgtttttcttgctagggtgtattggtgaacctattggcttgctggatatacctgagtcaacttgccttaataaagtagcattttcccaggtctaggtttaaggctcaatctagttgacaaataacagtagaaaaaagtttgtcatctaagcttgtcgtctttttatctgctgtatctaagcatatgatgtttatgtatgtgtcaccatttacggatgctattttaatgacacaattagtctcaaggtgtatctcatctttcagagcattttatggtttgcatctatcttattgaaattgttactcattcaattgcatggccttttagttcaagttggcctttcttttctttgagattgtcacaattagtatctttattctctttgtttcctgcttctagtaacatgttgatcgttcccacatgaatctgaattttgataacaggggcatactaaggcaatcgattctgtgtgttgggattctactggcgatttagttgcgtctgtcagtgaggactctgttagagtttgggcagttgggtctggtagtgaatgggactgtgtacatgaattgagctgcaatggaaacaaggcccactcctgcgtgttccacccaacttatccttcacttttggtgattggctgccaccaggtaaggcgcacgtttgaattatttattttagcattttcaggtgaattctatctctgtacataggagaagtgagagataagtccatgtttagatgttcccaaattttgtgaatttttaggattgcataagaaatttcgagcaagcttcttgggatgctaatcaggctcatgagtttctaaaaatattaagtatttcctagtacaaatcaggcgtctttctcactatcctctgaagtagcgaaggtcaggtaattggcaacttcagaatcatggcttctgaagcaggctctacaagagccatggaacagcaaaagctatgtgccttatagtatgagtcacgtgaataggctctttggtcttctatagccccataagatcttggtttaatggtgctttggtctaagctaattgaaaattctctgcagaccctggagctttggaatatggccgagaacaagacaatggctttgccagctcatgacggactaatttcagcattggcagtatcaaatgtgacgggcctggttgcttcagctagtcacgacaagacagtgaagctgtggaagtgatactttggcatctccaggtatttgtcctaagcactcagattggaagactgaaatcgctgttcccatcaaagtgcatgtatcttgtccttgtatcagttgcctcagtacgcccagttggtgtcgtctcactgatactaatttagagctta

SEQ ID NO: 10051 - DNA, 1426 bp, Eucalyptus grandis
  Intron number 11 from transcript Egrandis_v1_0.003818m (lo cus Egrandis_v1_0.003818m.g) derived from phytozome v7.0 ( chr-ID scaffold_1; pos 22610803 to 22612228 reverse strand )
gttggaattaaatttactaggtatataatttttcctttagtgccatttcttttgaagttccatgcattttctattgctgtgatcattgttgattttacttattatacttctctgttgtttattctttaacataaagtagaaaaattatatgaaagatacttaccaaaagaaaaaaaaaattatatgaaagagttttccagtgaaagattgtgatttgatgactataaggtggattttgtgacgctttttacaaaatcatgaaagaaagaatatcagaatgtatccaagccaagagaacaaaagaagtatcccagaatgtaacaattacagcaattgtggttttgatgtcatttatttatttctttttcttactgagaaccttctgaaggaagagccattctgcaacttatactggtcagtttaacttggggcctttaggttgtacccttaccttgaactggacaaactttactggtgtaaatcctctgggcaggaatcaaatacctaacatccagctctcaggagaacgctcagcaaccagggcaacccaatggtgctgatgttattaattatgttccttttgtttcagatgaggaaaccctatttgccagaaaaaatttcttcatgatcttttccaaacataaagagtgacactgctgatatcaaataaattaaaatgtgaaaatatgtaagactattctagaacaccatttttagtcatttaaacattgagttggggcttgataattattcagcctcctaggattatcttcccgttccaacctatgacagacaataggatccctcttaagcagggtggttgtataggccatcttttgttttgtagatttggcagggttgtgtattttgcggttaattcaacagtttatttaataaagaacttcacataagattccagtaagcaggtgctcctaagtcatgctcaactgctaactaaactgtgtctatttagaatgccttctgttcaagcaaaacagaacgttaccgttaatgattttcgttctacttatggcataggttgaagatcctctgttcctctatctggttttgtgttgatttggaaagagtgaaacattagggcctttgtgggggaagaaactttcattaaggaacttaatgaaaaattggttaacttttcaaatgagggggtttactcttggatgtaaatgctgtgattaacattgtggattcctggtcttgcaaattagttttttttttttttttaatggcttttagctctttttttggctttgggctctttatttgaatgagttggcatgcctttggtgcctcatagtgaaattctctttacctttgaagaggaaatctattctgttagtactaatcttcctattttatacttactacaggaaaagcataaagctgtacagtgacttttacacat

SEQ ID NO: 10052 - DNA, 1812 bp, Eucalyptus grandis
  Intron number 3 from transcript Egrandis_v1_0.002982m (loc us Egrandis_v1_0.002982m.g) derived from phytozome v7.0 (c hr-ID scaffold_11; pos 42330108 to 42331919)
agcaatcaggtgattccccgtgctcatttcactgctctagtgtgtggtttgcatgcttatataatttcttgagatacccaacctgatagttcaaggttatgctgtttgtttcagtttcaaatatgctgggtttattgtttcttgcaaatttttatctaggggggctctgtagaaaatgtaactggcggtaggtgattgacctcctctgttgtcagtttagtctctcataagttgtacatatcgtaattggtcctgccagtgctggatttgttgaatgatggcctcagaaatctaggagcttttggtagttaagggcatgaataaagcttttaagccaggtcaatactagaccaggtttgctgttgaaggctttacatgttgcctgcaggtggcagagataccattctgtttgacatgcttgttctgttgaacaggaaatttttttctaatctagtgatgatggattgttagactgagtatgcttctttcagaaattattcttcctttaaagtgagaatgtcataaggtactaattttgctgtataggactaggcagttggactgggaatgtagcatttttcgatctcttatccttcactttgtaagttttggccagttatggatcttgatcatatttttcttgagctttccttttgcacatagccattgtagtgtacttcctctagaggatgctactcctttattacggatgcttgtcttcattgcttcaagtggtacttatgcttaatgggatgcatattattttagatagaacttcaataagttggaggaatccagttttggtcatttatttgtcaatctttaatctgttaccctatgtttagaaagtattttgggaggtaaagaaaactgtgaagaaaatgattttccttatagttgtctggaagaatggatgtgaggtgaagcaaatctggagagagagatttctgtatgttaaagatgaaaagtaagaggaaagagaaacgtttgtacagaaaaaatgatgttttaacccttttaagtgaattgtggtatgagtgagcatgatcgtaaaattctacgtaatacaagattcttggaaattatcatgtctgttgcatgtcattaagatttagatgatcatagatcaatttgaacataatagattaacagagcaggttctgtccttgggagcgaatataacctaactattttgaaggagaatgatgagtgaatcaatttttacatgaatataactcaaaaaggaaaaggcaatgtgattcaaagctaaagtgggcagtgactgatgagattgaagtcacacttgggcccgttattttggaatttgcagatatgtcggaagataaaggggattttggtaaaagtaatataaggatttgcagatttttttttttttcaattctcagtacaatctcacctcttttttcctacatttcatccaatcaacgtaaacctatcttctccacatacatttttttaatctatccttgtttctccatctattccacatttccaaacacatttccccaaccccccccccccccccgaccctggggggctcgccctgtaagcccccaaaaggggcagtcgttccttttgttacatataaaataattcatgcgtgtgcatttatactgaattcaatttagtcatgtttagatgttgcttccttttttttctcctttgccattgttctatttcagtcaagtttctcatttagcatcctccaaatcatctgtacctgcttgataccttttttatgtgaatacttaaatctttctcaaccattcttcctcccttcttttgtcagaa

SEQ ID NO: 10053 - DNA, 456 bp, Eucalyptus grandis
  Intron number 4 from transcript Egrandis_v1_0.039138m (loc us Egrandis_v1_0.039138m.g) derived from phytozome v7.0 (c hr-ID scaffold_2; pos 47070375 to 47070830)
gtgatactaaggacgttgctggaacagttgaacaggttctttacttaaacctgcatgtttaagttagttccattacaaagtgctattccattctgttgattcaataatatgcatttatggcctatcctatcctttaatttggtaactctgctagccaatcattcatttgtttgatctactgagccaacattatgataccctatccttccgttagtaatatcatcaaaacatctgcatgttgaagaggaccaagagcagctgaggtgaatgcagatacttctggtgatagttagaaggctagaaagaaattgagtaactgaaacattttcatggcataaaaatattgcttttatggaaatgtgatgtggtggactagttaaatcatgcggccagcattagtactatcacacatttgtgaagaatcttcctattaattttctgttctggttgtaggtg

SEQ ID NO: 10054 - DNA, 5620 bp, Eucalyptus grandis
  Intron number 2 from transcript Egrandis_v1_0.017036m (loc us Egrandis_v1_0.017036m.g) derived from phytozome v7.0 (c hr-ID scaffold_7; pos 16663823 to 16669442 reverse strand)
aagtttcactgcccttccaaaccagaaggcttcaggtatccattcttcttcttctacacaaatgccataactttttttttttcctcgatcgcttgagtgccataatttctaaaagacatttactagagtactataactttcaattggttacttgagtgtcaaaattttttaaaaatgatcacctaactactgaaaatctaacgtggcatagcacttgtgaacatttcaaaaaatgttgtatacttaagtgatcaattacaaagttatatgtcactcaagaaattggaaaaaaattatagccctcaaagtgagtgtcgtacggaaattatggcattcaaatgtgttaaagaaaaaacttgtaatattgaaatgagcgccgtgtgattttctgttttcttaattcccttagaatacaaaaattttgagtttactcccacacaaatagacacgatctcatgctccacaagcctacccagatattagcttccatattatttgatccatggtacttagttggtatttatgtgcgagatctacttaaagttgaacttccttgctcgttataaaggcaaggttttgctgcaatcgaccggcaggggcattacctaccatgcgaaatcatctaaaagccactcacctctcaaacacattaagatttacccaatccatctggccaaacaaatccaaacaaacctcacatcctcctcccccggcccggggcgggtagctgcatctccctctaagaaggagccagatgtggccttatggacggggaccaacaacttgaggccccacctaatggaagtagcccattatgcttaggaatctcaaggtcatgatagtaacacccattttctccctctcttgcctaatcgtgaacaattagaactcgtcaatgaatgggaccaaaaaagtaggctcatgacaaagactccatggagtagtatgctcttgtcattttgtacaaattagagattctggtgcattattgattagtggcgggtccatcctggtagatgcagggatataacaatccattgacaggatactttagagttaccaatgcatcgacatcttagtgcgcagcagaaaattattagatatatcagaaaaagaaagcatgataaggaatttgaacaaattctttttccctgatgatacggaatccaaatcttccacttgactaatttcataatctgtccatgtgtaagactctgcccacttgggtgtcggactcgatctctacagttacctaaatgcgagatgttgtgattttcatgtcagattttccatttatgcatggagcacttgactattcaattaatctcgggatcttaactcaaagaacttcaatccgtcctatgcgcaagctctttaggatctttggttccagtttgttaattttgtatagtaaatccgtgtttatccacaaatctgccagtcttgaaacacagcaaatacaaattacagggtattgtattaaggtagcattattttggctcgtctttgttaacatatttattgaatttgaatcttggaaggaaactttcctaatttgagtaatttcctagtcggagttggattcttagtttgaataaattttctattttgaatccaaatctcttctatataaaaagaaatgacttctttgtgaataatattaaagaggagtttttgcctgtgaattacattttgagtgtctgaagccatgaaaatcttgtgttaaaattttataatttcctttgtgatattgctagattatctcatgggaaattgtgaggctaaataccatgtgagattattgggtgtaactgggggtaggaaacattaataatatttgaataagtcaagtgtgattgtaatctctgctatatcttttgaacaatagtggaattccttgccgctgctctcctcgttaacataagtctaatgattgaatcatgtatattgggcgttcgatttattttcttattctgtctattttattatacgattgcttgttgccacaacaatcttgtcacaccccgaaccccgggcacgcaacattcccctccttggtcgatagaaagcgatatctcaggactcattgccgaccctttcatttttaatctttcattatgcgcaagcaaaaaatgaaccatctccccatcaacaaacaatcaagcaatcaaacagggatagtgagatgaacaacaaaaacacaacatctactcatatatacacatttttacattttcatattggattaacctacggaggattgtttccgatttacaagcccaatagatggggccgatccatcctctaagccaaaccaaaaagagactagtctaggctaacccaattgtacaccaaaaagaacccttgggctcggcactgccatcacttggattcggtggacttaggctccatcgattcagagttggagctgtacgggtttgtcgctggtgaagcgaggccaggattctccactgcgccgtcaggagggtccagctccatgggatcccagtcatcatcctcagggcccctactaggcggcttgtcaaaacctcttagaggaccaatcagcatgtcgccattctggatgaaccacgctgggaacctatggggtatccattggcccggtccctcatccatccagatggtggtgagatacttcttgtacaggtgtgcccaactcaagaagcaatggtgcgttgcgatggtatcccaatccttaggtataccgaatctcattggcagaagtgccatcctaaggacttgaaagtggtcatacaataaccagtgagatataaatctcagcggcccctggttaggacattaatcaactcgtggtatctctttagaaccaccccacaaacaaacaatgacccacaactaacaaccaacaatcaatagttggttcgcatgcaactttatctggtatgccatacccttcatgttgaatctcagcacaatacacgcaatgcatatggccattagatgatacagttcatcaatcacatacaagtcgcgtgacaagcgatctcatttgaccattgccacaccctgcacattattgattcatgcgtgtgtaccataatcaacgtgctcaactcatgcacagtcaaaaccaaagatgccatatttcccttcttgtgaaaatcactcaattcatgcggatgcccatgcatttacacactcattcacttcataggattaaaatacatgaatttagaatacttttcatttttgggtgaacagtactcgtgaacagtaccgcatgaagaatactacgtgaacagtaccgcgtgaactactacatgaacaatgtttcgtaaacagtaactcgagaacaataaattctagaatttaataattaataaattaaatccaaaagttattaaaaacactaattaaaacaaaaaattaatccattaaggttaaacaagcctaattaagcacataaaccacatttaagccgataaagtaaaattaaactaaactaatcttagccactaatctaaccacttatcttaggactaatataactcaattaaatatcctaaactagaactaccactaattaaaccaactctaagcaagtttaggcactaaacggaggtttaggagttaaactcacttgttaaatgggccagagacatgcacacggcggcaacgatggaggcgacgcaccaagacctcaaccatgatgatccaaggtggtcctaaggctaaaacaacaaccacaagctcgaactccctgtgcaattttaagaaactgaacaacaaaggagaaaaatgagtgaaatggcatcgtcggagctccggcgaggggttagtcggcaaccggcaacacttgggggtcaacaaggagttgctggaggttgggatgggtggaggaagggtcaaaatgggagaaaacgggttgcaagggcaaaacaggggaacctagccagaaccaggcggtccagcggctagttactttttgccggcggacgggatggctggcggatcatttcggcgagcgacggggtgcttcggtatggtctaggtgtgctagtcatagtggttggtggagtgtgagctaattcgcatgggaaggtaacttttaactcaagttttcggagaaaggtcagctagagcagaataggactagacggttggactagcgctagcttctggccagctagtaggtcaaacaacggctccgaccggtgaacggtcaactccaggcagatggtttgggtgtcctcgacacgttggtgggtggcttgggagttgattcgtctgggaagctaacaatcaacttagatctttggaggaaggtttgctagaacaaaagcaaaaaaaaaggaggaacaaggggagagaggagctcgacggtttgggctgaaggaggaggaggagagagagaggatcaagttgttgtcaaacctcatcaaagccccaaatccccatgcacatcacctcatctttctctctcttgctttgcccttatccttttgcttttaggggcaaaatggtaatttccccttgcacaaattcccaatttgccattgggccaaatttgatgggtaggcctaagaaatgggcttggaaatgaatagcatcgggctcgagaattggttgggctcaaacaggcttaaggtttggtaatgggcttggaaggggaataatggttttgggcccaatgggctcactttctttccctaggcccaccatggctgtcctaccttgggcctaaggcccacattggctttgctcgacccacgttctcataggcttgccttctcggtccttaagtcctttttccccacactcggcttgctcggcattgctgattgttgaagtcgcatcatccaaagttcgtcctagacattcccgataattcgaaatccaatctttaattctcatgccatgtcaatttccctcaataccattttaggtacaactcagactgacgggcggctttgaggattcatgcgtaaccgactcgtgttaaaccatgttcaagacatctcgacacatggacgttattgactacatgaaattgcggaagatagattcttatttcaaagtacacgattactgaggatcgacataggatcattcgcgggctcactaacaataaatggaatcacctgtggttccattatattttgtccgcgaattgacttctagtcatccttgaaatcggcctgcctatctataggatcatccttacgcaagtttcacagtcaagtcattttctcaggtcaagttctttagtcgtacgagttctgtcttcattagcttttcccgtcgaggttagtatcttaggagtgatcaattttgagcgagatcaaccaacaatgcattgacgaaattcactcatttatcccatagagggctcgaatttcaggatgtcacaaatcttgatggcaaagaagaacaaatttgtacacctagagaaaattaacaagtttaggattcaatttgatagagcaggacaattagtaactcgtaaaataaaaaattgtgtgacacaaacttgcaacatccctaaagatgaagagaacaccacaagcatttcctttgatgaatgaaagcgatgtttgttgcagtgaagttttagcagaatacgctggggtggtccgga

SEQ ID NO: 10055 - DNA, 7192 bp, Eucalyptus grandis
  Intron number 2 from transcript Egrandis_v1_0.025711m (loc us Egrandis_v1_0.025711m.g) derived from phytozome v7.0 (c hr-ID scaffold_239; pos 7300 to 14491 reverse strand)
aggcggcgaagaaggagtacatcgagtgcttgaaggtgttggagggagaactcggggacaaggcttactttggcggtgagaggttcgggtacgtggatgtgtcgctgatacccttctatagctggttctatgggttggagacgatggccaacttcagcatcgtggaggagtgccccacgctggtggcgtgggccaagcggtgcatgcagagggagagcgtggccaagtcattgcccgaccagcacaaggtctatgacttcctcttggcgctcaagaagaagcgtcaggccaaaaaaatctcttgagctgattattgctcatttcatcactctttcgttcaataacccctcttctttcacgaggctgagcccttttgtacctctaatgctttcctttttgtattcgagtgtttctggatcagctaatgaattatatacagcatttcatcaattcctttgagctctttctgtcatgttcgggaatatctcctctgtttctaataacaaatcctccaagagttatttagcacatgttgaagcattcactcgacaaattagatgcacttaactttttaagccgtcttcccatggcttggctaaaaatatgccatggtctcttatctctctctctcgacagtgcttgcacagacactcacaggataattaaaaaaaaatgaaaatacaatcgataatagaagacaaacgaatgttaattggactccatcccatgggcgtgctctatgtggaaatctaaagcaaagcgaacactggaggaggtctggatgatgatgatgaagatgatgagggatctgcgttgaaacttgaagaatctctttcttctttaaggatcgtcgctaaagcactcgtcaatgggtgctattggaattcaagtcggcggaagacgacttagcgcagtcaacaatttgtcccaaaacgaacgttgaattgcgaatgaatcacgaacaatattatctcacgttggtctaaatgcaaatcacgagaaaagcactcgatttccacggcgtaaatgcaaactattcttgtaaaggaaaaatagaacgctttctttttctctcgacggaaaggggacaagacaatgagagaattccgagcgtatgttttgccaatcgtgccaacggttgtcttccagagtcttttatatgactccatgacactctttcaaaaggtgtctttccatcgtagcatgtcaagacgaaacggtgcgtttcaattgcaccatagacaaattaataaaatactacaagtgctttgctaagtgaaggaatctcgagggtgcaacctcagtgacgaacctagtgcgttgtatcttggccatctacaaatcagtccccaattacgcaaagttgaaactgggtgtatgaacaagttgatgacaaactctgagagcatatatgattataaactcaggccttagaatccagtgaaacttgagaaacaccagaacgccaaataagataaagaagttgcaggcattgcctcataatatatagtggaccctaggatcttacaatggagggagtttgtggagtgcattctttccatactaatttagttctcaattggggtaagtatactattagtgccaaaagttgtatatggcgctcactttggtgccaaaaatttctatcggataacttaagtgtcaaatcggaggaaaaaatatctctttggtgccaccaacgagagatttcggccaaaatgattacgtggcttatatatatatatatatatatatttaaaattgacatggctttttaaacgacatcgttttccatcatccttaagaaaatgacgtcgtattgccatcatatgtggatggcctcacaaaaacgacgccacacagctcatatgggattgaaattagggttttttttttttgttcgatcctcactcaacgccgacctagctcgctcggccaccatcactcagccaccgtgctcgaccaccatcgcttggcctccgtcatggttgctcgactaggtgagcaaggagaggctgaggttgtttctcgggcaagaagcgatgggaagaataggaggcgagggcagaggaggtggaggaagaaggggggttgaaggtggagagagagaagacgaggaggacgagggaaacaaagagggcgcagatggagatggtgcattaggctttgctcagggagtggttggtgctggtgttgttcttcagggaagaagacgacattgccatgccttctctcatgaaaaataggaggcaagggcgaaggaggaggaggaggaagaaggggggtcaaaggtggagagagagaagatgaggagggtgagggaaataaagagggcgcaaatggagatggtggattgggctttactcaaggagtggctggtgctagtgttgttcttcgaggaagaagatgacgctgccatgccctctctctctctctctctctctctctctctctctctctctcaatttggagatttagggtttcgacttgggggaaagacgtcaaacgacatcgttttgtggtttagatgctgactgtactctccggtgaaccacatcaacttcaaaaattaattaaaaaaatgtcacgtcagattttcgatcaatctgatcagagttggcattaaaatgatcatttttcaaaatttttggcacttaagtgatccaaaataaacttttggcaccaaagtgagcgccgtacacaactttttacattgatagtgtacttaccccattctcaattggtagcacatgctactaattaggagtgaacatagttttatggcaaaatttgaaacctgagaatcggaccggtgagagcctagaggttctgagttttaaagtatgcagggtagattctaaattccaaaaaataagaaatctattttgatgggtatatcctagattcttagttggaataacctaaaacctagaacctgtaaatttgaaacctaaaacctggaacaagtttaaggtttttcttgattcatgtcttcacgcaattttgcaatataatttgagcttccattttatgattgagatttttaatttattaatattcatattatctatatatctttatgatcaatgaattgtgcatcaagtagtgatcattaaaggttttaattcactgcaatcgtttaattactaatataagtgaaaccaagataaaccctaaaacctgtgacatgatatgttaggttccaaattctaaagtatgtagggtgggtttcaggttctaaaaaaaatgaaaaatctatttcaacaagtaggtttcagattccaagtggaatatgtatgaaacttgaaaccgctcatccctattattaatgcctctccgatcagttttgtcttttacgagttcttttaccatacctactcctaatgatcgaaacatgcatttgattctctctccactttgtgcaaattaggagtgccagcatgttttatgaagcttatgtgttggataacttttaataagctaagcaacatggaagtgtacttgttttatgcatgcttacttgagataactatgcaacatgatcgaaggtgacaagacgttcattacaggtgaataataaacctggatttattgatggattgctagagaagccagatccaaaggcacccaaatttaatgtttgggacgtttgtaattccatgatagtttcatgaatcttcaattcccttgacaagagtttacaaggaagcatggcatatgtagaagaagcaaaattactatgggttgagttgaaggagagattcgcttaaggtaatggacctcacatccatgagatcaaaaccaagatcgagctcctataccaaggaggactctcggtggtggaatactacaccacattgaaagtcttatgtgatgaactcgatgattatgatgatgtcccataatgttacatgtgctgcacttgcgagatacaagaagaagaagaaggtggagtagatccaccggtttctcatggacctcagtatcgagacctatgggaatgttcgttctcaaattctcaacctcaagccactcctattcctcagtaaggtttattctatgatcacataagaggagtgccaacgatcaattgtttgggggagggaggagaagatcgaggatgctgctttctctattggaagaatagccccaaggaaaacgtcatttgggaaatctaaatgtgaccactatcggaagattgggcacctctaaacatataatagggcggttttttcttctaaatcatccgagaaacaacacaggtggatttcctatgtgaattggggatgaacaaaagaattttactgcctggaccacccagaaccaaaacggactagaattgaaaacggcagttcctatgggagacaattcgattctcgattgcaatttaatgaaaccgatgagtaccaattcgaacaagactagtatatacatacatacatacatatatatatatatatatatatatatatatatatatatatatataaagaaattctatcacaaatacttaattattttgtagctttcgacttaatacacacacacacatacacacatatatgtatatttgtagttattagacattattgaccaattttttctattgggtgtgtgataggattaactccttacatttttttcttccattctaataatctatttacttactttctcaagcaaaaaaaaaaaacaaaaaacaaacgaagatgaaggagaataccaattggagatgcccataaatgttgttttatcgtcatgatacgaaattaagagccaacggctcatttcaagagtataattaaatctctcaataaccattcccatgattaaattaggttgacactaaaaaaaaaaaaaatgaatcaaacaattaatattttaacttatgtgaaagttaagatttttaacgtagagtttgattctcggcagttcccagtgtcaggaaatcccaagaggaccataacataacctttaaagaaattaagcttctatctaatgagtattgtctattcgtttcgccctataattttcaatccttcattaaaatcaatggtttacaattcagcccaaatacaatgccaaacaagttttggtgctctaaaacaaaaactaggttcaacgtaatattcattgatcaatgcaattttgtaagttttagggaccggtttcatggatccactagggaattggaccagaccaacagtccggttcccagatggatccatggaatcaacgggtggtttccgatttcaattttttggaacaggtctttagtggatagttttcgattctacggttggaaccacccacccatactgtgctcacccctaatatgaactcctgatatgttattaagagaggcgatgctcatttaagccctaattattttgcatgatatgctatatgttccaaacttttagtacaatcttatttctattagaaaattgagtttagatttgcaatgctcagtaacattcttctcttctcaacatgtcatacaagatctatccatgaagagatcgattggagtgggtaatcttcaataaggggtttattatcttggatgcatgggcacgcatttggctttccatctttgtatacaaagggaagcattgccatggagccgcttttcgtctcatttggacaaaggaagtaagagtttgacataaattgaaaatatcgcgaggttgaaaaacaaatcatttatggttccatttgtagattgcaaattgcaccatttttaactcaagacttgttccatcaatcgaaaacttaactagataagttccattcattccgacagcttctacgtcttaattcatcggttgaagtaatctttaaccctccgatgaaattcagagcaaagtcgattgacatatagtaagttgtgaagttcatccttttcaacatgaataaataatattaaataaactttaagaacgcagcaaagtcaaaatagctgtctcgaagatgtaacttgcttcttaatcttgatcttgagtaagatctggtcccttcttgtcctcttcttgccctgcttagtttcttcaatgtactttttgcaacataaaattgcaatttgtttacggatctatatcaatgatgagcggattgtatttataactctatttatgttgtgaaaaataaatattttgaaaaatattttcttaaaatgaaatcagaaaaatatttctttattgacaatcatttatatctaaatattttatttataatgaaaatatttttcgttcatttaattttataaataatgaaagcggatttgatggaacccaagtacataaataatcgagaaatggaaaatgaaggactcggtgagggactggaaggcacttgaaagagggaagcgactgccagtcccaccccggaagaaaatatctcttgttcgtgcgacaccgatgccatgacctcatcggctcgggcatggagacttgagatctgagagtgacgcaagcaatgagcatatcgagccgcctctccacccaccccgcgactgcgacgagataaaagtcacatcctcaaaaaatcccataaaaaaaaaaaaaaatcctctttccctctacataagtggcacctgagttagcctgatttcaccgcggacagcattcttcatttcagttcaaattagcagaagcttcagcttgtagctacaaattcaatggcggaggaagtgattttgttggacgtctgggcgagctcgttcgggatgagggccaggattgccctgcgtgagatgggcgtggagttcgacttgagggaggaggacctgagcaacaagagccccctgctcttgaagatgaacccagtccacaagaagatccccgtcctcatccacaatggaaagcccgtttgcgagtccctcctcatcgtccagtacatcgacgagacctggggtcacgagtctcctctcctgccttcgaatccttacgagcgtgcccgggtcaggttctcggccgactatgcggacaagaaggtaagacaacaaccctttagtctttcgaacgttctgttatcatctgtgcttaacatcgagacacgaaatgatggtgcagatttatccggcggtgcgagcagtgttcctgtcgatgggggaggaccaggaggcggcgaagaaggagaacatcgagtgctggaaggtgttggagggagagctcggggacaaggcttactt

SEQ ID NO: 10056 - DNA, 7540 bp, Eucalyptus grandis
  Intron number 5 from transcript Egrandis_v1_0.001200m (loc us Egrandis_v1_0.001200m.g) derived from phytozome v7.0 (c hr-ID scaffold_8; pos 68192248 to 68199787)
cgcacattgttctggtacactaccttgaagtaaaggtgcttattaccttttatttcccccttttctctgtgctatcctctcttttcaatctaattgctgctgctggcatggtgttatctggctgcaatcaacagtgtttaagaagttaaactgaatttaaaactggtcaagccactggcttgtggcttgactgtgctaactagttaactgctggtcaacgtgagtgaatggtttgcagttcaacctggccaaccatttccccgcctgggtaagatatgaataatgtgagagaaaagtgcaattttttattcaataatgttatatacacacacacacacacataaaataaaccctaaagctcctaaagactattttaccttaaaactctaacactcccccttaagctggagcatagatattaatcatgcttagcttgttacaagtataatctattctctcattacctggaggtttagtaaaaatatctaccagttcaccaattcgaatatgacttggaagaatcgattcactctgtaatttctctcaaataaagtaacaatgtttcgttctctcatgaaacacgggattggaatgcattgcagctttattatcgcaccacagggtcataagtgttgaagttttgaaacctgacttaatcaataacggttgaattcataataattcacacgtcacttatgccatggctctatattctaactcggcactagagcatgtaacaacaatctgtttcttattcttccgttgataccagattccctccaactagggtacaatagcttgtggttgacttcctatcatttggagaccctacccaatcagcatccgaaaatcctttaactttgttgaccatggttctaataaacaatccctttccttggagtcttcttcaagcatcgcaatgtacaaataactgtgtcccaatgagacgttcgggaggaagacagaaaccggcttaccacattgacaggaaagactgtctggatgagtaactgtaacataatttagcttcccaactggtcttttatatctctcgggattatcaaagatctccccatcctcaacggtcagtttagcccattgttccataggtgaatcaagaggctttgatcccaacatacctatctctataagcaaatccaagacattttcgttgtgacaaaataatatatttatttgaccgtgcaactttaattcttaggaaatacttcaattttcctaagtctttagtctgaaactggtgctgaagatagatctttagcttagctgtaccaaccaagtcatctcctgtgatgataatatcattaacatatacaatcaagaatagtttgccttcccctggatatttatgaaagaaagagtgatcattttcacatctcaacatttcaaaagaaagtgtggcatcagaaaatctcccaaaccatgcctgtggagattgcttcaaaccatataaagatttttttaatttgcaaactaatcccccaggcttaccctgagcaacaaaccccggaggttgctctatctaaacttcctcattaagtgtaccatgcaagaaagcattcttaacttcaagttaaaataagggctaattatttgcggcagcaaaagatcaaaattcgaacgaaagtaggtttggcaatgggagaaaaagtatccaaataatcaattctatacacctaggcataccttttggtaacaagtctcgtttttaaatgagcaagagaaccatcatgattgacattctcagtacacacctattgataaccaatagcaattttgcctaaaaaaagaggtaccaagtcttaagtttgattcatttcaagactctttaattcttcttctattgttgtcctctagtcagaacttcgtaatgcttcaactacagtcttagggacaggatgttattcaacagtagataaaaatgaccaaaaatgagacacatgaaaataagagataaaatttgcaatagaatgttgagtacaggtattttaccttttgatgagcaataggaagatcaagattagatgtggaggaagagtctaatggcggatttgacacgtagcagtgaaaggaggaaaagggggagagtagtagctactcaaggacgtcgagtataaatctagagaggaggcggttcttgtggagatactggtgaaacagttgaagtagtagatcgaatggtggtcacatataagtcttcatcaaattcaggcacagtaattgaaacatcatgataaatagtggatttaaagaatgagacatcttcgaccaaaaaaaaagaaaaaaaaaagaatgagacatcaacaattataaagtattttctcaatgatggagaataacaacaataccccttttgagtacaagaataatccataaacacacacttgatagcctttggatctagttttgattcaatgatcataaacaaaacaaatgcaaccaaaaattcgaggtggtaagacaaatagtggctcatttggaaacaaagtagaaaatggaatgccacctcgcaaaatagaagaggacatgtgattattaagatagcaggcaattagaacagcatcaaaccaaaagattttagggacctttatctcaaataacatcgatctagtaacttccaacaaatatcgattatttctttcaataacaccattcagtaacaccattctgttgaggtgtatcaagacaagaagattcatggttcatatcgtgttgagtcataaaatcaaagaatggtgtagaaaagtactactcagcattatcataatgcaaaactttaacatgcacaccaaattgagtatgaattttagacataaatgcatgaaatatagaaaaaaatattttgatacttttcatataacaaagtcactcttgagtagttatcaacaaaagtaacaaaatatcaaaaacccaaattggaaaccacatgacaaggactccaaatatctgaatgaactaacaaaaaagatgttgctactttaatgactcaaggtggatagctaatacgatttaatttgccaagttggcatgactcacattctagactagaaagagaatgaaaattagaatttaacttctgaagactatgcaaagaaggatgaccaagacaacaatgaatctgatgtagtgatataacactagggtaagcaattgatgaagcatcttccagcacatacaaccccctaccccttgtctcatgtcctctaccaatcatccttttcgtagctagatcctgaaaaatacaagaattaaggtagaatgtcactgaacaatgaaagtttttggttaatttactcattgaatgatgttaaatggaaattgtggaagataaaacactgaagacaatggcaatgaaggagttgggtgaatagtgccaactcccttaacatgtgtagatgatccttcggctaaggtaattgtggatgaaaatggagtaagaggaaaatatatctaaaaggcctcaaaagcccttgaatcaatgacccaaggaagagaagtagttgaaagacatgcggtaacattacttatttgaaccaaagtagcagtggaagaaacatgttgtgaaatttgaaaactggttatatcaggccaattcctcaagacatattaactaccttgcctttagaagattgtggagaagggtcagcattggaagtagtatttgcaaactgttggtgttgccctggtcttccatgtaatttaaagaaattttttttgaatatgaccaagtttgccataataatgacatgttcatgtggcccttgaggtaagtaaacacataagattgttcattatcattttgctgaccttggcctctccttactcttgtgccttgcctccccctcggccaccatgtccatcatatcctccatgacttcctccattactcctaatttcattgccaattttagattgggacacgagctgaactatttatcataaatgtacctcgagaagacccataagatactcgaaaaactcgtgcaaatgtatcaatgagtgatgcaatagtcccttctccaagaatttgagacctaggtctcagtttcatattcaatgcctagaccttctaaaaatcccatcatagccaattgttgtctttgaagttgcatttgctaaacattagctaaaatagggagaacagcattcatctccatttaactcctacattctcttaaaattagcaaaatactgtgtgatagagcggcccttccttttagatcgattaaagtcccgcgataacttataaattctcgataggttattttaaccagaatataacacatctaagtactcccatagtaatctaaccgtgtcaatatgtgttactaaagcaactacattactcttcatagagtttaatatttgactaagaatacgtgcattaataaagtcccaattttcattgtctctgggtttagactcagttaagtgtatgttgattcctgcctgttaaagtaaatttcacaatttcctttcattgttggaagttagaactgctgtcaagcttcttatcaataattttattagatgagaaaataatctttcgttacagaatgtttttttatcaggatcattctctcttttatacctcaaagtatcacccgttctccaagaacaagaaaattctcgcaatagctttctttagataacttagcccaaaaaaatcagtgactcaacgaaattaataatatatcaccaagaaacagcagcccagaaattaacaatcggcaaacaccaagaaacagctagacagaaaccatcgacccaaaaattggtgacccagcatctcaacaactgaaaatcagtgagccaaacatgacccaaacatgacccaaacatcaacgctggaggtgacctagcatcccagtgactagggagtcgtgcaagcgcagggctaggcgagccacaagagtgtgcttcgcgagccgcacgaggtgtctcgcgagttggacaagctgcgcgaattgcgtgaggcatgagtcacggagagagaactcatgtgaggaagagttgtgtgtgagcaaagggacacgatggagaccaaccatgacggtgattgttctggtgagtggccgatggtggcgatggcgattgttcgggcgtttagggttaagccttaggtctgatactatgtgagagaaaagtgcaattttttatttaataatgttctatactagagagagaggggtaagtaatgcattctagccaaaataggtggacaccctctatttttatgcatgatatgacaaaggattggtggacttccgagggacttaataattacacatgacaatcattctagaacacttggtttaacctgtatagggttttctgaattttcacacttaatcagagtgagctttactcttaggctgtgtttggttcagctttggaaatgggtcttggggatatgcaaatatttttggcctaaaaggctttggagaaatgcaaattgcatttggtaaaaaaaaattttgcaaaactattttggtgtaaagagtatttggcaaattttttttttttaataaatggctcttggatttcttttttctttttaattaaaaaatattaaactctttgttgactctagggaaggtaaggatagttttggaataatgaggtaaaatcgaaaaactaaaaaatttatgatagtaattttgaaaaagaaacaaaagtagtttcgatatttggtcaaatgctaaaagcccaaagttggttcgtattagcattgggcttttagctttctcgagatcagcatttgactgaaagccctttgaacaagcttgccaaacacctcaaaatttccccatggggctttggaggctaaaaggcttttggaaaagttgaatcaaacgcaccctcaaaccttgtggcacactatcttgagtcccaataatagtgaccacatctattggcatgtgatgtttggacatagaagggagtttttgtgaatgggtagagccaggtgctcttcttattttaagacaatagggggatgattgcttttattactgacaatcaaatagaaagccccaagggagccattttctaggatccaaactatgtgattgaataaatcctcgacctattgggggcccagcatgttacaaatgaatccattgaatcccctgtcgtcactgagaatggctttttgaaaaccttttccctctccactcatggtagtactacctatagaaaggatcgtgaagaggcgatcagaatggtatgcatgtaagggttttgcaaacgagtcagcaagtcgtcgaatggttttaggataatatgtcagcaagttgtccactttttaaacatagctttggtaataagtccttgctgaagcttttcttgctcaaaaaacagtcgaccatagtaggcttaggacactcgttggatacaaaattaggtgcaatatgaaaagtgggctccttgtcactccgctacctcatgggcacaagctccttgagttcaagctccataagaatatgtcaagtgcacattaagtcacattgcatgtagcctgggcataggcaagactttgaactgtttccttttctccacgagagaagactgcctccaacagatgtggaatagtaggtagtaaatttcctctctgagtagatccttccagttatcaggcaaaagacctccttccctgaaaatttttatagataaagtgatatcggttgtagttggatatcagaattgttgaggagctcaaggagatgacttggaatgaattactgcagattgcaaaggcagtgttgggtctagtgcaacaagatagttcagcttcccaactacccttatgtatctgtttgaacgctcagaaaagtccctgtcatcagctaccaacattcacattggaattaataggaaattctatttggtggtgtaaaccctaacatgctggtcctggccgatagatccagtacatacttcatcgagacaattgtataccctgcttggatcttgccaccttaaaaccaagaaattgtttacaactttttaagaggtttgtgtaaaagcttgccacgtcaactttccttcttctagtagagtaatgcatgtatatctcccatattgcataaatctctgtagacttgtatgctattcatattctactgggtagatcctgtcctttgaatgctcccaacaagcttaactcttgttccaattaacattgctttcattataaaagaaattatttttatttgtggtttagtggaacaccaaattagtgatgtaaccattctctagcgtaatgttaatttctacaagttagtaccataatatcctattacagcagaattgctaatttggttgctttaaccctgtacaagcaatgtatctttcaacaatcacttctcttgttgctacaagagtctagactaattgagcttctgaatcattagaatcaatgaatgagttcctacactgtaaatgcaattgtatctaatatcttttctcttgctatatgctgctcacactgttatgggcatgtttttctcagggcaacagg

SEQ ID NO: 10057 - DNA, 1180 bp, Eucalyptus grandis
  Intron number 1 from transcript Egrandis_v1_0.007899m (loc us Egrandis_v1_0.007899m.g) derived from phytozome v7.0 (c hr-ID scaffold_6; pos 42414460 to 42415639)
ccaggcaccgaaaggtccccctccctctcttctcttctcatcgcgtcgccgattcgatcttagcttcgcgcgtctggacgtcgcggggtgcggtggacacgggccgttccccgtcgagggtcgagctgtttctttttcttttttttcttttttttcttttttttgggttctgtgctccggttgtttccgtgcattccggaatttctcggggttgagaattggatttgatgttttggtccgtttcgtcatcgtccgtgccggtttcctgtgcgcggctgcctgctggcgtggtttgtggttggatctgaaatgatcgtgtagcgattgtgatgtgaaacgaaattctgtgtggagtttatctggagtgagtatcgggtgatgcaaaatggtgcagttaaattagttgtcttcggaagatttacttacccttttggaggaatgggagatcgaaggtcttgatcttgtaaaaggaagctcctttttcgctctcctcctataaaagtttcttgttcattaggcatgacatccatagtttctcactaattctgcgatttgctacatgtagatttttatttttttttctcttttcatcttgactgcaatgctttgcatatcttgaagtttctatctttctaagaactcttcaactcagtggtttagcttgttttgtttcctctaactctaagtacaatctctggaagtagctcatcccgtgattattaggttatttgaggtgctgatttgacttctttttagcactcttgatggataaaagcagtgccattaattgcaagaaaccccttctacccttctatgtctttgattctgtttccaatgatacacatagagcacctgactagatctggcccaccatacaattgtattttcctttcgtagaggcttctgatataactgtttccttagattccgtttctaatcgttattcgagatattagttgttgttaaatttattacatcattgcaaagaataatatgatatttaggggttgattttctggcatctttatggcaacgcacacaaaatatgcttgtgtagccgagcaaattgtccaattgttttgataatgctttaaccttgtcttccttcttttatcaaatcttgaccatgacttaaacatatgcagatcctggaaggtctattgaaattgccagagaataa

SEQ ID NO: 10058 - DNA, 1874 bp, Eucalyptus grandis
  Intron number 11 from transcript Egrandis_v1_0.001684m (lo cus Egrandis_v1_0.001684m.g) derived from phytozome v7.0 ( chr-ID scaffold_8; pos 41175722 to 41177595)
gagtctctggagtactactgcatcacaagcaagtgatcaaaccctgtagctttatgtgacggttggtttgcagatttctcttgttcattcgttgtctttgagaggtcaaacttgaggtcttgaggtgaatcatccatcattccttccctcttcgcgctccttgcaccaaccaagcatatatgcccacagtcaaaccccaaaaagaaaaatataaattggttaaaaagggaaaaaatttaaagtccgttctgtaaaaagttacttgcttgatatttgaacgaagtttgcaatacatggatccagaggatgcagtgtgaagtatgtcaatatgctacccctctgaggaaatgcctacactttgaccattagtaacactgtgactactagtgacattgcttctctttaatcaatgcttctaaggactcacaaaatacacagctaccactgaccaagtaaaatgcaagcgaaagccatggtggctcaaatctgggttgtctgcatttggtggtgtggagaattgaacccatgccgtgcatttaattcacatgtgcatcaactctttagcccctgagttctttctttgctcgtttggctcatttgttaaggagaggccaacaaatttaactcttaatttttgaatcttagtattagcttgtttaatttgcagaaccttataaagcttcttctcatccattttgcagcttggggttctatttcttagggttttgccttatcttcatttccagctcatctaatatctatgatgggaaaagtttgactgtttattttcagatccctgcactaactcatgtaataagcaaatcattaaacatttaaaatccttttgtatcttgctgatatagcaaacagaccaaatccctttttcacacaaaacgtagctcttctgacccaagatttaacttttccagttctcagctccgtgcgttttgttccattgttaaatatgcagctgactgaaaatttagccctctagcgatttcatgccattggcttctgatgaaaagaaaacaatagaaatctttaaaaatcatatgcacagaatgttgaagagcttaatttggctaaattacatgggacagcttgggattttggaatttttctctctgcccctatcactctctctctctctctctctctctctctctctctctctctctctctctcacacacacacacacacacacacagatcatggcaagaattcttgaaagttgggagcgcagaaaagcacaagtcatcagtgcattgaaagaaattaaatttgcttcctgaaaataacttgaaaggaaatgagcaaaggctactgtctgaaaatgaccagaagctcgttacaactaggaaaatatcacaatttgggatccttatgaatcttgctgcatttaagacattttcactgactttttaatgttttcacacagcaagatatattttttctttgttaggttaaatctaatcttccgtagcaccagttagttttgtttcgtgtcacctagatactttgtgttttatgttgcctacactttgtaccgttttcaaatatgcaaatgtatattgtagctttcatgtgttagtcatatatgcctcgctattggtctgattgtagttaggatacatgtgtcagccagatccacaattcaagaagcattcatttactcttcatagctcatctcatccctagattggcaatgtgtatatgatcctttgaaatgtgcaatgatgaaatttgggtgccagctgcaagcatgtttgttttcggttttcttcccaagtcagtaacagcaaattcaagtgttaacgagagatactgcgtggctgcaggacagcaaaagggaatcctcctgttacttttgcaa

SEQ ID NO: 10059 - DNA, 6631 bp, Eucalyptus grandis
  Intron number 2 from transcript Egrandis_v1_0.012959m (loc us Egrandis_v1_0.012959m.g) derived from phytozome v7.0 (c hr-ID scaffold_2; pos 18438263 to 18444893)
aaggtaactccaaaaattcgatctttttcaaagaaaatggagaaagttttcatctgtctttggtgggttttcttgatcgcgtgaactgcggcggtgaggaaccccccggtttgccccggttccggcgctccgccgtcctcggtgagatctccatcgaggagcaggagctctctgcatcgaggacgcctgcttcgaggatggccaacactctagagttctacttttcaatttttcagcttatttttcttaaaatggctgacatggcaatcacgtcggcctctcttaaggaaaattataaaattcattaagtaaattggatacgttaacggaagagcttaattacacaaattttgcaagttttaaaacttattacagtttttataaatttttgaactcgattacatgtgcacgacaaattttaggatttttagtgtacttttttattctaaaattttctaaaggttcctaggtactttatatttccttaaaacgttcatatgacttagtatgtccacatgtattttgtggttattgatcatcatttggcatgtatatatatgagcaaagaagatgtctgtgttaaagaacttcagaaatattcattataatatttctttctcagagaaataatttataaattgaaggaacttccttaattggccaaacccagtctagtcattgcaagatgttggatggacgagtgtttattaacgggtatataatggtattttttgttttaaagtccgtcaaaaaatgacaatctaaaaatgatgttgttatcatttgaaattatttgtattatgaacgagaaaatcttgcacaataagaccgtaccatttgaaagttacattttcaaagtatcttgactaataattgatttaggtaccatttttgcaatctagtgagaaattaaaagatgaacgagtataaatgacaattgagatattctgtcattaactggataatgacaaaatatgaaaaaaattaaaaagtgaaatataaaaagacgtgttttatagacttattataagttttactttaaaagatcaagtattttatcataataaagcaaaattatatgggagatgtagggtttattgaaaatatgcatgttcataaattttacctaataaaggatactaaagtattatgtggttcttgttaaaaaaaaagaaaatattatatagtttggtccgagtatcgatacttaaattcacgaagagagttaacagtaattaattcactataattggataatcagaattataatcactaaatcactggaatggttctccaccaagattataccaaactctaaattatttattaataaacaattcaatcatatgtaaatatcatagcatagaaataaccggtcgttcaagctcctcttcacaattgtatggctaaaccttaaagcactctatacactcgtccttttgtgcaagttctcaagggaatcttcactgtgtggcttcttttttctcaaaagctcctatcttatcaatgtctttcattgtaatcgacaactcacatttgccatttagtgctttggccaaatcttgagttgttcctcccattaaactcctcaatttctactttcgctccaaacataattacaacaacataattttcaaatgataatcaaacaagtaaaaacaccaaatcataatccagaaaatcctaaccaagctccaatacaaattgttaggagtgcgtaacaaaaaaccgatgccttaacttaagaagatcatcaagagagagttgcaatccgagctcgttaacatatagtgttggacccacctcactttaaatagtcatttataaatgtcagtatatatcagacagctcctttcgagggtaccaaagatgggccctaaacgtccgaatgaatgtacttaacaaattgcttgatcgaagtcacgttctcttccaattgatgatatagtatttacttttttcccttcatcactattatggcaactcgagggatctttagtactccacttttagtgtgtacttgtgcttgatgtcatccggtgtccccaaagaaacaaagttcttcttgaactccggtaccttatgtttgtcaatgtgcacatctgctatcgtgcatttgaatccgaactgtacctatttccacaatcttgcaggctacattatttcccattatatctctatgacaatttgtagtttggtaaatagtaaactaattgctatgcgtcacataataaaaataccccaaatctagcatccattaatatagcctctacatcattgatgctctccttagcaacgttcaccacactgtttacaactttatgcccgttacttttgtttcttacctttggacaatctctcttgatgtgtccctccttgtgatatccaaaacactacacacgtctttgaactttctatgacgtgacttcgagctacttttacctttactactattgaacccctaatgttgatcactacctcgaatcattattctttgtgctacgtcctgcaccaaactatcatctcgcaacttttgctgtcacttcttagaaaataaagtggattttacctctttcgaagtaataacattgaatcagtaaagtgttaccataactccgaacagaaaaaaaaagtgttaccataactctagtaaagaaagtaacaatatcatgccctgttcttcatgatctatgttcttcattatctataatcttaccggcattctttaaatacatcatgactttattaaactcatttaggtgggatttgatcgacagatcttcaatgtatcgaaattaaaacaacctctttaacatgtagaagtgattacttaaaccttttgtcacatggaatgcttgaagttttgcatccttctatttagccacctctattaacacctcattcaacatattcaacaagatattactctttgctttctctattaactctattcgtaaatgtaagtaccgacactcggatcgaaccacataaaatttttggtgtcctttattgttcatcgtttatttctctagcgaaagcgtcttatcttgattactttatatatttttgttaacaaaaaataaagaaagtagaaagcgtcttattgctttcttcagttaggaattactcgtttaggcaatagtctcttcgttcttatgttgctcttatgttggtcgctaaattaaaaggaaaataaaattttggaaaaaaattaaaataaaatgagtacatggaatcgtactcacaaagcaatgcattggtgaataaacttttgagtacctttatcccattaagccaccaaataaaaatctatcaccctgtttcgtacataaacttttcattcgatatttatcattaccctactaatacactcatataaaaaaaaggaaaaaaaggaaaaaaaaggaaaaaaatagatacaaaaaatcttaaaatgctcattataatatcgatactttaatattttttgggttacttgaactcccaactcatactaatatgttaaaaaaaccatccatttacaacataaaatcataaaatttgttaatttgtgattaatagtccaaacattttctttgtgccaccaatactcaaatcagggttttcataacacaaaaaaaattagaaggattttggtacctctgatcttcggtgcaaaaaaagatgggcccgtcggatcaggagcagcaacggctaaaactggccctttgacgtgtggatcggattcgaagcctgcttatccgctggtcccaaaaagcgcaaggccagtacaaaatttgtcgccatctttttgtttgctgtcgtccccacttttgcacgtttcaatccattaccaacaaaaaggacatcatgaacagtttaagcaagaacaaaggagagaatatccttggactcaacgcttcttatttcagctcttgcgtttgtctattgcttcaattatttattttttccttctaattttcttttgtatttagaattttgtttaggtccttaatcagacatcctgcgtggcgaagagtcactggtctaagatgacttttgctgcgctgtgatcttgagaaggaccggtttagcagcaaacaagcaacctctgtccttctgtcaccaattcaaatttttgatcttctttttcaaagtgaattctcccttcttgataggacaattttgagcttttcaaatttgattttttgaattgagatatgatattttcgattttcaaatttcttaaactcacgatattacgatccttcatagtcactaatttcttatgtggttgttgattgtcttgatttattattttttttttctaattcaagagttggtacatcttaatcttgtattacagtattttcaaattgcagctagtgaagattcacctaatcatatattgcactttagctcaccaaacaaatttggccaaaacaagaaatattcacctaacagaaatacattccaatatagaccctagagaactcaacattaatgcataaactcctatgcagagaagaaaaaatgcgcatgaacccatacagcataattttagctcttaatttctccatgctttaactagaaccaacaaaaaaaaaaaaggtatgaaatagggttccatccaatcatccaattaatttctccattctagttaaagcatggatggaaccctatttcatacctatgatgggatacttttctaacgggtcaccgaatatgatagcatgactctatggccactcataaaagaatcaaaattcaagatatcgaatttaggaggggcataaaaaatgatgctagtcaactcttgatggccgtgcaatgcaacttgtcgaaatataaacaataaatataatcttttttatttcttccctgggaatctacaggggccacgctcagcagagctgaagaaaacggcatattcttgaagactttctttgaggagttgccatatgtgctatataaccccagggactcaactgcaaaaaaatccccactgacccatgatcgatctcgatcggagaaggatttaatactgtttcagcccaaaagagaagcgctttattatgagaatctagggaccatttggtagcatttgacagcagcattctataaactaaaagctgcaatttgcttcgtattatattggagtttctaaagtctctctgtgaagagtttgaagggaaatgcaatggtggagagagagagagagagagagagagagagagagagagagagagagagagagagaaagagagagttcttgaaaaaaataaaaaaccttatcttattgtcatggtgaaggtgctctacacttccctttggagcttccaaagagacaccaccaactattttccgccactcaaaacttagccctatctgctaaggaaaagccaacaaacatttttgcgcccttcaaattactctagaatctatacaagaggttgcacctcaaacaacaaattacatctctctctctctttctctctctcattcttgttttgctgttcagcctttctgcagaagttctcaggtaaatcctttgcaaattttgagccatcttaagcaattgagtacatctttggcattaaaagaggtctttggactggggtctgatccaagacttctccattttgatcacttaaaggttgttccgccacattttgtttggttgacaattgccttggactttatctctttttgacaacaatgtctgcaaaagaagttctgtgtgaggcagaatgaatgaacagagtagtagtcattgcattcgtttattttgaaaactagatcaatctttagcaattgtaaagtgtatgttgtggatctcatctggagccaatttctcaagtatcgacttgtgtgtcaattttttttttttacttcaattggtcatactcattatttctgtgttctcgccaaagcagttgccaagagtaatttgcaattatgtcgagtttgtgaaagaagaaagtagttaaatgtgattgccttttggtcttgagagggaagaattaggtgccctgtcaagattcacgagttgatcaatcattatatctaattgaaatgtcagaataacgtgtttgttggttgacccttgtaagttgggattccagtaatctcttaaacagttgcactctgcagtttgcttccttccattatgtaactgccctcagtatattacttatccacacgatctcttttgggaatgaggtctgagaataaccttgaaatggttctaaaataagtatagttatgctaccgtctttagttttcttttagaggagaatgtggtagcgtccttagggctattgatatgactatttatccttagaaaatgcaagtttttcctacttgaaactagttttgtttttaaagaaaacaaatttctagtctttcaattttctaagtgtatcaagaagtggttttctgttttctggcgctggcacatgcaaaattctttgaagtacccagtccattctttcatcttttcaaaactgaactcttgtgcatgctgaaaggccaagtcatacacatagagcttctcctttgagctatcttccatgtgataagctcccagattcttggttttcagtagacatatctattactcatgtttctttattttcagattaggcaggca

SEQ ID NO: 10060 - DNA, 5423 bp, Eucalyptus grandis
  Intron number 6 from transcript Egrandis_v1_0.006516m (loc us Egrandis_v1_0.006516m.g) derived from phytozome v7.0 (c hr-ID scaffold_2; pos 60282857 to 60288279)
tacctttcctggatccatacaaacctaagatcttggtatgactatcgtgccaatactttcagtaaccttaatatgcaattttcaacctctaaattaggtcttttttcacttaaccaattttttgtccttgcaggatcttattgagaaggcagagaaacagccgaatattacgattggcgtactggtttccattgtggtcataattttgacattattcttcaagatcctttttggtgggaaaaaaccagcggtatatgcatgacctgtctccattttgctaattttagcctgagatctgttagaacagtcaaagcaattcttttgctaacattttcccccctcccctgcaatctgaaggttaatgtgccagagccacgaagtgaagcggctccggagacttccgacggtccaggtagcagtggagacaaggaagacgaggacgaggacgaggacgagaaggaagagacagctgctgctcctcgtaggagatctatccgaagggaagcttaagcgagtcacctgtgaagggctttctgtgtcattactccaaattttgagcagtagtatatgttgccgggcatcgatcaaagttgtggttagatgatttttcgattctgtcatgggtgaaatctgaatactatgtagaagtctaggttatcctggattacgtctggaaatgttgtgttgatgggattttgtagcagatatttagttttatttggactggcaagtctttaaaggaaagaaaacgttgaagtacggttgtcgtgctttgtatataatcaatgtctctatgcacccacttctctttttaattctgcgcgggggagaaaatattagatggtctgccccaccacttcagccactcattgattgccacgtgtttaggtgggggcatccgtttcaaataattacgtctttatgcccgtttaaaatgtaaacctaaggtgttggtacatcacagggaggacgaccgagtgaaatgttggtgcggtgtgcgtgattgtgtacgctttgctttgcctttgtccggagataataattaagccgggcgccggtctcttttgtgctataatttttttgttttttttcaagcgagggggcgttatttcgttgatagaatgaagaatagtgggttttccagcatcgaccagaatggggtcgctttgtcactttgcatttctagaaatcttgaatcattgcaaaaatcatgtacaagcttcttcaaaaaaggggtatccatatcacaaacggtattcttttttcttactgagctcgtaacaacgatactttgaaacgatcacgaacttggtcttgtagaggcgttcagcgggccagttgaccatcagcgtcacgggataatcaagtcgccgtgggcgtatgcatggggagatgctgaataagccgagcgtcgtgtcaaacggggggggaggaaaggggattggactcattcaaacctcgtttttgtcaaaaaaaagaaaagaaaactggccgtgcttggcccggcgcataactgcgcggggacgtgcgtgggattttcctctgttgggcccgacattttcttaaaaataaaatatttatttttattgaagaaaaaaaactcagaaaacatggatataaatgttggaattaataaattgtgatgatgaataacagtattgaacagcaaataatacattcagagaacgcgtccaatattgtacttcttaaccgataccccgtgctacgtttatttaaaactaattttttatctcgcaaaaaaaaaatttcccaatatctctaacccaaatttacttgttatttcatccaatatcacgttaaaatttatatatgtcatgatatgtgcatatcttatgttggatcaatcatctgccatgtgtattcataatttgctgtactcatccgattgtgattcgttcttatcaatgggcacttgattcacatgaattgggctcgatgacttgaattgttaatcatattactcgaatgatcacataagatatgtgtatattcacataaatttttcatcttttatacgtgtgttgaactaacggacaatacctttcttttttttttttttttgcatgaatcgaattatgcatgtgtaaaacacattcagtactacattcaactaaaaacacttcaatttttttttatacgttgcacattagataacacaattagcaactaatttctataatttctcatactttaaatagtcctgctgtaacaagtaaccctcttttgttcataatgcaatttagttaactcgcgacaactttattttacgattctattgatagcaatgccggatcttcggatgtacttttaaggaaaatgataaatacgttttactcgttcttcccccccaagacggacgttcgaccaaaaaataaaaaaataaataaagtagagacggacgagcagccagcaaactttcttttttcccattcctgcccttacttaccctttcgtgggcccccacacccgaggacttactccctgcaccgtcgacgccggcgactctcaatctcagccgtcgatggagctgactgggaattcccagcaccaggcggggcccgcgggagcctagctgtcgtctcccgattcgccccagtgatgtggcaccatcgcgcatccggcatttccctcgtacttaacagcgcagacgtcgtcgcctcaggagagaagctcgcatcaaatcctctccaaacttcgatccgatcgcgtcctccagattccgatcgttcgtcgctcgtcacggtgagcaatccgtccctccctcgccccggatcgagctcgatccctttcgattccggtcgctaggtcgttactgaggtcgaccggcgcttagggtttttgattccggcggcgatttttctttccgttggttcgctgaggttgatttcgttttgtttcaggtgctgggatgatggaggggaggcggattcgccagctggcccgggcgctgacggtgttgctgctcagcttccagatctgcgcttcggacgtggtgcgtactcttcgagcgggcgtgctcggcggattccgtcgtgtttcgttttgttggccgttgtgaattcaggacggcgcgcgcctgtcttttctgacgggagttgattttttttttttgtcttgtggtgattttgtagatctttcacgaatcgttcgacgagtctttcgagggacggtgggtcgtgtccgagaaggaagaataccaaggtacggattccgttttggtgctcgaccctttgcgccgttgcgcctgtcagtttatttggacgtgctttcttccttttcgaggatgaacgtagttatgctcccgtgatgctttctgaagttctgagaggatgcattactcatttgagctttcgctctttatagctagaactgtagctatttgttgcttaggtctgttggtacgaatacgtggcttctgagtacatagcgcacacagtaggattgcccaaaactttgctttacattgatatctttttgcgtgaatgttttaaataatgcgaatagtgtacatcaatttaaatgtaagatcttggaaaggtaatggaagattttgttaaggaaagcaagctttttttagcatagcacatcttgtgattttaattaatttgatgttttcaagccatcgttacaaataacaatcgacaatggtatcaagaagagtctaggatggcatgagccatggggaagtgtagtggtggtacataatcttggtcgatgatttattttctgctacattaaacttatcaagttttgagtgtactgatgttttcctcttgtggtctggaatttgactttgagattattatggtcaaataagctgatgcgtttgaagcacgtattatagccatggacactgacatggtcatctagacattacagaatacactgtgctcttgagaattttatgtatctgtagaagccttgtaggtatagctgttacataacttcaaacttagtgtctttacctaccttgtatttaggtgtgtggaagcactccaaaagtgagggacatgatgattatggccttcttgtcagtgagaaggcaaggaagtacgctattgtgaaggagcttgatgatgttgtgagtcttaaggacggaactgtagttctacagtatgaagtccggctccaggacgggcttgaatgtggcggtgcatacctgaagtacctccgtccacaggatgctggatggaaagtcaaggaatttgataatgagtctccatacactataatgtttgggccggataaatgtggtgctaccaacaaagtgcatttcattttcaagcacaaaaatcccaaaactggggagtatgttgaacaccatctcaagcaccctgcatctgtgccctatgacaaactctctcatgtctacactgctgtattgaagcctgataatgaactgaggatattgatagatggtgaggaaaagaagaaggcaaatttcctctcggctgaagactttgagccggcactcatcccacccaagacaattcccgacccagatgataagaagccagaggattgggatgagcaagcgaagatcccagattctgatgcagtgaagccagatgattgggatgaggatgccccgatggaaattgtagatgaagatgcagtgaagcctgaaggttggttggatgatgagcccgaagagattgatgaccctgaagctacaaagcctgaggattgggatgatgaggaagatggtgaatgggaagctcccaaaattgacaaccccaagtgcgagactgcacccggttgcggtgagtggaagaggccaacaaaaagcaaccctgcatacaaagggaagtggcatgctcctctaattgataacccgaactataagggcatctggaagcctcaagagatcccgaatcctgactactttgagcttgaaagacccaactttgagccgatagctgcaattggtattgagatttggaccatgcaagatggaatcttgtttgacaatgtcttgatcgcaagtgatgagaaggtggcagagtcatacagggaaacagcatggaaacccaagttcgaagttgaaaaggagaagcaaaaggaagaggataaagccactggttctgatggactctcagccatacatgtaggttctttattcccttcagcatttgaattttggttttgctgattagtagtgtagtatctgatttacatcttgaatgatgcttccagaaaaaggtattcgatgtcctttacaaggtggcagatgtttctttcctggagccacacaaacctaagatcttggtatgtaggcgagcttggacatggccattttatatagcttggttggtattttgcttactcaattccgttaggttcactgactgaatcttgtatctgcaggaactcatcgagaaagctgaggaaaaaccaaatat

SEQ ID NO: 10061 - DNA, 1536 bp, Eucalyptus grandis
  Intron number 1 from transcript Egrandis_v1_0.007238m (loc us Egrandis_v1_0.006734m.g) derived from phytozome v7.0 (c hr-ID scaffold_11; pos 16183055 to 16184590)
gacactgccgccgccgtcgctgttgatctgtgctggtgggtactgagtgccgtgtttccttctcctggtaaatttttacgagctccggttcgagcgtttccgtctttactttgctgggttggttagaatttactctttttctggcatctgagttattcgcccgcggtacggagccggtcgtgcccttttggctgttgggttctggtagatttttggtgtggatgaggggcgagaagagaattctgcggttcttgattcggcccgggggatgttcagaggacttgtcttgcttgattgtttgattgatgatttctattagtgtgggagaatcatgggttcacttcagcaagtgggggcaagtcgctagtttgaatttctatgttaagcgtccggtgaatgcatacgagggaaatgatggcgaatggatcggtatcttgttattctgcaatttgaattatgtgcgtgctgcatggctcttcagtgtctgaatcctaactgcaaggttgctgttaagcattacttttggttagagggaacgagtgatctaatttgtgtagcaataaagggtcgtataagaaaggctatgagtaacgcagcccttccacaagatagaggcataaagggaaccggtttggtttggctttttcctttaaaaaaactttataaaccttcaggggtgtggatctacctgtatgtgcaaaagagaccttgcctaagtcttttttgcaaggttaactggagtgtggatctatcagtatgtggaaactgactttgactaagatgtgtagctataggggaaaggttctctacatgaggtagttgaagatatgacgacctggtctctattttcatttcggatgatatccatactaaagtacacgatccatggctaaaagaccagattacatgcttagctgtggtgttggaacactgagatatctcagtgttctaggttagtggtttttcgtgacatgggatgagcaggtcaaatggcagatctctcgggaaatgttttatcatggtatcttggaaaacctgaatgcaaagcatattcatctttactatatgatgggttttgcaattccaccttgaatgccttcaagctggaggcctcttgcagcggttatcatcatcatgtgtaatgttcttgtcttgctgatgtatttataagatcaaaggttgacctgtcaattctgcaaatgactttataatttttcctgtgaatttgcgacttccaaccgtagtggtgcttctctccttgagactcagcatcctaatgcttgtggcccaatcctatattggctctacactgcttgaatcgatctgaatgcgctattacaaatttcttgaatgtataacttgtatcttgtgggtatctccatacatcttctcccatcactgccttgaaattttaactaaagctgtgaggacatcatgaatacatctgttgcatgaccattatgtggtccttgattctgatttcttttcgttcatatcatagtttcagtcttttgcttttctttaggtcctcctgca

SEQ ID NO: 10062 - DNA, 1330 bp, Eucalyptus grandis
  Intron number 2 from transcript Egrandis_v1_0.049125m (loc us Egrandis_v1_0.049125m.g) derived from phytozome v7.0 (c hr-ID scaffold_5; pos 24620581 to 24621910)
acatcataaccactagagaccgggggattctcaaagtgccacacctaatgattagacttgcaagactacacttgttgatgaggcgtatgaacttactggcatggattttgatcattctcttaaactctttagcaaacatgcctttagaagagattatcccttagagcaatacatctctcactctgaaagaacaataaatatttgtcacggtcttcctttagtttttgaggtaatgttctcttttatctggagaaagagtagagaagtgggatgccatattaaagaagctagaagaatctcctctagaggatgttgaaaagaggttaaccaaagaagaatatttcttggtgttgcttgttttttcattggatataataaaagaattgcgattcacatctcgaaagctaaaaatacaatcctcatctatcccttggaatcccttagagaagataattgattatggatgcatgatttgttaagagatattggaagaaattttatacaacaaggaagtgatgagaaaccagagaagcaacaatgggtagtagactcatgcacaagcattcgaagttttagagaaaatgtaggtaaatcgtacaacttcattccttctttgaagagaagtttggtttttgttcctatagcattgattgattattctatagcacttcctgacgtggtttatccatcattttgaatgttaggagaagatttaattgttttcccttgaaggacatcaacacggtaaatcatggtttattctaacttccattttatgtttttattttggtagagtggaggtggtgttcatggaattggaagctttgaagctatatgtcttgagctgactaaactatctagatactccttaatgaaagaattcttagaaagcctttcaaatataaggttccttcaaatggacttcaagttaggccctcaacccacatcaaggtatatgtttcttctaggtaagctctatatgataaatatttggaggtcaaatttttttaaagaccaaaattattttcaagacaaatttggcccatttatccttctagagtcaagatttctcctttcaaaattgagatggctttcatggaataacttccctagtgtttttaaagattctcatatttccatgaggaagccaattatccttgatttctcaaggagtgaaatccgagaaacatggcgtggatggaactacataaaggtgcgatttttcaaatagaataaatgcattttgtggcaggttatcttaatttggcctgaagagcaatatgttttctttttagttggctgagaatttgaaggtcctaaatctaactgg

SEQ ID NO: 10063 - DNA, 5955 bp, Eucalyptus grandis
  Intron number 5 from transcript Egrandis_v1_0.026796m (loc us Egrandis_v1_0.026796m.g) derived from phytozome v7.0 (c hr-ID scaffold_8; pos 37796271 to 37802225 reverse strand)
caaatagaaaatacaaggcaatcagactgcagaaggtgactggcctactcttatccaattcttgcttaactccgtcatgcacttgttgatcccatttagaaaggcttagcaggatctgtgtatcgtcccctagaagttaaaaaattggatggttcagtttaaagcttagagttcttatgctgatagttttcattgcattattttttcttcagttttggtttggtgataatctttctgttactgtatagattgcttttagtcacatgacacttttgaattgaaatttacttctacattgctagtccaccatattcagtgtaataaaagttttggaggaaaacaaatgaatctgacttattgattggttagtgcacttttgtctaatgggtgctttgtcactgaacaaaaactcattggattaatttgtcattccttcaactatagtgaaggttgcatgtggtagatcatacataagactgtgcacgataatagttattctgttgaacatttggcacttggcagtggcttttgggttgggtaggggagctaagcgtgggtgtttaccttctccaaagctcaaatgggactggatgagatatatggtctatctggccaaaaacataataaaaagaaagaaggcagagttagactgattgtgtcacgcctgcagcaatgatgtgttgctctaggtgtgtttgcatcagatcaagtgtgtgaatccctgtggattttgcttttgatggtaatattccatccatcatgaattcctactttagttttgttaaagtcagcagtcttcttggcatgcttgggcaacaatcatattttagaacgcttacttgtgagttaatagaaaactagagatcattcttcttgaagcctgctgaatagtgaatacttgggtgttctttgttataagcacattctccacttttctgttttctttttcttttgagaacacagaaaactcatttggtagagttttctaacaatattattttgaaagcacagaaaccagttttccaaatttaaagatgaaactggctcactttcgaagaccacaaattgtcgttttgagagttttcaccactagtgaagcacactattgagcgaaaggggcaaaaaatctttgcctttaaagaaatcgctcacttttcacaggacctcctctgcctttactgatcacagttcatcttcaaaactaaaagcacaaaaatcatctctgcttcttaaattcccactcttcaagtatttgcagactcatccacccaaactctgtgtgtgtttgtatctgatgcttcaataaggtaaggaaaacgtttgatgtagaatggagatcaagctagatgagaggataaagatatcagggctctttgcactggtagactctggggagagtcgtttgaagcacaaagcttcaaggaagttcttcatttcctgaaaaaattctgaatgtaccctttatcaagtaagcaacaatattaattttaaaagaaaattagatgatgatggccaaaaaaattaaaagacaatgagttaaggtcaattttataataacaccgaacatgttttcacaatttaattcaataaagatttttattttcattttgcaaacacaatttcagataaatggaagattgaaaatagaaaacctttcttgtgttcattttcaattgaaaactttttgcgaacataaaggcccttattgtgcttcaaaaggctgaataacacatgcttatatctgaaggtggctaaggatgggtgggtaatttccccaaagttctcttgctttctgtggaagagaaagaaagctgaggttttggttttaatgaggcagcttgatagacagttttttactttgcctacagaacgaaatgggtttctgatgtgtcctcctgattttacaagccgtaaccaagtatctcctggtgttcactaattcttctttactgtctttagactctttaccattttatactggttagaaactacacttggtaggtggaaatgggatgcttataccacagtttctttatattttcacctgattgctcgtttgctaagccaactttcctgtttcttgcgctagaacttatgctcaagcagtaagaatattccagattgcataaagtagcatcttagtctcagtcttttgctgcactgaggaagctttgaagataaaataatgtcttatactacagcacaaaagaaattgcgtgcttatgaggggattgtcttttttgtagtgctgaaattaccccttgatcatgttttgctatgctttctggtcagtgttgaccctgtaattcccctaaacttactattgctaaattcttggctttaccatcccatgatgacttattctcccttgatagtatgatcaaaccactttgactttgcataaaattaggtctaaactacatcaaggcaatctatagcaattagagttctcccaactactttaagtttgaataaaattaggtctctaccacatcaaagcaatctaaagcaattagacttctcccatttgtgaacattgataggttattttgtgtagattttgtactgcccctcccgtctttaaatgcgaaatatgcgaaattccacggttcatttgattaaagtagaaaacttgcttccttctatggggcatgttgtttcttctttaggtggtcatggcccctttatacagattatatctttttctctaaaaaccctcttgattaaatgtaaatatatttaaggctctttttccttggagagcagaagttgctccctttcggttttttctttgtgaagtataagatccatctcttttcaccatgatgtgctgaatgagtgaagcatgcctatctctagagaaactctctttcactctttcaggagaatttcattacaatgtcatcggatccactactctccctccagaacttgctccttatggtaatcaatctggaagaatggatggcattaagtactgcaaaccaatcaattgtgcatgtgttttccttcttttgctgatttgctcttgggggaattatatgtatgtaaatcatacatgtatgtatatgttgttctatatgtagagcatcattgtgcttatcaactggggaaatgttattgttctcttccataggattaaaatatattattatcttgaagaatataatatattctaaagtcttcttatatacccaatttgtcaaggaggaatttatattggtctgggaggatggcaaccaagatgggtggcactagggctgtcaacaatgtgattgactcaaaaagccaacccaatccggttgacatgacacatgagatgttaagtttgagtcagagtgatatctatttagcttaggagttaaaacaataaaatatttggtgggtttagtttctgggtaaaaattcaaaaggtccaaactgtttaggtaataaaaagaaaaatagaatcaaagtacatatcggtgtttgaaagtctaacatgtattaagccctcttcaattcagtaactaaaattaatttggatgaaaacattttggagaaagtcatatatcaaggctaggggtgtcaaaagtctgacttgaaacatgcaggggttgacagtcagatctttttcatgctcaacctgagttaaggattaatggctcaggatcatgtttttgtgaggccacttttgtctggaaaagagagaattaatatttctcccgaataattatttcatagtagtaaaattaggataaaaaatctggcattccaatgaatgaccacaacacaaaagtttgaacatcaaatcacataatattttttaagtgaagcaacaaattaccataataaactccatgataatatgatcacaaatcttgaaacctaatttaggagacaaaaaagtattgggaggcatagaaaaagccagatatctttgcctggggagattgagtccaagttcatcaacatttccaatatatctcgttttcactcaaaaatttgagccaataagttacatattacaccacatccccggtgcgccttcttcttacttgacgctctcacatgtgcacctcaagaaatcacccttcacatgtgagtttctagcattaggtttgttcccctttaatctataagtatcctttgataccaactttatctcaatgcaaatttccatttttgcttggccaagtttaacagatgttggtgtggaacatatgcatttcaaactctcctcaatgccttggcccatcaagttcaggcagaagccaaaggacactatctgccacctcgattagggagtcatgtccaagatttttttcttgagataatcaccagatgccgatacataatgagagtgagtgagccaccaatgaactatcggctctgttaccacttgttgagaggcacaacatcagtccaataccctcacttgaggagatcatttggggagagcctaagtttgggttcatcagtatatccagttgaacttatgttccttgaaaagcttagacctatgagttataggccaagtacagtatattaattgctccacccacattacactacacccctgatgtaggacttctttttgcctaacactttctggacacatagctgcacatgatacaaaccttgatttcatatctttgccaacacttccgctgttggtaaccagactaggtggtgttagcgatcatctacatgtaaacataaaaccgaatccattgtttggtgcctcgctcctttcaatctaacaacaatcttcaaaatccaagaagtctctttgatggtgctggtaatcattgccatgtcaacacaaaaccaagtcaatcatactgtgtctctctccctagcttaaaagagttaaccattgggcaacaatctacaaattctaacaagacagaaagccatgagagagaaaagtatgttcttatggttccactatcttgcacgataaaatcaaattatcactacaactaaatgataattgagagccaagagacaacaatgaggactagagattcacaatgcaaacatcagaagaaattcttaagcctatattcctgtaccacactatgtctcatcaaatgcttggactgtaaatccatttaaatatttatgtgtggatttgttttcagtttgatgttctcaaggaaaagaaaaagagaatgatatagctatttattattgtccttgtgcagggaaaatctgttataactcagagtagtacgtactcaagttccaatgtatgactatgaagcatctcgtggaaacactccatgctcattcttctaattgtgtgcccatgttgcgactaggactagtaaatgagagccataaaactggaaataagcaagatgcaccatgggcaaaataagtatataagaaagagctaaaacaatctttgacgtgtggcagtgagtcaattggtatcatcaactcaaacagctgcttctgctgttgacctaccatggtcgagtaggtttgattgctcattgaatcagcatgtagagccaacagctgagtaaacagttaatatcaagagtattgggaacatatttggtttttgtgaccttatttgattttctcctatgttcataattctttatatgaagtttgtgcaccttgagatattgttgcaatagtaccaggtcttgtttggacatgaatttcctctactgactatagaagcaggcaaagtggtaggatattaagaagttcattgatataaccatggctggatgaaaagttctctaatgacatgggaagagaatgaaggtatcaaatttaatatggaactcccttttccccctccactcaatattaaagaagttgcttggcatgagtaacttgaatcaaccatattagaataataaattagacttgtttcttggcacggttatgtttgttagtagggattttttgtaagaggaaaagcagattcttaccaaaatattgcatttgcag

SEQ ID NO: 10064 - DNA, 6320 bp, Eucalyptus grandis
  Intron number 1 from transcript Egrandis_v1_0.014333m (loc us Egrandis_v1_0.010249m.g) derived from phytozome v7.0 (c hr-ID scaffold_6; pos 47027884 to 47034203)
cacaacaagcgcaggatcatccacagcaggtatttgtttttcctttttgattttcttttttgggaattcagtctctctctctctctttttcttttctttttttgggaattcagtgtctctctcttttttcttctcttgtttggggcttgaggtatccgtgcattggcatgggctttgatgaatttttgctgaataaattgcatataatttgatgaagtttatatagaagattgtcctggattgaattcgaaaaatattcaaccccgatgcgtaggaaggtgcttcatgatatgagttattggtatgcctatgttgacagtaagctgtgagctcagtgttattatagaattcgaggtgttccactgtgtgtatcagcaattgcgattaagttttctttgataaaagttggatgattggaatttgtcgatcttgaggatgttttagattcaggactccaatttgataggctctcattctgaaaaggtgccttgatatgaagctttgattaggaaacgccctattttccttcctagatatgtagttaattttgatttgctctatggagatcaaatataatgtgttcctttgagtggcatcgcgtgtggaagaatttttgttcattagacattactgcaactgtaaatgctagttcttatttttagtattgatatgatctttgttttcagcatagctctattccaaatgcttttttttgtgttttggggatgggtggaataacccggagatatgtatagtttggtgtttgaaaattgctgttgaaggtgtggagacatttaaaaaggaaaattgtgatcttataattgttgacacaagtgtgcgtcacaagcaggatgctgctctttttgaagaaatgcgtcaagtttctgaagcaacggttgcatatgatccttttgcacatatacaattggatctctgcttctttaaaactttaatatgttgcatgatatgctgcagaaaccagatctcattgtattcgttatggacagtagcattggtcaatctgcatttgatcaagcaaaggcattcaagcaaagtgttcctgttggggctgttattgtgactaagatggatggtcatgcaaagggaggtggtgctcttagtgcgtaagtgttattttagttaagtcagagacataccatttcattacccataatttccctcttcacagtcgccatcatttaagtggtttgctagtatttcagtggggtaatagagtggattattgtgcaaaaggtttgcaaacggttgcaatatgagtccctagagtagattgctgctagcgtgcagttgcatatatatgttgtgtgtctctgtgtgtgtttatttaaatggcagcagttatgatcgtattcttaagtgtagctgagcaatgaatatcacaggttatattttttcgttggattctaatcgttagatcttcatactttatgggttatgttaatatatgtcagtttaggtgaaagatcacataatgaaacctttacactttagtaattgaaagtgattattatttttatgggactgatggtgaaatactctacagaaaaaaaaagaaagaagaaaaattaggtaggaatccagcatggttaagttttaccggttgaagattacttaggcttatgatactttcataacatttggtgtgagtttatttgttttcatgtgcagcgttgccgcaacgaaaagtcctgtgatctttataggtactggagaacatatggatgagtttgaagtgtttgatgttaagcctttcgttagccggctattgggtaggtaatttcatttgggttctgcttttcaatgtgtcttaatgatatgtatgagggtgagttgcattatttagtggtttaatattttggtgaaaactattttccacataggtatggacgattggtctgggttaatggacaaaattcacaaagtggtgcctaaagatcaacagcctgagtatctacaaaagctttctgaagggaattctacatcgagaatcatgtatgaacagtttcagaacgttcttaaaatgggtccaattggccaggtttctatttcttccatcattggatatgatgctctaccttatcattgcatgcttttattttgagattcattcaaagagaatactcaagcatgattgagaatggacaagcatgtgccatggtttggtctcttgaatcaaggtattttccatgctactggggttcaattcagaattgatgctaaagggtcaagagaaagcaagtcatactgtaatatataaattaggtgtttattattttggcttgggactgcagtgaaggttttaaatttaaatccttgcctctgagcctgattaaacaaagttcaatttgttccagagctagacagttcaaatccaaagatcatgaatgagtctagaatcatgcagatagcaagggattcgggttgcctcgacagagaagtcatggaaatgttggaagaatataagaggctagccaagagtctgagcaaaatgaggggacttaagatcacgacaaggggtgatatgaatttgtggtctcgaaacatgaatgcgtaacgcatgagcagagttctcccacctcagatggtaaggcagattggtggtatgggtggtttacagagcttgatgaggcaaatgggttccgccaaggaaatgacgggtatgtttggaggtggccatttataatggctgatttgccatgtgcatcattcatttgtaactccaagcgaaattaagtggccacagtttggcttcggttagaattagacgagcgtcgtttcctcgagtgacaagccatacagctatgcttggacatgggagagtgagttctggtggaaaggctgatgatttgattcgcattctttatgtaactagtcaaaattctgcctggaataattagttacaggatttttgttttttgagttaggattaaggaatagcaggtgattttttattttttatttttaagtcggctgaaatgctaactgaagttttgtggcgtgttaccttcctttttcggttgaagttcttggttccatctgacgaatcttaccatggagtgtctggattggatgtgtaatgaagctgatcaactggtttctctcttttatggcttatcggcaccctttcccacgatcttgctacttgagcaggtttgctccgaaggtgcagtagaaccgtcacctgacattgctttgttgctagaaaggcggtaaataactagtccaatgatccgtctgttttgcagaaaatattctgatttcagttcgcttaggaaaacaagtcaatgaaaaatgttttcctatcaaaacttacataagaatcagaaaatattgatgtttagttacgaaaaccccaacaatggttcttaggtctgttcaagatcaagactttggcagccgagcctaggttcgtcaatgccggggtcgagaccttggtgcttagggtagggccttggcacccacgcgcaggtccattgaggttaggcttgaaccttgacgctcataccgaatgatttgacaccctagccttggtccataaaggttgcgctcgggttcctaaaacattaactcttggtcccgaccttgaagctcgagacaaaaatggccatgcgtgggtcattggttctcaggctcgggttttttataattatttttatttttttaaatattgggatttttaaatattttatattatttgcatttctttctttttctttctatttttttctcaactcgtcacaagcaagtttgagccttgcccaaagttggtgactgactatgatcgacggcaatgatgactcacaattggcaaccaattggcggtagtggcgatcgttgatggcaatgactagcaatcagatattgacgactaatcgttgattggcgatgatcggtagtagttgatgatgacaattggtagctgtcgacagtgacgattagttgaggaaaaaggaggaagaacaaagaaaaaagaaaaaaaaattaaagtaaaaaaatgaaaaattggaatttattggtaattttttttctaaaaaataccaaacgacataaagtattttccattttattttttggtttacagaaaaatacttgaaagtattctcattttccttggaagatgacttttcagaaaatattttttgagtatatttttggtgaaataaacgggtcctttgagtgtttatgatacatcaaaactgaagaagactgagacattcctagaggcaaaaagcacgcgaatgggggagttttctgcataactagcgtaactcgctattctgcaaacattgagagaggagccatcgaagcaatcccaattttatcaccacggagcagaacctctacttaaataaagaagacgaatggaatcgaattcatcttgatgtgccaagacaagggcggatccaatactaaccctggaagtgcagcaagtgccgtacgagaaaaatgcagtcttgtctgttgtgtagatgcataaaataatagtcccaaaaatgttctttttcggtttgtttttatccataactacgaagttatccatttttccagggtatcaatttaaggagaaaaaaaaaatgctaaaattgaaattcgagactaattgggtatgtgtccaattaggtgtaggtcgagcggttccttttaaaaataataggaaaaaaccatcaaaaattctaaattgtgcaaattataacacatttatctaattttttttttcaattttttagacaccgaaaacctcatatctgtatcaaattcatttactcaaaattacttaatctttataggacacatttacttcaaatttgaggtaaataaaaatcgcataaattaaatctgagatttttgatgttataaaaaaaaattttgagataaatataacacgctaatacaaatttagcgtcatatgagcataaaattcgagatttttattgtattacgaaaaaatttgtggcaaacgtgtcataatttagaatttttgatgtcttttctctaaataataaaacgttatctttttacccctcctcgtcctcttcctcttcttctagccctaagagagagagaatctccgatagatcagaacctctcaatcgccacttctctctggaattcctccagccctagagtcccccgatcgttcatcgcgatcggcgttcgcgtccgtctccctttcatccccctcgtgttcccgaagcagagcgagcgaagatggtgttggcacagttaggcgggaccatcacccgcgcgatacagcagatgagcaatgcgacgatcatcgacgagaaggtcctgaacgagtgcctcaacgagatcaaccgcgccctcctcaacgccgacgtccagttccagctcgtccgcaacatgcagaacaacatcaagcgcatcgtcaacatcgaggatctcgccgccggccacaacaagcgcaggatcatccagcaggtctgtgcgtgcgtgcgtgtttttgtttttgggaattcagtttttttttttttttttttttttttggggcctgaggtatcgatgagttacctgtgaattggcgtgggctttgatgaattttcgctgaattattgcatagaatttggtgaagtttatgtagagccttgtcttggattgaattcggaaaatattcaattacgatgcgcaggaaggtgcttcatgatgtggttattggtatgcctgtgttgacggtaggctgggagctcagtgttgttagagaattcgacatgttccgctgtgtgaatcagcaatcgcgattaagttttctttgatagaagttcgaatatataatttctttttccctttatgtgattggaatttgtcaattttgaggatgttttagattctggactccaatttgatgggctctcattttgaaaaagtgccttgatatgaagcgttgattaggaaacgccctgttttcctttctagatgtgcagttgattttgatttgctatatggagatcagatataatgtgttacttcgggtggcatctcgtgtggaagaactttagttcattaagacattactgcaactgtaaatgctagttcttatttttagtgttgatatgatcttctctttcagcatagctctatcccaaatacttgtttgtgttttggggatggatggaatttcctggagatgtgtatatcatgttattcgatctgtttggtcaaattttaaggacatatctgtcactggcactgcatgtcagaattttgtctcacatgcggctgaatgtgatcaagaagtactcatgtggttcacttgtggcggcttttgtttcaggccatattta

SEQ ID NO: 10065 - DNA, 1692 bp, Eucalyptus grandis
  Intron number 1 from transcript Egrandis_v1_0.000514m (loc us Egrandis_v1_0.000514m.g) derived from phytozome v7.0 (c hr-ID scaffold_8; pos 25749007 to 25750698 reverse strand)
ctgaggtatgtaatttctgcacaaagttattcattcgcgaattatgtgtttggtctgtgtttcctagctattgtactacacttcttagttgtgctatttgcttagctgggtgctcttgatctctagcatgtcttgtcaacaatcaatgtgattattgcaaaaggaggcattttgagagtttcttcctatgctgttattgattccagggacattattccgcgcttcatgtagtttagacttcaaacatttccttggttttttgaagaaatttgctgggaattccattcttgtcctaatgcgagggataataatatatttcattcatgttggtatcttaataggctgtctttacccaataaatctgtaaaaaaaatcatcagaacatatttttggaatgagactgtctagcaaggcgttttcccttcttttttttttttctttttttgtttcttttttttagggggggggggggggggggttgtgtgtgtgaatttagtagattctgtttaatctacgagtgctaggctgatgagagccgaggagtctagtcttttagaaggtttgctagctaaaggttcatccaatttttgagcaatttatcttttaagtttaaacttcctaaaacacttctccacggaggataaatgaacctgtcctggaatcatatgccttagacatatggagtgttactgattttctgaacaaaatgtattcagtgatacagaatactccttcatccttaactcaggagttgtttagaattaatgaactgtttgaaggtttgaatagcatgcatctttttgtaaagcagtaatcccatgaactattgaatatctaaagtcatctttcgtgttcctactatttggaagcttatgggaaatcagttctagtgaaacgcattgttctttacagttttccattgacttctacttgtcctccacctcaccattgtcccatttccacatcggtgaaatgggagatatattgcatgctctcaaatacaaagcggacctgctgtgttatctgactcatgttcttaaaaagtttcttgagatctctcctgtaaatgattgttgctactaatgatttttgttgtttaatgaacttagatgaacggctgaaatgcatgcaactgttttcctgcttgtgtccacctttatgttcctgattttttacctattaactggtgatctaatggaaccaaaaataaggtcaaaacatgtcaaatcttttcgttataattttttctccagtttctccacgcacaggaatcggatggtagttactgctgctcatcagatatacctggataaattctgtttcgtgatttagtatttttgataacctaggagatctacattgtctgttgttcctgctattcatattctgatttgattgttgcagttcataagcaaaaaaacgaaatgcaattttgtgctcgttcctgtaagtcaatctctgggataaggggtcctttaggtctcttctgccaattagaacttgtttatgactttctccatgataactaatagaatatacttcctccctagtaataatttgtcactgctttttctgcaaatgtagcacatcattgtttttttcataatttcatatcaaatactaaattgttgcatctgatttttttttttttttttttttttttttttaaggcactgcagactgcagatttag

SEQ ID NO: 10066 - DNA, 2757 bp, Eucalyptus grandis
  Intron number 4 from transcript Egrandis_v1_0.029268m (loc us Egrandis_v1_0.029268m.g) derived from phytozome v7.0 (c hr-ID scaffold_8; pos 40630660 to 40633416)
aagtgagtgttgcactgtcttttccctgttttctgtacccgtccgttgtcgatgcttgttcggatttagtgcttcgtgtttgcttagtaatctttaccgtggaattgaaatgtttggagtgatggtagcaatttaaggcacaggggatggttttcttgtttccattaagtttgtaacgcttgaaggcacaagtgatatcaatgccgaaatgccactgtgtgtgtggggggtttgtgaagggcttaatctttttcactcaactgtcttgttctttcaatgggacatttgagtactcctgtagtcccttgatacagattaacataaggatcatgggctgattgggtagtgacgattatgcctaatgattaccggttgtgcagggcttaattattgagctgtttgttgtggctgcagcttttggtagagatatttaataaagataaagaattcatgggtgatgtaatgactagaaacagcaaactgtctcttcagttcattggtttatctgtgtcatcagggttggcacgttgggatctctgaagacttcacgttttttcccccaacgacttagtttgatattcattttcttatttctggtgttcaaacctacaaataattgggtgagaataactcaaactaatgaagtgatcttggaagaattaccatttatgaaatttgaccataactttgctaaggaatagcctactactttggtttaggttatcagtttctcaattttgcttatgaagaataggttgtgccagtaactactattaattgtatgctttggctgatcatagtctatctatttaaggccttgttaaaatgtttgtgttgttgtattgtgaattcactgaattatgctacttgtgattgctctacttatttgttgacaccccattttttgaaggaacaaaccttgttaaactatgcaaggcagtcaagttagagtgtatagggattcctattcccaaagaaaagcccttttagaggctatgctcagactaagctggactttctttattgctacaatgtgatttgtattaggcattctagttgcctcttcccaaggatcggtaccaatgctttgtttgggaaggaggggaggggaaggaaaattggggtaaagtttgaaactttggcgcagagaggacagaaatttaaattttctttccattttcatcccatccttgccttctaaatgaagtataagaatgatagactggagaggataaagcagggcaggtaaggttgtcaatttggaatagatggtaagatatgctcaatgatagttgctcctgtcctggggttatatgtgttaatgcttggggtggttgtggatctagagtagcagaagcaactcctggtttagatcgtctcaaaactatgtgtagctttccctgaattctagacaaggcatttcatcaattttatcgacaaagtccttattggttgtttctttgttggttgtattgagttccaaaatctagtcatgcaatctagtcctaaaagatctcctttctagatcaaatccctgagacttctgagtaggttgatctaatggtatttctgttctgagtgattggaaggagagaggaattaaattgacaacttttggggttagcttgatctcaaggccggtttcaagcaggagtagaataattttgtttctgcaggattctggtttagattccattttcaccaaggtgccatactcaattggcttgccatagtcttcacaattcagccagaaaaaaagtagtaccatgttcattcgtctcgtgtgttcttctcactcactgaattttggcatataatgatcatacaagacaattgcatactgttttccccagtctccctgcagtaatgtatttaaaactccttcctgtccataacagtgtcatttgaccagataaattgcgtttgatagcacgatacttttctttctggttggagaacacgttccttcttttcatcagcactcgaaacctatcttattctatggatactgcaaatatgacttattggcttgtcaatgcttaagactggcttagagcattatctaactctccttgaagaattatatgcaaatgctctggggatgtttctttatcactatcggtacttgagttagtctaaactgacaagatggtatacaacaaaaattgttgaggtcatcgtcaaagtacttgaatgttcttacggctgtgaacatcgtcatttaggactggtcattaagtagatgggatttgatggcatatgtcgtttgccttatgtatgtacgcttaacatgtattttactttgaccttcaggctcatcatgcaactatggtctcatgaccagcaaattgagcattgtcttctaattttaccatggttaactgagattaaaggtagatatatttattgaccagttggttttgttgtttggctggccaataagtccgattcgaggagagcagagtttccccatgtattattcattcctcatttgatcgttaccatcttgcttggattaccgttattgttaaggcctttgatggagttaaacatgcattccttctctagtgagtagtaagagaattcagtgtgcaaatgctatcgctgttgtagttcgtgtgtgctacgtttagttcgttaatgccttcttcttttcccacgtacagcatatctgcaaaaccagaacctacctcattaatttgatcctctcgttgcttgccagatacttgtacaaaggcttgtctacaggggatcgcc

SEQ ID NO: 10067 - DNA, 1968 bp, Eucalyptus grandis
  Intron number 21 from transcript Egrandis_v1_0.000039m (lo cus Egrandis_v1_0.000039m.g) derived from phytozome v7.0 ( chr-ID scaffold_8; pos 18382303 to 18384270)
aaaatcttccttcctgcgacaggtagtagatttctatattgccttctctctattttctcatcaccttgattctcatatatgctcataacattatgctgtatatgatcaatgtcggttgtcatttttttgtcaagcttgcttgccggaaacaattcattaagagtattttatttttctgaataaaactgtgaataagtttgaaatgaaactccttaatacaataatgctactattgcataactagggtccagatgtaaattgttgtcccttgcattgtaaatgtcagctttaagagcaatggtctaaagtttagaagaattttgttttctgaatagccaataaagtaattgcttgaagagtgcactgttctcgagaataatgtgtgaggacaaatcgagttttacttttgaagaatacttatgtattgtaggtttcacatatttacaatccgtcttagttgaggtttatttttgtttgagacatggaaatacgggtccaagtttaatcttttatcggcttttcaaattgcaatgtggtatttggtggagtgccagttccatatgtatatacttttttcttttctctatctactgtccctgaagaaagcaaaaagatggatgagttgtttccttaagccaaagcaaaaggccttgtctaaattttccaaaatcaatatattaagggtggggctatttccacaccatttttgggtaaaatacaccctttctagttaactgaccaaattaccttttaaacagcaatacttttcgtacttactttttctagtgcaaattcataatgattgattatcactttactattttagtttacttaaaaggttttccttttgtattctttgaacctagaacaaaaggaaattttattttttcaccgaaaggagaaaccatccatcgaaagaacaatatatggagagaaaccaaattcgacatttaaatattttgttgttgtgtaatcttgaaaacatagtgctgcctgtgagattaaaaaatgctcaagatttggtgcatatgagtcgatttgaagatgaaaaagacgtcatttttcagatctagcaagttttttgttcttccttttttcatgtttccagtttgactttggatgaagtcatgtgtacaagaagtaaagctaatgacccgaatctgaatacaatagagaaggtggagatctgcggtatggattatgtgattacatcagaagataattattatatgtgagacagatataataaatatttgatttatttagagggtaacctggtcagtcaattttaaaataatgtgttcgagctgttgcacccgaattataatttaacttttaaacgttatgaagaactttagggtgactttacattttgacattcatatatttttaaatatttgaggcgtttaacatcaagactccatttacttcacggaaaataaatgatttagaaaacatttctctaaaaacaattgcttgtggtttataataattagtcaatggaaaatgtttttattatcaaaaacaattaatttttaaacattttcataggcgatgaaaatatttatagattttcaatcatttttgtagatgatacaagccatcagctttagaaaaatatttttcaaatcattcattttccaagaagcaaacagagcctaaataaaatcaaactgtaaatgcttaagaaaaagacaagctaaaagcaaaagttgcaccaaatttcaacttttgtagcggttctcttggtaatgaaactctaatattgtaataactggcaacattatgcttgtgttaccttcactcaagattactttcagttctcatttatccaaatctggaattactacttttctggataatctaacttcactatagaaaagtttcataaaagattttggataaagcatctaccggtatagtttacaacacatattaagcagcagatatttgtcttgtgataggttg

SEQ ID NO: 10068 - DNA, 7833 bp, Eucalyptus grandis
  Intron number 1 from transcript Egrandis_v1_0.019318m (loc us Egrandis_v1_0.019321m.g) derived from phytozome v7.0 (c hr-ID scaffold_2; pos 24025018 to 24032850 reverse strand)
ctccgctctgctcctcaaattcgtcaccgccggtcgtccctctttcatcctccgccgccgccgtcacccgtttctccctcctcttcagctcctgagctcctcctctaattccatctttctttcatttctttctctgtccttcacgttgatgtcgaagaagcacgtgaagctcgacgagattgaagataaggtgagcaacccatgagcaacccacgatccttcgtcatcttgtcgctgctcttttccccttcttgggttgggttggctcggcttaatccgttgaggttggtcttttgttcgtgcgcgcaggttgtctggatcaccggtgccagccgtggaattggtatggtttccatctctcgttgcatccatgtctaccctgttgctccgtttagctcttcaccttatcgggtattcttctcctcgtgctggattctcgaaggggagattcttgcgaagcagcttgcgaatcttggggcgaagctcatactctccgctcggaacgaggcggaattagagcgcgtcaaggctcagctcaccggtaatgtcattttcggttttatactgcggctgagttgccgatgattggcgtgcctgtgactcaacactacttgcgtgtggcattgttggcaggtaaacatgcgcctgatggagttcaaatcttgccactcgatttggcgtctggggaagattctctccggcaggccgtggagaaggctgaatctttcttcggtggctctggcgtcgacattatgatccacaatgcggcttttgagcgccctgtaagttgagagccctttttgaatagaatactaatggaaaatgcacattgcactcgcgcgatgaggatgctggaattagcagaattaagaagtcggtcctttgcatttggtggatgtttttgcaaaccagcatggtaaaaatatgcttttaaaagattgagtgtgatgcctggaggtactttcaattaatatatctggaaaacaaaagtttggaagatgtggtcaaatgacagaatataatcactgcgatgatcgagcaggtcctttctcacaacacatggcaatttgaattaatatcataagacaaaagaagctcattgaaaagaacccaacggggaaggtaaggaaaagtttaccgacaaaactagctattgctttatgctgtttgaatatacaaaaaatggttaataccagtcttcctccaattattggatagaagagtggcgataaactttcttttctcagtgccgtgtgggggaaacttcctacatctctagttcgatgcactgggtttttcttttggttgtctccattttgaactagaatgggatacacagagctgctagcctggtctgcacccatcctatcatctggtttgatagtcttatatctctgaaaccatttgtgtcacgagaaagggtgaatgtgtactgtaagtaggcaggccttcataatcaatctctttaattgtggcagaaaacaacggctttggatgtgacggaagaaagccttaaggtatgtaagaatcttgcagcagctctgacacggacggtttggccaaatttccaagacaatcacagatttcaatctgatagacagctcttttttctctcgtcttatgcactgatggtccttttgttatgattagattagcaagttgactatcttaacttaccaactatattcctcttttatgcaactaggcaacgtttgaagttaatgtctttgggactatatctttgactcggcttttggcacctttcatgctcagacgtggtaggggtcattttgttgtggtacgtgctaataattatttggttatttgccatccttagtgagaaatatgtttggagatttgaaacttttatgtcgagattcgggtaattcttgatttggagtctcaagaaattttctggagcttacatcagatatgagaaagaggcactttttttttgttgccatattcttgttggcccttggatttacagattagaagtagatgtggagctttaatatgctagttttaacgtgttttcactgctataatgcctctagttgaatactgaatccatttttcttcccttggtcaataaccagttcgttagtcatgttttggtcaaaaagcttctgtttttgcatcatcgcagatgagcagtgcagctgggaaaacacctgcacctggtcaagctgtgtattctgcatccaagtttgctctaaatggctacttccataccttccgttctgaggtatacaggctgttctgttctcaagggtatatttgtgagggtcagtttggtagtttctttactttctcactaaaaaggtcggaggaagagctatcagtgagatagccagcgagcaggaattatgcgactagcctgcgagaaggaataatgtgtcactttgatcaactaaagaatggctgtggcagcagctttggaatacgggaattaattatgtgaaatgattgattatgagaattgcatgcttgaattctcaggctgtaaatagaaataactttgcaagagtaacctagataagtttgtcaatgctaagttgatcagtaagtgaattaccagggaaggcatccaccatgtaaacttggaacaaagagattatctattgtggtacctttcaagcatccttctggagaaagggtgcctcacagttgcaaatctctatcaaccacttccctggctatgatcatcaatccttttgaaattgaaactgagagttaacttaatatttgctattagtcaacttgactacttcacaattgtctgtattaccacttccttcaatgttaaaataccttaacatctggtgttgtcccattgtaaggatatctataagcttcttttttactggataattggatttggatcctttgaacttgccattggtactcggtacacaagaaaggatccatacaagaaaacttgtggcagaagagaatgtgcctgcttttatggttgcatctgagaaggtttggtgaagacaaatatctagttatagaaagcttctgatgatgaagtagattgcaactgttgtagttagagaagtctttgatgtctttaagatgaagaagtgtcctagtcttatgcatgtctaataagtcctaaaaggtccctgcttgcaactatgtgaggcacacaacagggctctgatattgtctcttttaaaaagatgagagcagtgctttgatgtttaatacctctctaagtttaggattctcatgcattaattttctctttaagcatatcttctggacaagttgcttgtctcttccttcagttgtaattctttcaaaagaagcctatttctttccctgcttgcagctcttccagaaaggaatcaaggtgactgttgtttgtcctggaccaatagagacatcaaatggatctggagagacagcatcaacgaagagaagctcctcggaggtgatttggcactgttcttagatttttcccacggaataaaaatgctagctattgatacatctctcaaatttcttggccaatgaagatgccaaatgtttagttgctttcattagtcaactgcaactatttctaatagcaaattacttatgatttagaccttacttgtctcccgattccagtgtgtgatgaacttataagtcatcaactagaggctgatttacatgcaacatgtgttactcttattgccaagttatcaaagcagtgccgctgctttgcttgtgtgcagttgagagttctgtatcatccgtggaaaaaagacacttccatgcagaggtcatatttttgcaaaaaagtagaaaaagctagatcaaagaactcaattagcattcattgcaaaatccacccaaacatgatgattatattgctggcagaactgagacttttcttgtgatactgtgagcagcactttagagatgttgatggccagagaacagggaaaagaaattaatgacttcaaaaaccataacctcaacttagtaaattttccttaattgattaattccagttcccttgttattttctatattgctatggataaacctccttgtgagtagcaaaactagtggctctgcactcttcgaacaggctaaaaaagaaactgccagtcagcgatgctataagtttcatcattcagtcaacacctaataattgttaatatcatcctgctatgacatattctctctttctttcgtcatgtttgtggcttctgtggaataatttgttttctgtcttacctctacgtcttcttacttacagaagcgtgtgtcatctgaaagatgtgctgaattgacaataactgcggcctctcatggcttaaaggaagcttggatctcgtaccaggtcggtgttgcctttttttctttttagaacttagaatattttctcagcttcatcatttccttatttggactagcctccactttttgtaatatatcttttctgttttgtaagttctcttgactttcaacgtcatgctctaacctgtttcaggagttgaaaaatttcctgtcagaatgcacatcaaattaatggcatctatgatctgttttagaactggaaaacgtcccaatgatgttacttaaaaaaatttatgctttgaaggagtaagtcctatcaaatgtcagcatcaagctgtgctgtgcttctctctttttttcttgtgaggacgacacatttttcaacttgacgtttgataaatccaagttatcaacaaatttctgtatattatcataaaaaaaatagttgctcctgagtgacaacactttgaaaagttgtaaggcgatgcatattcaatttgacagtttcattaggcaggtgctcttcaatagtaggagtgcttctaaaagagcagtttctgtgatctaacagacaatttaagatgaaaagtatattttccatagcagacaacttctccttgtggccaacatgtgtaataataaccaagtcagatcactggagggagtgcttttgaagaacactctcaatgaaatggatcagaaatgttagtttgatgtgctcttaaaacaggaaggaactaagaattcttgatgtgatgtactctcaaaacaggaacttagtgttgatcagcaggtagcttatagtttaacaaactttggttaaattctattaatgctcttttgaagggtacatatgtgcgtgcggatagttccatgctgaatatgtcatccaatataagtatgtgatgcatggtctctctgttctcattctctacttaactgcatgcacatctaatggggtaagtggcttttttgcagcctgtacttgctgtgatgtatttggtgcagtacatgccaacgatgggctattttctcatggacaaggtacttcctatgcatgcctgatacaggaattgtcacattcagttctaggaatgaaggtttggtatttgcttggtgctttgaaatgctatgttctcccagatacccttttactagctaaaaggacaattctggtctgtccttgtgtttttggttactccaatttattgtgtcttgaattcatttggggttttctggtgacattgatttctagattggcgggaatcgagttgaagcagctgctcgaaaaggcaacacctattctttgggcttgatttttgggaaaggaaaggcagcatgaaaccatcaactggcacagttactttgtcacggtaccatgcacatttcgagtaatttcatgttcacatattacagctggaagagcttctgtattctcccccctagggggcaagagatgcacgctggatgcctgtatgagctgactatgaaagcaggcacctgaaaaagaataatcattctgaccaatctgtaataagtcaatttcaatgcaaactcagttaacatgattttccttgtgtccacctcgatagcctcagagccgaccgtttcaaggatttatgtcacacatcacatggcaaatttcgacaattgttcgaacatggttccgtgttatctttttcccctttctttcggggcttagatggtctggttcttcgacaggtaaggtgactaagtaaaactgttgtcgatgaatgttctcttcaccaccacatacctgaactttgagagagagctctcaaagccgtcaagctcaaggaaagttggtgctctaaatacatggtaagagccaaaatttgattgaacaatgcttgcaaatgctagtgaggcgtttaatgtgaactcgagcttgtgccctgcttgtgcctttctggctgggttagatcatatttggtcctcattggggttgaattatcaaaataagaaagttcaaggatcctataaaggtatagacggatgtaaaatatatacattcttagtggagaaggtaccatgacaaatccctctaaaaaaatatggaccacatatcaagaacacactatggaccaacttcattcgctacgttacattttcaacgaatataatggtacacaccctatcggccaactcgagcggcatagtgtagacagcctactgaccagcttcaatagcagaccgtgacatactgtacttgtatttgaggtatgttttaatgaacagatctaactcaccgtccattacagatgagatatccgatgtctcgtatcccgtcctcacatccttgaagagtttgtagggatggaatacatagttacgaatttgctggcctcacttggccttgacagcatctccccgtatctgcttgatttcggatgctctctgttcttctgctatgacaagtagcttcgctttcaatcgactgagtgctttgatcttgtttgctagctgggatctctcctccgcgtttgcagtcaatgaaatctcagtttgctattcatagatcttgagaacaaaatttcacgcatagatcaagctgagagagataataaaatttgaaggctgaagagttcgcctgaccactcttgagaaccatcgagagagaattcaaacaattattttccaagagctcccttgcaccttaggtaacagttaaagaactatccaagacgaagttaaatggaacataatcttagatttcgaagttctagagagaatcaattcatagtccttgaaagaaaaaagaaataaaattattaataaattaaaataaattttaagttataaaaaaatttaggatcgcaccaaatgtatttttgttccgaaaatataaattgtaaaattaccaaatgccttaaaaagctcaaaaattgttcaaataatagaaatagaaagaaatgttttttaacgaaccttgtttgtgggaacaaaaacgttaccaaacactcattttcacttcattgtacacgaacactcttaggaaaaaaaaagtaacaagtttcagtagaccgaagttgataaaattttcagttccaccttaaaattggagcagatggaaaactaattatccctaatttcacgctcttatttgaaaaaattggaatctccgccggagtgaccccactctatacgttaatttcgaaatcttccccctattcaacatagacgctatcgatgctgctacgaactctgcacaaactaaacgacaagggtggtcggtcgaggttctattctaaccgcgagtgcgcgagagagagagttgcagcgcaagaccgaagacgagaagacgaccgacgacgatgctgctactcccgctcctgttgctcctcctcagcatctccgctctgctcctcaaattcgtcaccgccgatggtcgtccctctttcatccgccgccgccgtcccccctttctccctcctgctcggctcctgagctcctcctctaatctcatctttctttcctttctttctatgtccttggccaggagacttcacgttg

SEQ ID NO: 10069 - DNA, 2441 bp, Eucalyptus grandis
  Intron number 6 from transcript Egrandis_v1_0.003461m (loc us Egrandis_v1_0.003461m.g) derived from phytozome v7.0 (c hr-ID scaffold_7; pos 35193879 to 35196319)
ggccaagcctatagaaaggtaatgactgtttattcccttctattggtctttttgagggctggaatcataaattatgttagatttctgtaattgtctttaggtctactaatagattgaatgaggagtgtttacttttggcatcttgaatagtgcattgattatgaagaggggattctccagctatattttctctgcagtgtttggttgaacatgtatgtctctttttggttctccatgttaatgttggggtaagtctttggcttattgaaacttttaccattagtaagtgctagccagttcctaatgaggtacatcagttgttgaaatcacaatttaacgtgatgacatagatggtgtttggtgtggtattggcttttggcaatggccttttcacttaagtagtagtttagtttagtatttgaaagacttgatatttatgtcataactgattaggccttatattggataataataataccgaattgattataaaggtacaaggatggggtctgtttgtagttagggttaattttatcctttacttcatttaaattttgcagcactcattgtttgacttttatttattgggtaagacccgaaacttctcaaaatacacaacgatcaatatacagaatcatatataattctgtcacagttttaaaaactgaaaacatttctttccctttttaattcttggagggaaggtaaaaagtaggaaaaatcgcctctttaagtgtagacatgcatagcctaagtaatttagttcttttacttagtctttttggatcttaaataacatacttcttgttttctcctttttgtttttttgtgcttttcagccaacttttttaactttgtggacatactataatatttagccaaatgatgaaaagaaatgtcaaagagcagtgtggatgagcttcctggcttttacaatgggaagcactagttaattctcttgccaaatagaactttaaatagaaaaagaattggggaggtggagcccccccccccccccaaaaaaaaaaagaaaaaaaacaacaacaaccccccaaacccaaaaccagaaaaaagcacccttgatccagcagtgcggaaggtgcatttgtggtactgttgtaacttactaaggcatacaacaagaaaaacctcctcccactagttaagttagctacctcaattctctcaatgcagcacacttattatcatctccttgagatttgtaaacttctagatcttttagcttatctttgggagagagggaggagaggaagatgaagaaggagaggggagaaggtgcccaattttgaactttcttcccaaacaaagacactagggaataaccccacttctttttatttcttttgatacccatttggatcgactgccatccctaaaccatattttctcagctaagatcttgcaattttctcatcagatgtacaagcccatggtgggcttctctcatctttttactaaattgaggcgtcctttgatgtcatccaggttgctcatttaggtgatggaaggtttactgttgggaaaaaaaattgcgcttgattgtcacaagtaacagcatccgatgtaatagtattatccataagggcttaaacagcaatttagttgcttcaatataattgatggataatgattttggggttcaaaattcagtcagatgttagctatggagtatctttgagtaattggggtacggaatggaagggactcttgtcaagataaagttaagtctgtaagagcattaggggaagaaggaatgatgataactgggctagctctttaatgaatgaagttggaggcgcagggcagctcttgttgctatagaaaatcatgccataaggcagtgacgagagagattatcgcagcaatgatcaaatatttgagcactttgaagatgttttgtgaaaagccattcctcaatgagccttatttcaagttaataagtgtgaagtttctagaacaccctataaagactctaaataacccttggtcctccaagtcttcatactaatgccatttgtgggagagggaagatgggcatccttgtcaaaattgactggattctatgaatctacttcttgcttggtagatcttctttttagtttcttttgttgttagattgtaaagtgattctctggttcttggttgtcattgaataccatgtatagttatggattaatttgacaaccctgtttacaagtaaacagtatactgagaaaaatcttgctctatccaaactttaatttttgcaatactactctatattttatgacttgtttgtctcaggagctttggttttccaaacatgtttttttcgtagttagatgttttgaaactgcttttgagtgcacaaaaaatgaagccggtggttatatgcattggttttaggaatacagtaattacacattccctgttgccgtggc

SEQ ID NO: 10070 - DNA, 3618 bp, Eucalyptus grandis
  Intron number 7 from transcript Egrandis_v1_0.004763m (loc us Egrandis_v1_0.004763m.g) derived from phytozome v7.0 (c hr-ID scaffold_5; pos 20344949 to 20348566 reverse strand)
cttgaagcagatccgtcaggtgcattttgcttcttaattttctctttgagcacttaaattatagatatatgctgtttccagccttttgtctttgaaaaaacatattaatttgctcaactctaatgcaacaacaaaaccctaagcatttcagctatgtggatttttttactccattgcagtttatttttatcaagtttgtcaagccaaatctgcaggtggaaattgagcctttccttttgtatgtattaataacgtgaattaagtagattaactataagtatattaaagcaatttttgggttagggtcttgaggcatcttgaagtccatttttcggctttcgctacttcatttccagggaatgtctttttgaacatttactgtgcagaacttttttacaagtttctttaccaaaaaaaacttttttacaagttacccctgtggtccactcaacacattagtaaaataccttcagaaaacatatacttcttgtaaataattgttgatacttgaggaacaaattatgattcatttgaaagaacttactacagaagagccctcaacaaatcagttttatatttaaaatgattctagctgactttaagcttttgcacatgtatggaaatccatgcacatttattgatatgcttctcatttacttgtatgcttgtgtcatgggctggcagttctttggccacggaatagcccatgcagtacctattgagaagatcaggcaaccttttttctatagttgttcctaagaacagcacggcaaatagcatcctcgtattggatcgtaccatgctcagcttagcttggacatccagtccctctagtgagacacaaaacacttaggaaaaacaactcattttggcttgttatgccctcatcagaaaagcggcattagctcccgatcagtttgtgcacatgaggccaacccctccttcagaattctatagagatataaccattctatcctagaattcctaacctaaatgctttgatgtcactcccatgaactagttatatcattcttactgcatcactcactcttcaccccaatgatgccaagccccactcacaagggtacgagagtatgcgagaaccacagtccatgacacttgcctagctgctttctattggtggtgtatctgcacccaccatcttttgaattatgatataagtattcttcatttatcctcaagcagatcttggccttaagatctagtttcaatcgaccttcagctttcttttcaacctggttaaaacctagtcattctttcttagctggtaaattattttcaattggttgtttgtcagtcaaaatgcttcactggtatatcttttgtagggaacatggtattggcttctgatggtggcataagaatgatagcttgtggcatattggcctgttgaatttttcagaattaatgttttgtttatgagaatctgcagattaatttagtcatttatttgtgttgaccaaaaaaaaaaaaaaaaagcatgttaatcactacttgaggataccatagttttttggtcctgtgattgatgttgatagttatctaaaaggcatactgaaaggctttaaagactgtcaaagacggtgggaatggtttttccaatgttatgtgcatttatgctgccagcctgatcaaccagttgagggcttgatggctgctggtgcaaataggtttaggtcaggtgggctttttggtatgtaaacaaaaaaggtccatattgctagagaaatggaattttccctagatattggatagataccctggggtatttttatctatattctccacggggaacacctactccctcacgtcaatcccatgaccctcttcaaagaacacaggatccaaaacctccctcaagtagaaggatcaagctttataggttaaaagaaagatagtgaagtaattttaccatgtattccgatgcatagagtgtttagaagaagtagtttacagtctcataaaggtgaagcacattgaaaaagatccatctcctgctggtaacttggtggagcctgatgcaaatgatggttttgggattatatctggagtacctggagtttttatgaaaaataccactctatttgcagcaaggaaggtaaaggctgtaaaaatacggaacaaattgataatgttgaataattttcaacttcttgggcttgagccacatatttgctgtagggattgttggttgtcaccagcaaagttgggatatctatcatttacaatgtattttctgtatgtttgaaagtttggacttcccatgtcttctggaattcgtagtgttgttcaggagatgaagaggcagatgataatattgtgaatgaagttaaccagatactcaaaagaatcatctgtcaagaccctagacatgctaaaaatctttatggataactactatgcattgcttaagcattcatatactggatgcagctggcccatattgtttactagaaacaactgccaaggatgtcttgcttgtataagtcgactcaaagcacctgcaaggtccacaaaatgttatctaaatcgattacgaaagtattatcattccgctttcatcttgtatcatattttggttcacattgtttccacctctcaaataactttaaacacacccttaaatttgaatggtctaaaataacctcattgggacctcattaatggcaagattgatgaaagaggaaaaacatacctttaatgtaaatcaatcaatctcattatctttatacatcttttctcaactgttgtttcgtaatcttgtgatcaaatcagagaattttgcagatttgttgcttttttacaagaatcctctaatatacaagtattttaataggtttagtgaccggaattgtattttagtagaatattgtagagtggtaatgtctaaaacatttattggaaacgctctctaaagttcaatttctgataagtccttgtcatatacaaatatttgtttcaagttcttttttagtggaattctttggttacagttgtgaagtccatatgatttcaatttagatatgagatatgtcgattaacaaagattaccaaaattcctcatataattcagcttaagcacatttgtcagtataagagaggtataaaaacgaatggcaaatatcagaaggcggagaaataaaacgctattgttttgactaatgcagacagttgtatatatccatggcaatatgcagcttttgtattttcaataaatatcatctttcactctttccactttgtgattttgaccaattcattctcttgatgttatttgcatcaactctattaagttaggggttgctatggtaatttaaagtgtggaaatagagggagcctttattttcacctctctgagtctgtagaattggtgattgacatttttgttttcctcttaatgaccttttgctttctttgtttatttgttacgtcgttcccagcttcccattttgataatcttaagttccaggttagcaatatttgggactattgacagatgccaaaatcattaatggaattttgaagttcatggtgacttatcggcactagttgacaccaacttgaattgcctttgtctgatccttttacagatttctg

SEQ ID NO: 10071 - DNA, 8159 bp, Eucalyptus grandis
  Intron number 12 from transcript Egrandis_v1_0.006166m (lo cus Egrandis_v1_0.006115m.g) derived from phytozome v7.0 ( chr-ID scaffold_2; pos 57975728 to 57983886 reverse strand )
cttttccattgtcaagttgtagcctgtgaagtgcaattaatgctgttgatatctttctttgcttgcataatgtaaaaggtgagagaaactgagcgtgtgacctccttttgctggagaaaacaaaatcaagatgaatgaattgtctgcttgtttctcgcgcatgttatctgcttgttctgctgatactgatgagcaaagagctgccagggccatggatctgtatgtctagctcgatgaatctcggtgacgtttcatgttgaaaacaccatttttatttcattcagatatgatagtttaatacatagagaggaaaaaaaaaaaaaactagaaaaccaagatggccatgaagaatcctaaccgagccatttgttgtccttcaacttgccggtttgtgaggcgtcggctggtataaggcataacctctttctccttctctatgcttactaagaaccataaaaggaataccgccagaagctttccatacccatctgactcgagtccatggggtgtaaggcatagcctctttctccttccttgtgcttattaagaaccataaaaggaataccgccagtgcttacaacccttatctagccattggctgagagagaagtgctgatatgagaaattatgatatatatcacatccattcttctattgattactgcttacaacccttatatagccattggctgagagagaagtgctgatatgagaaagtatgatatatatcacatccattcttcttcatcaaaagccaaaaagcttcattgatctttctaatatattacacttagttccgatggatgacgaaaccccccttgaatgtacttgctagatccatcaagagaccgattggattagcttctgacaataaacgatgaacgtggattcctctaggccgatcacatttacgtaagtagggacttttgaagcgttttcaagcttagtaaaggttaagggacatttgatgtcaaagccgaatgttaccgacaagtgcaccatatattctgcgtccttaacgttgtacttttcgttctttccccttgcatcagtagatccactcggacatcctcatcgcaggcgtctttgctctgaactgtaatcctcatttttccgatcgcgaaactatataatcggatcttggcatcagaagaaagtaacagaaattccatttccagaggctacttgcttaagactttcacgatggcaggtaccgatcttgagttctaggtacgcacgaatcaatccgatcaggctacgtaattatcgcctctcctcttagtttcatcttgctgaactctcattttcactcctctcccgttataagatcagtaacagagcctttcatcattaaggctacgcatgacaagtttcttggttggggaagagttttttttttttttttttttcagaaatatttttttttctatttttatttcggagaacaatttctgagtaaaataaggtgtttggtaactacacaaaatttctactccaaaatagaaaaagaatagaaatgcgtttggtatgaaacagtttttttttttttttgtatttattcgttttttattcttgctcaccgattatcgaccactgactgcttgctaccgctacctgttgttgccagccaccgccgctgcacgactgccgatcgccgaccatcaccgccgaccgccgctacacacccatcggccaccccctcccgctagcggctggcggcgacgagcggcggccatggtggccgacggcagtcggtggcggcggtggtcgtcggcggcagtcggcggtggctccgagcggttggaggtggccgcagcaagagagaggaacaaaagaaaaaaaaaggcttatttctaaaaattgttctcgggaataaaaagctactttttatttttattttctattccaaaattgtttctgggaacaaaaaaaaatatagaaattgttctcaagaacaaaatttttaccaaacggatttctattatttttttgttccgagaaacaaaagaacaaaaattgaaagaaacaaaaatattatcatgcagactctaaacagccactattctcaaatggaagggactcaatctccttgtcaaaatcttcaagaatcactaatggtgcctttaataaccattttattttcgggattttttttaattctattcctgcacaagtttctgagcattcaaatatattaagtaactacaaattttttttgtttccaaaataaaaatagaacaaggatacaattagttcgacccttagtttttttatttttattttttttggatgtaggatttttttaatttttaataactttttgagacttttctttttatcctctcttcttttttctctagccggtcactgggcctcagcaatgatcggcaatctcgctggcttgtggcgaggttgccaaaccttgtctctagctggtcactagccatcatcaaactcaaccacagttagaggaggaagaaaaagaaaaaaataaaataaaatgacttgatttcaagaattattttagggaacaaagaattaacattttttctactttttattttgttccaaaagtattccttgggaaaaaaaattaattaacaatatcaaacgaatttatgttattttgttcacgaatttctattgttttcttttattttttttaggagcaaaaaaatataaatagtcaagaattgattggttatcaaacacggcttaaattgctcaactcccattttccctttttggcccaagattggtgggtgcaatacaaaaagcaaactttaagctataatcagaaatgcaccgattggcaaaagttggctatccactccacgagttcttttcattttctcagtggatattttaaagcaagaagaatccacgaccttctaattagttaagacaatctctcctttttttttggtcagaagacaatctctcctttgctcagttgttttctgtctattcatatgttgttggctcgtcaattgttgttgggtgtaaaaccatactttaacgggtagaaatgacaaaaaatgttggtttggtagctgtcctcccaactatcatcagcaaagaagcaagccactccaggacaatggtagtcaaacttttcgtgctgggaaatctttcaaagcgagtagagacaacggccccgaaggctcgttggatgatggcaaaggtccggacagacaaggcatttttcaatatttaccaggatgtaacaactctgcttatcgtcatcgctcaagtcatcatcacccagaatcgtcactgcgctggtcatcatcgcccaagtcatgacaaaataatataaactggcgtcgcttgaggttgcttccgagttaacgctctcaaaatcttaatggaaaaggagaggtgaaaggaggctcaatttgtgaccatttttgcggatagaaacgagattcacgatgcagaaactgaaatgcgcgtttccttctctgaggactccatcaaatagtgcagataacgagaactcataatcatattttgcatcagcattagatacaataggaatgcaatacaaaggatcgtgtaatgtacaagtatgtttaattataacaagaatgagctgttgagaatcggtgtgagagctaaatatatgtaataactctttacaagtggcgataataaacaagtgactccctgaacatatataatctactcgtggagttccactcatcaacgctgaagcattgaaaagactcctaatgactaaacgaggctcaggaatttcagaatgtgtacggtgacatcctcaaactgctagtggcatccgaatgaatcaaggaacgtgacatgaagttcgtatattacgttgctagaacctccataagtcaattatccatttcataacttgagtcggcatgtgaccaccgggagaagctttgccaacataattcggaaagacagagccagagatgcatcagaaacgaaatgttatctaggcttgacccagctctcagtcgtcgctgcattgccaggagactgggtgtctgactcttggcgagaactattaggttcgctaaacatgtgcctactgcattccgtgcttcgactagaattgaggaatggcggttgtgttggtgtaggtaattcagagctttctttcagcatcttcacaaccactgacattgatggccgcaattctgcagaggcttgcacgcacagtagaccaatttgaagtaacctagacacctcctgctcttgaaattgcccctctagaattggatctatggcttcacacagcctacccgatccaaacagattccacacctacaagacaaagtgtcaggttctcacataagtttctaaactaataacaggaatttgtttgagtgatggttgaaaagataactttaccgtttgtaagatggaacaggaactctcggagaaggaataattcttctttccagagagtacttccatcatgagaacgccatagctgtagacatctaccttttcagtcaatttgccgcgaacaacatactctggagccatgtagcccctacaaaaatcaaattcgaactacaataagggttcaagtaaattagaaatatgcatccatcatgagtaagcatctgaacaaatctgggttcaccagcttccaacaatcagtcaatgctaccctatcacctcaggaatttttccgtgcttttgattgtttccctcttcactttctcatcatcacacagcagaaacatgatgtagttaaactaaactcacctaattcacggtctaaagctagtgttttgacgcccataaatgtctaatcaggcactacccaaaggcaagtgaaattgggataaaggaaacgtgacatacaatgtaccagcgacaccagtgctgatatgagtcgcatcttctggaaataacctagctagtccaaaatcagcaatcttgggcgtgaagtctttgtccagcaaaacattggttaatttaatgtctctatgtatgattcttaagtttgactcttcatgaagataggccaggccctccgcagtacccaagatgatcttacaccttgtctcccaacttagtggtggaatgttctttttcgctgcattgaattgggtgttcatcatttcaattagttaggaataagaaaaagaaaagctctaactcaaatattcagagatgaggccacaaaccaaaaaggtgatcatgaagacttaggttggggatgtattcataaacaagaaggctctcaggaccggtgatgctgcaccccaacagtttgactagatttttatgatcaatgtcgctgatcaagtttacttcattgaagaaatgatcgacccactgcgtcgtgttaaataccagccttttgatggcaacaggctttccatcaggcaaaattccctatacagagaaataaaaatttatctgttagcatgacgagtgacatgcctactctgaacaggaaatggggaaggctaaccttataaactgagccggaccctccttgtccaagcttactggattggtgaaaataactagtagccttctcaagcaattcataggaaaagttacgcttggaattgttcactacgtccaccagaagtcccaactgcttcttttctgaagcagaagacagagcagggtaagataatatatcatgctaagaagatcgctcaatatgtaacagctacatcaaatgccatttacctctagtcttcctgacaagtttcatcctaatgaggaaagcagctaatgcaataattagtagcagagccaacgtagaagataccgcagccagaataatcaaccgtcgctctcctggcaagcattacaggcaactcactcaaatcaacatctcaagcaaattcaagggaaaatatgttacgcaaccaaggattatataattcagtcaacaatctagggatcaccaagcagaaagaccaactgtgcaaacgaactccgaactcttgataagaactacaattcggccatcctttctaatttctttatacttctgatatcttataccagaactcaccttcatttatttgaaatggtttggtgttgttgtagtaaaacttctccgtcgaatacatgaagtaacaaccggcattcaagccccttccttcctttttggggggacacgagtcgatcctcacagccgtattgttaagacagttctggcattcgctcccgttcactaatttccagcactgagccaacccgtaaaccgacacattcccacgaatcacagaccccacagagaacccgccattgatgggcgcttgcaaactcaaattcctccctaactccacgacattgttcatgaacatcgtctggttccctccaaaatcttccgtgccacacactgtcgtatcttggggactcaaactctcgttgaagaaatagtaatcatcgtacctatcgaatcatccagagcaaaaacttcagctattaccactgacatctcaccgtcctttttaaagtttccgagcccgccgccgcgagaacacaaagagtagtacctgagataacagccgtcatagaagagacgaccgccgcgagtgccctgttgtaaggccgagcaacggaggatctggaccttcgcccgagcgatgcagaggtcgcagtcgatccggtcgaggtcctccatgcactccgcgaacgcgtacacggtgttgttgcccgctctgcccacggccgacgcgtattgctgggcgttgatctgaggggacacggcgtccatcgcctccgcgaagctggtggcgaaggcccggcggtcgggcaggggggtggtccggttgctgcatatgaggtccacttcgttggccctcggatcacagaaacagagggccgcgaagaagagcgccgagaaaacaaggagaggaacggaagcgggagagggaagagagtgcatcggacgccaggaacgacaaagctattcgtagtcacaggagctcagcttagcgagggaatgcttctgggcattggaggaacttatccaggggcatgcagaacgagagaggatggatggatggatggtgggttcttgctggctctcaactgtctctccctcccttcccctgtttttgctggagttggagctggggccagcttgcgggttgaaaatggaggcatcccgaggatgggccccgggcagatattgactggaacgagtgggaacgagagaagaaccgggggaagaagatactacgcgatctttcctcttctccatctgctgcctgccgcttttggctttgctcggggcggtgcgtgtgaaagtgacgctggaaaaacagaggcgttcggtcgaaggaggtttgacctttgggagggagctcctacgcggtgccgttcccgacatctgaaactcatggacggagactggacgatgaactgactaataacgagcgggagggtggggcccgcgacatggcgtggggggaacaagaaattgttgcatgactacgtgcatcgtatcggtggtccaaatttcatttcactattatgagaatttgcgacgtgttattcttcctttcatggacaaatgggatacacgtggaataaatgaacggagagcttcacacgcgacgtaagtcccaggtgggatctaattataatactaaaattcaaacatagaaatatatagttaataggtaaaaaggatattccttgaatttaagcctattgaaactctgtaaataaattataaatcatccatttttcgtgaaaacaaacacagtgtacttacttgagtaatacttgggttttgtattttataatgataatcattttgactaatgattcaatatggtagattctccgaccttgtcaaatgtcttatagcttaattttcaccataattgagtctaatgaggactttaaaaaaaattgatacagttaaccaatcattttctttaaagtaattatcacttttgaataacatttactcaatcttgaaatttcctatgtgtcatatggatgaaatcaaagcaaatttactatttacgcagtaacaattattgataggtacaatacaaataattaagggaaaaaaccccaaattttatcaaaaaatgacaaatttatcctaaattttttcgtgatacaaaaaactttaaactttgctaattgtgatataattatcccaaactacaaggcattttttgtttttt

SEQ ID NO: 10072 - DNA, 1142 bp, Eucalyptus grandis
  Intron number 8 from transcript Egrandis_v1_0.021056m (loc us Egrandis_v1_0.021056m.g) derived from phytozome v7.0 (c hr-ID scaffold_7; pos 29869223 to 29870364 reverse strand)
acacagagagggatcgtttcttatcggtttctgaggtaattttgctgaatccttttcctcatttatcatgagcactttgcacattctttcaggtggcatgagtagttggtctgagggaattctactgaattcttttcctttaacatcactagcgttttacatgtttttcaaggtgacatgattagttaattttgtatatttctaaagaatggataatttaagtattctgctttattaaaaggctgcgggaggtcacctattgaagttgggatcctagtcaacattggatcacacaataaggggctatataacaatgacctctttctttgttgattaatacaataggggagaagatcagtcatttttttgctacaaatttatttaaacgactgtttattaggatagtttggataatgaagtggcaggaggcagtgagcaggcaatcactattcatgccagatatcctagggctctttcctctgtataggacgaaggggtgctaggtaaaaggtagtgttaaacctattcaaccacctaatatctgccgactttatcatggtggattttcaacctgtgtttgagttattcaaatgtaaagcagtaatgccttaaagggaatcttgaggcaccgcttacattatttaatctacatgtcattgtcctttgttcacactgatgaagtagcccacatcacctgtttgtggggttcaatgtgctttatattcatgaagtcgctccacctcttggtttaaaattttaggttggactttataacatatcggagttaggtttcacctcaatttatttcttgtgtgagctgcctccccatttgtaacattcatgtggcattcgtagtctggtttgtatgtgagagagtgtttaagtatctatattacttgtctgcggggtttcaatggactttacattcgcgtatttgcgcttcaccaattagtttaagcttttagattagattttctaacacaatacctttgcctagaccttcacatggatttttctggtgatttttgaatctcctcctggcaattgatgatgttaatgtgtcatcataaaatattccatagctctagttgtatagacagaagttgaatcaaactcttctatcatgttttgtatttcaggcc

SEQ ID NO: 10073 - DNA, 5267 bp, Eucalyptus grandis
  Intron number 1 from transcript Egrandis_v1_0.030623m (loc us Egrandis_v1_0.030623m.g) derived from phytozome v7.0 (c hr-ID scaffold_2; pos 530638 to 535904 reverse strand)
acgtcgctcaccacacaactggagattttcgtaaggtactgcttttacgcttgccccaagttgttccatgacatttcccaatgctgatgattgttcttctgagcaacttaggttcgtacattttgcaataagtactctgtacaatcaagtctatgtagccttgtgatactcagaacaatttcttattgctgtctgggaaatattctttgggattgatgaaggcaactaaaatcaaatgtgtctgattcagcatatcacagaaaatttgagaatataagttctagggtgttcaatttttaagacagttttggagttttgcagagttggtggaacggtggtgtgctttggagcagttcctcatattttgatttgtcaatttattgaagatggtttcatgaaactctagagatcatatacgctacttcattggacctctttctattgtgtcaaatgaagagccaagtccatcatcaaaagattagtcctatgacaacctgtgaaataattctcatctatcctaaatcatttcaattttcattaggtgttgatgtaagtaatttcctcacctgtagggaaagaactttaatttgacatggttttttttgtctcctagttgatggtacctcttgtgagctcctaccgttatgatggagatgaggtgaatatgactttggcaaaagcagaggctaagatactccacaagaatatcctcgtggtcttggaaaaaaactgctaggcctttgagacttaattcagcatcaatttatgtggcgcataggcatggattatctacatccttttggttcgatcattggcatcaccgggggctgctctataagcttttcacagatcggaacatatactgttctagcatccctcggcttgcttctgttgctgctggtgttactgccctcccccttccctctgctgtctcggcagccattatgggttgggatgatcctctcccaaacctcaacgacgatgatgatcgactcctatggctgggccattcttcaagggtgtttatgacggcgtctgcttggacactcctaagggcgaggagccaacttgtgccttggtcgagattcatttggaattcttctcttccccccccggttatcaaacccacttatggttgatcactcgcaaccgattaccgacccaagtaattctgtttgctcatgggaaaattccagtctcctcctatgtgttatgttcctctacaactgactctgttgatcatttgttcttcggatgttcgattacgggtagacttggtgcattttgggcgaataaatgtaatctccccatggtggaattctacgtggaaggataacttagattgggttatcaagcatctctccgacactagcttctatcaatcggtggctcggtttggctttgccgccttatgctaccttatttggaaggagaggaataacatcatcttccgcaaccagaccttattcctcctagctttaaaggaacatcttcgcaaggctatgaaggatagagcctttaccttttcgaaggtctcagatacaacccgtaatagaagactacaactcagttggggtatccatctctcgatctttgactaaggcgttaccttgtactggttagttcctccaagattctagttggttttctttgcagttcatctcggcaagtttttctaaggacaccctctctccttctccgttttttccccggagggttcccgttcattggttgttcgctttctactcgacactggttgctggctatctccgatgcttccaagatattccccctgcgtgatgcggcgtccggtctcttcagcattggatgcttccatggtgtccctagcttgatgtttttcagttttctacttgtattccttatcccctacgcaggtgccttcgtctctccccttctcttctttttggctgctgttttgcccggtctagctgctattctttcgttcctctttctacagctccttcccccccctttccccggcattcttccactctcttgaccggttgtcttttgagtggaagccttggtgccagggtctgttgctatacatttgtgtagttccttggttctttagttaaattaatatatatttaccctttacaaaaaaaaaaaagatactccacaagaagatctcagagaaggcttacagccatgaggatctcataaggattttggctactaggagcaaagcacaagtcaatgctatgctgaatcactacaaaaatgagtttggaaatgatatcaacaaggtgagttggaatttctatgaaccggacctttcatgttcttttacttatatgtctaaagcttatagctcctcaaggatgaagagtgcctgggtagtgttctttttggttaatagtcatgttgttaagaggcaacttcaagatgtcttgtttcaaaacattgagatgtgataatatcgtccgttttcaagttgttcgaaacctcatctctatactttgcttgagtaaaaagaattatgaattttctttgttgatgatgtatgttccatttgtcatgatgaaagatttgttggttctaatttgtagaacaataatctttttaccattacaatgtatggtaatgtgattaccaacatcaataagcaaaatcatgtaaatgtcatatccaatcagcaccaattgtgcataagattaatgttctgaaacggtttcaaaatcaatgtctaatgttctaaaacaatttcaaactcaataagttctaaaatggttttagattcaaaggtcatattaatggtctgaaatggttttagaattaaaggtagattaatggcatttaattgcaatggatgccttcaggaactcgaatacaagggtgtgtttgagagaagaaattgcactttattagatattgtgcaatttataattagttacatcaatttgcttatatccctttagggatatgccttgatacagctacatatatactgaaaaaaaaattctgaccaagttcgtttcatgtacaccctatgagatatgacatgtgtcatgcccgccaccccaagcacacgcaatagccccttttgacccaaatcgtcttttctaaacttaaaataaatcagcggaagcaaaaaagacagtagaggaaagaaaacaagcataaaattgggagcaaccatcaagcttcatttatttcctacgacagtcttatttatatagagagagttctatcaggtttatcaaaagaacaaaagatacgaggctttaaaaaaaaaacaaaagagagcagcaacccagcatctacactaatgccctcccctggccccgtcctgaagggaacatagatagaatcctcggaataatttttgttccaggcgtcaaatttttaaatctaattgtccttcaatctctaaatcaaatcacacctatcggtggcccatgcgccttcccaaagttaggggtgttgttagttttgtttttcaaatgaacgtatgcatgagcgggccagattttaaaacccttgtcctgaacccggcccggcccaacgacgtctctccctcttatctttactccgcgtccctccgctggttccacttctggaaagcgggacggagtggttgcatggacacgtggcgctcgtgcagcgtctccccgcttgttgctttccatgtaacggtgcgcgcttcttcaaggcagaggctgactttctgtctccgccgttttgtctcctccttcctctctctctctctctctctctctcgcgaacaacccccggcgatcttctgttccctcgacgctgtcgactctcgccgtccctgtttgcaggttcgctctatctcctgccttctcggattcttaatcgcgtgtcgttcggtcgtcgacgatcgtgccccgttttttgtgtttagatcacgatctgcgtagagatcgtgatctggtcggagtgatctttcggtggcgatccattctagacagctcgtgctcttttttttttttttttttgggtgatcggttgttataacgaactgtttctgggttgttatttccttttgaactcgacctgagattcccattgtagctgcaatatgtcgttcgccgctacaagtaaagaaattgtgctctaccttgagcgccggatatggcgtggtctcgaaaaaatgtcaaactttattgtctaatataacgatctggaaggatggggaacaaatgagaagttgatcatatccatattgggtcataggaatgcggcacagaggaagctgattaggcaaactatgccgagacttacggcgaggacctcctcaagtctttggacagagaactcaccaatgatttcgaggtctgatcttcttcaattatttgttcctatattttcgttgattatgaacgtgattgtacgttccgttcataaagctgtggctataagatgacatgattttctaaattctttgcatccctgtaatttccataccttcagaggctggtggtcctttcgacacttgatccggctgaacatgatgcatacttggtgaatgaagcgactaaaagatggacttcaagcgatcaggttctcatggatatagcctgcacgaggtctctgcagcagttgctcattgcaagacaagcatatcatgcttgatacaagaagtcgctcgaagaggacgtcgctcaccacccagctggagattttcgtaaggtactgcttttacacttgcctcaagattttccatgacatttcccaatgctgatgattgttcttctcagcaacttatgttcatacgtttcacaataagtactctgcacaaagaaatctgtgtagccatatgatactcagaataatttcttattgctgtttgggaaatattctttgtggttgatgaatgcaagtaaaatcaaatgtgtctgattcagcatactacagatagtttgggaatataagtgggaggtattcaattttttagacagttttggagttatgtggagaatgcttgttggaatggtggagtggcttagagaagttccccatattttgttttgtcaatttatttaaggtgttttcatgaaactctatacgctacttcgttggaccccttcctattgtgtcaaatgaagaaccaagtccatcatcagaagattagtcctatgacaacccgtgaaataattctcatctatcctaaatcatttcatttttcattaggcattgatgcaagtaatttccttgcctgttgtgaatgaactttaatttgatatggtttctttgtctcctagttgctggtacctctc

SEQ ID NO: 10074 - DNA, 1560 bp, Eucalyptus grandis
  Intron number 2 from transcript Egrandis_v1_0.038796m (loc us Egrandis_v1_0.038796m.g) derived from phytozome v7.0 (c hr-ID scaffold_3; pos 29627631 to 29629190 reverse strand)
gggtgagcttcttttgctctctgggtttgtgctcgttctcgagaaatgttttattgctgggtgattttattgcgggaatttcagatatgcaggggtcatgatgcccgtttactgttcaaaacactcggttgaatatgatacttttgtaatcccttctttgtaatgtggattattatgcatttttgatacgtttcgaaaaaaaagaaaaaaggatcttgggattctttggtctcagttggggctagcttgaaagatttagaatgataattagattgcttctaaggtggaaaaagtagagagtttcatttcatgagcccgaggtttatccatatgagtttcacgtcaccaaaaaggtttctttgaactaattgataagtgttatattccgggctcgatatggctcacataagggtaatatttcagttttgtcggttcaaacctattgagagtatctatcatcagtttcttgaacttgggctcttcactctttgttttttgtttgcaactttttggctccagcagagtttgctttctttctggttccaggaatcttttaagcacattgatatggtcttattgggaacgttagtttcttgttcttaacttcctgggcaaacgatgtgctgtttggtaatgcacactctaaggttgctttgcagctggtatggaatccttttgtgcttgcttgttcagcaagtgaaagctttcaagagttgtgaacgttgtaaatctatgtttaataagaatctgttttgcctttcatagttgccattcttcactttaaagctttcgtatctggttgccctatctgggagtcctttttccttcctttcacaggattttgtgagattgatgcattttagaaataaatgctgttcgatttctccattggatagatgttttcgaaggagaagtggctgcttgtttttaggagcctattttcgtattcttgcacttcacgtaatggagaagtttaaggaaagtttcaagacactttttaatgtaaggaattgtctttataagtattaggaggtgaaagaattgtattttgagatgttagcatctgcaaagttgatgtgcaattttttttgtcttttttccccttgggtcagttgatctaggtaattttgacttgccatgcattgagattaacatttaaaactgttaaccaagtttttaagggcagcctggtgcaagaatttcccgcaatgcgtaaagtccaggcaaaggctggaccagtttgggttgaagatatgtggccttaagttgtgactctttttttgtttgcaattgtgtcaaataacaggaaggcaaatttagctaaaattctttcatacttggggacataatttatttgatggaacattttatcgcactgggaatacgcttttcatggtgaaatgctggtatctaaacaattactagtacttgatgatggcatagttggtctcataatcttttctttagtttggtagttgatggagcatcaagttgttttaatccagtactaatcattttttcggtcggacctgatttgtaacagagcagaggctgtctcgg

SEQ ID NO: 10075 - DNA, 6274 bp, Eucalyptus grandis
  Intron number 6 from transcript Egrandis_v1_0.048629m (loc us Egrandis_v1_0.048629m.g) derived from phytozome v7.0 (c hr-ID scaffold_1; pos 8805999 to 8812272)
actagtaagagcacctagagggggtgaatatgtgtaaaaatagattctgtaaaatgtagtgaaaacctttacttttaacctgagtctgaataacaacacacttttgaaactaagtctgaagaacaacaaactttgagcgagttcagactttaacagttaaatagaactacgaacaaaataaaggagttcagggaaagagaataagaacacgaggtttatagtgattcggcttagatcaagcctacgtccactctcccacgctaacagccttctagctggattccaccatgcaatcaacaagagactacaactttgagtgcaaacacttagtactagatcacattatctcactaagtcactattttggtatttctctcatgatcacaaacgtttaagctcaccaaaaacaagtgtatgctcgaagttcgctcagactttggaattataaattctacgctccgtctcttacttgttcatcagtccttgatctccttaaatactcatacacttccaaactagccgttggacaatatcttgaggatcgtcttccaatctacccattaaacagatttgtatctaaaagatttggtagtcattgagtgacaaaagtagaatcccaaattgattccgattgcccatacaaacataatcttggtttccataagtaaagcttcttcgtatagaaagttcttgtcttcaagatccaaatgtcaatcaattaaattgagtcaatcaaatcaatcttgatgtagaatccaaacaagatcactagccgttatatgattggggcttgtgtaacgatctgtcgagttgtttcgttctaaatctgcttcattctatctgaagtagagtttgagtacaatagactttacaatctgagtctgaatgcaatagactttacaatctgaacgttagtctaaacataatctacttctgaacagatttagctttagatttgaacataatctaaataagttcagcttcagcatagagtttgttttctagttcttcattcacgttcaatctggaatttgtcagaatgggcagacttctgatgtagaacagaccttgacactaaagtctggcaatcttcaaaatagattttggacatgtgttacgttcagtcttctagtagtcttccaagtatagactttgacaatatcctttacatgttctatcatctgcatagtctattactcaaccattaaacacattagtagcctttgattgattttgtcatcttcaaaatatcataagggatttccctaataatctccccccttttgatgatgacaaaacaatctctaaatatgcatatgtgtaatcacactttctaaaatattgataaatcaatcatcaaaattttagattttcaaaaaatgtgatttgaatcaaaagacagcaaatagattgagcataacaatatatagaaaaataattgcaactcaataatataatatcaaccaatcaacacatatgcatatttatattctctccccctttttgtcataatcaaaaagctataaaagtatcacgtagagaatataaaaagataacatatatgtcttgcatgaaacataatttccaaaaatcagcttttataaagtaaatctaatattaaagatatgcaatagctcactttgatcatatctaatagtaaatatccaataaaaatcacggattcattataaaattcacttgacccattttgtcataataaaatgataatatcaataaaagatttgttaatgacaaaaggtaataaaagatgcactaaccggattttgtagaacttaacaagttctaacacatttaccttttccttccttcaataataatcaaaatcatgatcgattcaaaaatatttttccataattgatcaaggctccctctcaatttgttgccttttttaggtgatcacgattctttcctttctcttggattcgctttctccccctgtcatcatgacaatatttgcgaatagcactaattgtggcttgtgcacgttgagcaaaatatttttttccattattttctttgtagcaacaatatttgcaatgatcacttacattttgaaattcaaggcaaaaatttattttcttcaatcaagttattcttgaattcaacctgcataaacttaacgaactttttgcacaaataagctgtaataatatccgcataatatataatgtcatttcttcaaataaataaattggatagcatatataaaattaaatttagaactactcaacctttcatacgacacattaaggatttccttaacaatttgcaaaaactttgcacaaggaagggaatctttaagcctccagaagatagtatagaatctccataattttcagatcaagctttccaaaatctatatggaagattcttttgtcacctgcaaattcttatataaacaatccttgcaaaaatatcacgtaataccttcttctgatttgtgaatcaaaacttgctagatataagatatcttctaagaatatagcaagaatatccaagaatatgcaataatatcttccaagatcaaagggatttccttaagcataaatctcaaaaatgtattattgatgcatttcgcaaaaagaaagtagatatttttatcacgtgccaaatcaagcaatttaaaaagaaatgcaatgccttatgtttatgacaaaacatatttgcaatataataaacaatcatccaaaattatgataaatgcacgtagagatttgcaaggcaagataaaaaatattctcttacccaaggtatatgtttgcaatataccattgattaaaaaaaaataattaccaatcttcgcatgagatacctttttgcttgcacctacataaactcgcaatcattctttccttatagaatttcctgcaatgcattcatttcctttttggtatccatcaatttggatcattccatttcgttagagcaaaatagaaaatcttcaagaataatcaaatattctttctaaactcatcataacaaagtatttaagaaaagaatattatgcacaataaaatcagggagaatgaaatccttgagtatttagtaatatcttgcataaaaaattaatatcacgtaaaacagaattctatttggcaaaatatgataaaatctgatagtataaaatcaaaatgaacttaattgtctctgagcaagatatcaaaaataatcacacgattttttcttcaaatcatagaatacggtcataataaaatctaaatcaatcaaggatatgtcgaatatgagaattatgtgtccaaatcaaattaaaaaatttaccttccttaccaaattctctttcttctttcttctttatatcctacaaaaacaactcacattttctttggtacccattttttcttggatccatgagagttagtagaatatgatatttttaccaaatcttttttaacagatctccagactttaggacattctttctcaaagtgttccgaatctccacaatttgaacacttgaggacatttcgaccaacaggttttgtaaagattttttgaaaatgcttcttatacgcaagtctatgaggttttttctaagtctctccttgactataggaaaatctattagagaatcactttcctttttaaaaccaagtcccgacttattatagtaaggtacttgtatggaaagaatatgctctaatgtttttgaaccatttgaaaatcttgttgaaatatttgaaaattctttcttcaaagaatcatcttctttaacaagtaaatctcgactttcttttgtttgtagaaaatctttttgcaaaatttcaaaattttctttttgagaaagatcctattgcctaagccgagaattctcttttttaagttcggagatcattttaagagaagatttgatatttaagcaaagctcatttatatactttgaaactttgataggaatttttgaatgacttacctcgatttcctcatcgaattctgagtctgtgtctgagtcaaactcttattctgagtcagtgtctgagtcaaactctgattctgaatgtgccatcaaacatatattttcttgcttgtcatcttctttcatggttcttttctgcccattctacttgtattgtcttcttccaccgaatttttttccttgtctactcagctttttcaatttcttgatcataaaagcaagttcttcgtcgtccatgttattttctgagtctatatcatcataattagcattaaatattaaagcgatggacttcttacctttgggatcttcatcaacgatttgtttcacttcgtaggattgaagagtgccaatcaattcatcaacggagagtggcataatcctctgagtctcccagattgaggtcttaacatggttccaatcttttgagagacctcccgagagtttgttgaccttcattggggaataaattggttgaccttgatatgctaaaccatttacaatttctataaaacggctgaacatatctccaatcgactctctttgcttcatcttgaaggattcatatttgccaagcaggaaatttatttttgtctcctttacacgatcagttccctcataagtgacatgaagtctatcccagacttccttagctgtttcacatgaagaaattcggttatattcagcaggagacaaagcacaatataaagaataaatggtttttgcatcaagagcttatcttttggacatctccgtccgagacataggagcaggaggtttggtttctttgtctttgccattcttatttgatatagacacagcagtgggattgattcctttttccacaacatcccattgcaagggatctctagatcttagaaatgctttcattttgttcttccacacgttgtatttttttccatcaaaatatggtggtttggtgttgctttggccttcaaccaaacccggagccaacatactaaccatagatcttcaactcagaagtaaaaacacttcaattaaatgagtacacaagctccgatattaattgaaaaggctactaagagcacctaaaggggggatgaataggtgtaaaaacagattttgtaaaatgcagtgaaaacctttatttttaacttgagtctaaataacaacacacttttgaaactgagtctgaataacaacagactttgagcgagttcagactttaacagttaaatagaactacgaacaaaataaagaagttcagggaaagagaataagaacacaaggtttatagtggttcggcttagatcaagcctacgtccactctcccacgctaacagccttttagctggattccattatgcaatcaacaagagattacaattttgagtgcaaacacttagtactagatcatactatctcacgatcacaaacgtttaagctcaccaatgacaagtgtatgctcgaagttcgctcagactttggaattataaattctacgctccgtctcttacttgctcatcggtccttgatttccttaaatactcatccacttccaaactagccgttggacagtatcttgaggatcgtcttcaaatctacccattagacagatctgtatctagaagatttggtagccgttgagtgacaaaagtagaatcccaaattgattccgatcgcccatacaaacagaatcttagtttccataagtagagcttctccgtatagaaagttcttgtcttcaagatccaaatgtcaatcaattagattgagtcaatcaaatcaatcttgatgtagaatccaaataagatcactagccgttatatgattggggcttgtgttacgatctgtcgagttgtttcgttttaaatctgcttcgttctgaatctgccaggttctgtctgaagtagagtctgagtacaatagactttacaatctgagtctgagtgtaataaactttacaatctgaacgtcagtctaaacataatctgtttctgaacagatttagctttaacgtctaaacatagtctaaataagttcagcttcagcatagagtctgtcttctggttcttcattcacgtttaatctagaatttgtcagagtgggcagacttctgatgtaaaacagacattaacactaaagtctggcaatcttcaaaatagactttggacatatgttacgttcagttttctggtagtcttccaagtatagactttgacaatatcctttacatgttctatcatctgcatagtctattactcaaccattaaacacgttagtagcctttgaattattttgtcatcttcaaaacatcataagggatttccctaacaa

SEQ ID NO: 10076 - DNA, 3531 bp, Eucalyptus grandis
  Intron number 2 from transcript Egrandis_v1_0.013752m (loc us Egrandis_v1_0.013715m.g) derived from phytozome v7.0 (c hr-ID scaffold_7; pos 5330378 to 5333908)
tgtgcacttcctagattaattgaggcttcatcctggttagtggcaaaaaagaaagtcatttcctttgtacgatgacagtcgtcaggaaagtaatatttcttagaaatgcaagctttattctgtttctgccatcatgataattgtttccgaagtttctacaaattgggcagttgttttttactggcaaatagaggctttgctttttagtaagcatctgctcttggagacaagtcgactatgttcagactcttagagatgaaatgtccattgtttgaatatttgctttggcttcggggttgtgtagttcctttccctatcaacctagtgataaatgtgtggctctttttttcctaattgtcttggagaattttttaatttttttcctgtgcaaggtctattgtatgtaaaccctgaattgctgtttgttttttttcatcagcaaatcatattttacccctgcttttcaatgagttttttaactgatttctcatggatttcttgaactgtctgggttgtaatggttttgactggaaaaattcagctatcagtgattttatgtgtggctccgaaaatagtgatttcaatggaattccatgtgatgtgaaagatataattaattcttattagttgagtccttttgtggcaaaagtgggttattttcttgttagcattccatgttgatttcctatattttacattatcttcgttaacttgtagagagaaccatacagctctgacaggttatgatatccgtgagtgatgatgtttacttatggagcatcttacactgccatgaaccactaccatatttgacacctgttcatgccttttctcttctcatattttttaaggtctagaatttttatttcacaaatgatcaatcatttatcttttgatggtacatttcattataacaactattgcatatcggctgatatgtcggcatctatttgtcatttagctgaaaagtgttctttcacgatgatttcctttctgctgtaggagagtagacaattatgggctttgcttgggaattccttttggtctttgtagttctttttcaatgctttataagttatttatgcccaagagggcttcttggtattggttgttttactctagtattgtttgctctattatgtctgcatatccagggaactgtgctttcaagtgaatgaattgttgaaacatctttactggttgatcattataagcaatagtaaataccagcattatcaatggaattagattctgtaaatagcacttaagtgtctggataggatatcactgtatatgtagatcaatttggctttcagatcctggatttaacgaaatttcgatttcttgaattttttttatcatttttctttttaatcatgtgattttttttttttttttaacttcattatggcatgaaaagaagccatgtttatagcccggaataaagtgggataggatatataccttatcttagctaccattaggtggaagtgtttatccttctcaaattttcgaaaggcacagatgatttgatattaggaaagtctattagttgttgatgacattttaaagctttatctgttgcatatcatgcttatctgagtctgtatatatttgtacattcaaatatgattgtgtcgttgtagctgcacttccatgcatttttgttgatcatcattagatacatattttaacgcaacttctgataaatgattctctctttttcttggattctgtaaaatcattttttcaagattgctccacctgttgatcattgtcaacctagagtaatctatatgccgacatatcaattagaggattgatcttgcagcctcaatgccttctgactcatctttggcaataagtgaactggtcgggcacaatgaattaaaatttgatagttgaaacatttgtttcgattggtgaataccatggctaatcctatttttcaaactgaatttgttgattggttattaatcttctcatagtcttttgggtaatggagatcaactttcaatgtaagtttttctatttcattgctccttaacgcttcagtagtttttaggcgggtgcaatgggatgctggcattgttcttctggtaagagctattgctgctgaggtgtcagcttgcagacagccataccttctaatgcatggttttgcagctgacctgttctgttcttcgagataggtgtgttggaagaaagaaccattggttagtttgatctttgagaaaaatatggaatctaaataatgaatcaacactattgtacagtgactaggttgtcctactttttcttactcttttcacttgtagggtttatcttttattccagcatgggtgattctttcttagttttaaaacatcatgctggcttttttctagttcttcatgtaattggtatttgttgcctagatgatattgtctctatttaatttttgaaggtgataaatatcagtacagctgtctaaaattcacattgtgaagagcctctgtagaagtcggatacaatgtctgaatacctcttcatcactctagggattggcattctcccagtgtaaatgctcatgcattttctgattccagagattaatgactgaaaagaatacatctgatataaatatgctgctaacatgagtatatttattgcatggaaaaagcctgtgtagttgagtcatgtgtagtttgttctggtgaacaaactacttagctgctgcttgatcctatatgtgtaaagctgtccttcatgtctcttggaatactctgagatggttctgactatagattcttcaagtaggaggcaaggtgttagctactgaacgcacaatttactccagctattccagagttttctcctgtatttgcatggtggaagtctttcaatacattgaagaggaagtgatatttgatcttccaatgaccaaaactgtcattatcacttctcttccatgtcttttgatgattatccacctaggttctcattttctgtaataatgaccgataccagcatgatttttcccgaaatgaatctttggatctgaatctgccaggttcatttgaagcaattactcttgctgctgagacgctagcattagttttccagacgccaagcagttagggtgtctctagttgccaggctttgtttaaagtgattattcttgttaccctattagtacccatagaatggtcctcaatcattatccactagcatcaagatggagaaatatacaataggcaggaatatggctcttaaggaccacattttccatatcctacctctttctgatcctgcaaatctttttgaagtattagagaatcggaaactgaggacttgtaattttgctcagaagtgcaaatccaagcagattatctaaagggctccactgtttctcaattataagcaatccactcttcctccagttgaccttgaggcttacaacttctactattgttaacgtatctcttaggatgatctaaccaatttataattacctttttttacccttttcagtacacagacagaggtgga

SEQ ID NO: 10077 - DNA, 1386 bp, Eucalyptus grandis
  Intron number 2 from transcript Egrandis_v1_0.026657m (loc us Egrandis_v1_0.025111m.g) derived from phytozome v7.0 (c hr-ID scaffold_6; pos 2854282 to 2855667 reverse strand)
gtgaattggcgtttcttcttatccaaggtttgtcttaatctgcattcatgtataggcgatgttggaaatatctgtgttgtagtgtggtgcttcccatgggtcaaacacagtttattaaactctgaaacttaaaaagtgtaacgcatttgcacttcatgtacaagcatcaattgactgggctgggggatagtggaaccagaggggaaccaaagcagatggtatttatttatttattttttacatggaccaattgtgctaatctaatgtagttaggataagggaaaaggatagggaaaaagcaatctgtctgagcaaattttaagaagtgacagcttgtgtgagctcttccttatggttattgttacaaagttaagacatctaaaaattcccaaaagacacattcatctagtcacatcaacttatcattattggaagcatgtgcatcttttaccaaatagcaacagctgtatgattatgaaaattccatcactggaaactatatcttgctactaacctattagatgtaagccatagggctatattttcctccattcttgattggaggaaatatcctccaaccatgtctttgattagttgattacgagacatgacacgcatgcaaaattcagtatgggcgatacccttagttgtaaccccctaatcaaaagcctggttggagaaattttctgcctctaaccagagatggaagaaaatgtggccctttgatgaaaatggtgatggtaagtgaccggcaccttttgtgaaatcaaactttgaggaatctctctctctctctctctctctctctctctctctgtaaatagactccgtgaagattctgttaattgaacaatggcttcttttctttttctttatttagtgacaatttctgtatatttccagcataccatgtaatgcacttgaatttttttgcagtggccatagtcgatattgaattacgccttcatttgaatctccttagaattatgatgttgcaagttctggtatccaagaacaacaccaacttgagctaagtttgagcagtttcttggccatgaacccaagagagagagatttaggttttaaggattttaaaaattctaggagatctatttctgtatgaaacagaaaaaacctttccttaggattgtgatcatggatgtatctagcgaatgagtctaggcaccatcagagtatattattcaatcagtatgtttgtcaaactacaaatggcgttggcatatctttttgcatcttatgttttagataagtgcatgtacttctatgttttattctattccaagaaactctatcctacaggatctaattctattgcttggctgctttccagctataattttagttgctatcatctattacttctcg

SEQ ID NO: 10078 - DNA, 2123 bp, Eucalyptus grandis
  Intron number 1 from transcript Egrandis_v1_0.014628m (loc us Egrandis_v1_0.014628m.g) derived from phytozome v7.0 (c hr-ID scaffold_6; pos 819038 to 821160 reverse strand)
aagcggacactaatcttgccgatttcaaaaccaaggttagtccttgctcttgctctttctctctctctctctcttatttttggcggataagtgtgggctttcttggtttctttggtcagatgttgctgagaggttaaggcaacgtgccaaacgatatcggttaggtaaagtttttgttctcggtaatagatttgaatcatgatcaagaagtaaaaaaaagtttttttttttgttctgataataattctagaatcaagtattttcttttccttttctttttcttctgtggccggcgaccttgtcagatccttgttggctcaagcctcaccatggttgcaggaggctcagccttgcccagccaccgtgaggccggtgaggaaggctgagcttgcccagccactagtgaggctcaacctcatctaaccatcacaaggcttggaccaatgaggctatcaaatcggttagaggaagaagaagaagaaggaaaggaaaaaataaaaaaaagagaaaaaaatgttataaaattatttaagaattaaaataaattataagtcataaaaaaatttgaggtggtaccaaatacattgctattctaagaatataaattttgtacaactaccaaacgcctttgaacttagaaattcgtccgatgaacaaaatcagaaaaaaaaaaaaatcagttatgaacagaaattgttatgagtaatagaatggttaccaaacgcatcttgagtaattgcgcttagatattttaagcgagcaggtgttctacccaattgctgtctcatgggtttaacacttccgtggattgaaatgtgagtgcatgtttaatctgttgataagtttcaaaaggaaaaagctcgattgtgatgcgctgttcaattgattctcccaaccgatcatataaaattcacttcatcaagggtttagataattatgcttgaaactatcaagtttgaagggaacctcggtcgtgccctccaaaccagctgcagtgttttcacggagatttccatttccctatcatatttttaaacatgttgaagacgtaacctttatgctcccagaagacaaatcgctaatgcaacaagctttacgcttctaacctttttatttatcatcaatgcaccgattttccacagattgactaaatgggcatttgtagcaagaggcaaatattgccactgcttctggctactctacacttcctgccatacccatagatcatataaatgtagagaacttgaaatgacagtattaggaaaagaaatttaaccatagtttttggagagttcatggcccctagctgtgtcatccccaaacataggtgactttggtatttctaaattaggtatttgcatactagtcatcatcaagcgattctggtatggctatagactggagtgagatgtgacataattggtgtttctggaaaatatttttggagattagtactgcagcttctactaatagttttctcacaaggcttagctaaaaaatcttggagaactgactgattatgcaatcgccttgtgaaagaacatcttgctttgttgaatacttcagattagttgcaatttcgattagtcagactggcagatcaagtggtatgtgcactcctatgtagcctttggtggaacttttagcggtcgtctgtcagaatatcagcattttcattttgttggtgcgtggagatctacaaatgtagggcgaccccttttttgcagcgattgctttgcggatggccagacccttttttatgtaccaattattttcttggttctctatcttttttctttttcctttttttgcctaactttcaaaatcagcagaccgtctatactaatttaagctgccaaaatgatgatgttgttctttccaaagtcatggttaagaatgttgttctatgctagttaactccagtattgacttgtaacttacatccttatctaaatagctcgattttcaattgaactccaattttttttcgagttcttatggcagtcctttctatttgttaaaacaatggcatcagctgcttgctttttgtatcacacattactctgttctaatgagaataactcataggctattgaggtgaccagcgaggttaatacgtgggc

SEQ ID NO: 10079 - DNA, 1216 bp, Eucalyptus grandis
  Intron number 1 from transcript Egrandis_v1_0.025859m (loc us Egrandis_v1_0.025859m.g) derived from phytozome v7.0 (c hr-ID scaffold_5; pos 69347980 to 69349195 reverse strand)
ggtgagtgatgggttcttgggatttctttctttgatcggtgaaaatgctatctttttccatgtgggtgcgtgtgtttctggatgatggtcactgaaaggttcgcaatttgatggtccggattgaaagaatttgggtagttggatttgggttcgattcggtttgatgtattcctcatgatgagactaattattcctcggtgaatttgaattggtggcattggtgaaggcgaatggaatgagaagaaagtgaaaggaaagggttgattgccaagtaatgaggtgtctagttttgattctgctttggttttgtcgttggcattggtggatgatcttgtttgtgcgttcttagacttggaggaaacaagccctgtttcgatacgattccttattctgtttaaatgaactggatttgaaggttctagtggattgaaggaaaagttgtggccctttgatcacactatattgccttagcatctccatctgcgggttgtcttaatgtttatgaagacatacttctgtttggaatattcttaggctgcatcatattgatttgaccacttttagcaaggatgggatttctttcgtgggactacaaattctgcccaattgaattcctcgctgcaatgtccgatgcagcatctctgtttcaattttcagacattatggtgggaaccttgaacaattctagcagcatataatcaaaataattccatatcatttatagaggaattcgataatattgtgctagtagtacctggtgatcagttgattatgcctttttagttttacagtatgaaccttgaagctgtctgatatgtgaattttgtagtaatcttctccatacgaggatgaggattagcagagacagacagcgtctgtgctagtgtgaaacagtaaattcgtttgctaacaaattgaatcgccctttagagtacctcatattatgtgtcttaatgtcactctactagttctatacaatcgtaattgtggattaaatcataacatgattgaatcatatataggcttcttctgagttacaacactctccctttctatattgtccctgcaactcattgccggtgttgcttgtcatgaaactgattcatctgggccattatgaatcactcctctctcatgttgcccatttgcctttcgctgcagaacttgtgtctcaatgggcgtttgttttgcaggagccaccttgttccttgctttg

SEQ ID NO: 10080 - DNA, 2142 bp, Eucalyptus grandis
  Intron number 1 from transcript Egrandis_v1_0.023242m (loc us Egrandis_v1_0.023242m.g) derived from phytozome v7.0 (c hr-ID scaffold_5; pos 44410109 to 44412250 reverse strand)
acactctccgtggactcgtcccctgcaccgaaaaggtactcttcgttcccaatttgcccttttcgcaacaaagaaagaagttactcatagatgttatcatttactgataagcaagttagtttcttgtcttcgtctcggtttatgaattttgctgtgagggccagagtggagactggtggattggtttcaattgagtgctgcatgttataagtttgtcaattggattactatttggtgtttccatggcaatttagccactgatttttgatttcgccatttgtgctatacgactcaagtatttggtaattggtgatgccaagcagtgagaaactgatatcaactgataatgctcaccagttaaaaaaagataatccaatagttaactgtctttggattcaattggtagattgttttcatgtaatcgcagcgtctgctgggcttttgagatttcctcaatggacagagggaatatatttgattggtcctattatttttacacagcatggattagaggaattttcaacctaatcaataggatgatggtgaacttgagaacaagggaatctcattgttgactactgggttagattgcaataagtatgtccaggagcaatgcacagcactctgaaatctgctgcctaatgccctagattctgcctaatgccctagatggcttgaggagctgaaacttcccgaaatttggttttcaattttgtaggtcacctaattttttgctacagttgttcatagatcctgcaaaaagcacaagaggaaaattttgctttgcttataaagcttagatgaaggtttgtttattgtctggtgtattgtagttaatttaatgcaaatcgcggtcttttttctgcataacttgccaacagtggagagttaggttaggtctgacttggctatcgctggtgtcaactgggaggtattttatcattaagccctctgtgttgcaactgcagctggccattacacgtatttaatggaacttgacacggtgcatgattcacgcaattcatctatacaattggcgggatagtttaaccgtcggtggagtgaagtagacgtcatagcctagtttgctcgttttcaaatccttatcaggttcatctgtatcatggagtgaataggacaaaaattaggctgctcctgataaaaacaggcagagcacaagatttaagaaaataaatgcatgactggcgatgtctgtctgcatatgaacctttcttattcagagacgaactggaacaaaatgtctgaggtggatcggaagctgttctgcctaattcctgtagtgggttgcaagtcaaatatttattaagaaatcgaagctctaacttcttggcaggttcgaagtctatttaagtggagagtcatgtgtttgtttattaagaagtggccctataaagacatttgcaaagcttgaactgattttatatttggctgtcggcttctgatgtcggttgaaggccatttctatttgtagattaatcaataattagtgggggcaatgagtgggggcaccaagccaactgtggcatggatcacgtcatggagtttacctttcctggagtattattgcgaatcgtatacgtgaattcatccattgaatagcaaacttcctttatttagtcattaaataaaagataccaatggctatgtggaagattcattgttagacttccagccttcaactatattttatgtccttcgacgactatatattttctgtgggctcgatctaacccgttctttaatacttccatcattactttctgatcttgtaagactaaaatgtacaattgtgtgaaacatataatttatttgatcgtatgattgctttggatcccgactttgagttgccatggcaatatatagattctgcgtatttagagcagtcggctctcctcgaaatttgtattctatagatatgcagatgctttggtggttgactaaactatttcggggaaagaaactgcagaaagtcaacggatttgaactagtcctactattctcgtgtcataattttcattactgaggctgctagggacatctagatttgactggataatcgctgtgaactttgccaatctcaatttctctatgctcaccgaacttaaatcctgttcttaatag

SEQ ID NO: 10081 - DNA, 2449 bp, Eucalyptus grandis
  Intron number 1 from transcript Egrandis_v1_0.013595m (loc us Egrandis_v1_0.013595m.g) derived from phytozome v7.0 (c hr-ID scaffold_5; pos 14912798 to 14915246)
tcagaggcacaggaccaaaaggcatatcaatttaggtaacggaaacggaagttgtggttggattggttgttgatgtggtaaagtgactgttgaattgcttgtgatattccagagtgcactctggaatttaagtagcgttgcttagtctctacacttcctgcttgcatcctgtactctcttgcttctactgatgaatttctgttttatccaatgacggagtttagactcatacaggatgtgaattttatattcaatgttgtattctgactcgatgcaaagaatatgtggagcaaatgctagattgtagataaaatcaatatttttcttccgtcggacctaattttgttggaatatagttagcttatctcttaatgaggaaataggaaatttgaatgtgctgctttggatttctggcttccccttctggaataaatcaaaggaccagagttccagcatgatacttcaatttgaatgagagttgattgatggaaaaatcatttttgaaggagtcagactcatgcagataagaaggatacttcatgaaatacttaattcatgcagacctgaaagatttaatgatcaaaaggacattaaaaaaggtaggggctatatagctgataatcatatccttttagtgagataaggaactgtcaaagatctttgagtcatggagttctgtggggtctcaggggtcagaggacaacattttcttgttgtgtgtgaaaataactaataactaatcgtcaaggggatacattttattgaagtgtcttcacaccgggtccagcatctaagattgctacattttactggagtgtctttacactgggtccagcatctaagattgcatatgttagtctaggtgatggacctttggccttagttcaacgtgaagagagttaagtttctaagccaataacaagattgataaaataagttttgtgtcaccttgttgatgcataaggtgcaacagcttctgctgttagagaagtagtgtgtaagacaaaatattggtggagctgaaccaacaaaggtgattccattgaatatcaccatccccagttctagtgtcttttattatgacaaatggaaaaaaattgaattctatatctaatggagagttgttgttagatggaaacaataactggctctttcagtatcaaccttcattttacaagtttagtttaacaagcatgttgttttcaaaaagtgggagattaaattgaagatagaattgtgctggtcatagctttatgagttttttccgtgttatcttttcaggataactcttgtaaatttacttattgcatcaagaaatttggtccaaaagcatatttttccttctgttgtattaattgtttgtgactaatttttgtgtttgactaggatatgtgtgttggttctgttttgagaaaataaagataaaaacaaaataaacccgatggtgttggtagtttgatgtgtgtgtgtgtgatatgcttttgcttcctttttccatatggaatgaatggagctagaatcacaccgattctctaaatgtctttctgaatattcctcaatgtcctagctattcatgactgatttgttgactattacctatcaaatcttgttcaataatctcattttactttattgttctgttaattcttcacctaatcaccgtcgataaatgtcaacatatatgaggcatctcctttcgaaggagctggagatagactcaagacatcataatgaatttattcaacaggttgcttggttgaatgaatagctggaccaaatttaattcgatgttgcgtccttaagatataggctcacacaagtccaacttccctatcttctgactgttcaacagccccctctcactcaacaatgacatatctacctcattcacatgtcccaaaaacatgtcataactgagccaaatcagagtctgattcatttgatgagactgcagcagctctcctcatggtctttcccaatagatggtagagaaaattcactgtcttctccttcatcactgtcatggcgtttcgagagattgtcagcattttaccttcagcgatgtacttacacctgatgtcatttagtgttcctaattggcatgtactgagtgaaggtgggtccaattgggtggattgataggttcgaattttgggctctctcttgatctcccccagtgtaaattttgggcttgtgctgtacactcccaatagatttcaattgtcatatacttggacaaaacttgattttcaagcatgtttccttattttatatcctgtaagttgggccttatttgctattcaagtcaagccagtcagaatcagtgctcttcattttgctttttggatgttacaactaccttactttattgtacttcaagtgaaaaacttttcaatgcataccgctgctttcataatattggcgtctgtgtatccttatgtagggagag

SEQ ID NO: 10082 - DNA, 728 bp, Eucalyptus grandis
  Intron number 2 from transcript Egrandis_v1_0.017283m (loc us Egrandis_v1_0.017283m.g) derived from phytozome v7.0 (c hr-ID scaffold_1; pos 33328749 to 33329476)
gacggcagagggttcagtccacttagaaggataaggttgttttttttatgtaatttgttatttgaaaagagttctctgtgattttggatgcttgactgacagaatcatgccaatgacccaaatgagtttcagcataagaagaaataaaccattagaatgattctcttgacctcaacttcttgagtatatttgttcacacggtgcacgcgaaatgtctggaaaacaggaagccctacaatcagcagttactacaactaaaagattaaaaaaaaaaaaaaacctttatttcaatttctgttttctcacttctaagttaatcatgtctttatgtaccatatttgtacttttttctgttttagtggaggagtttcctgtgaagttgcctttgttgcgatctgtgatggtctagatcatttgcttctccgttcaatgaatctttcctggaggataactttttctatgattagatgaaatttctaaaagtttggatgattttgctgccttagttattacattcaagaagcaattgatgtccccttgcacttcatattccacattctgcttatgatttgttactgattctgtgggtgttttttttgctttcctgcatttggttgcagttttctacttgctgacatattgtaatcctaacatgaagatctgaactttgtccgtctttcaatgtggctctagcagacaatttctgcaatctacactttactttccac

SEQ ID NO: 10083 - DNA, 8224 bp, Eucalyptus grandis
  Intron number 1 from transcript Egrandis_v1_0.019985m (loc us Egrandis_v1_0.020022m.g) derived from phytozome v7.0 (c hr-ID scaffold_8; pos 68243638 to 68251861)
ccgagcagctccaaaaagctttcgcaggtctcctgcattcatcatcatcatcatcgtcgtcgtcgtcatcgctaaacttttctctttccatctactttcgtgttgctctgaacattcgactacgtggatcctcttcgagccgtcgttccgtgcttcgatcttcgtcggtttcgggagatcggatgctcatctgggtgtccttatttttttatcttttatttttaatcttagcgcaatgcatgtccttctctttctttgttttgatggaactatgatcccgtgttctgctgcggagtctctttctgatctgtgtcatggactgtgagttccttctgatcaagaatagtttttagcgctagacgttcctttgtccgcgttgatctgatcagtcttgtcttacatgtcccatctttgcttctgctactggatgagctaataaaaaacagaaagagaagaggcaagagccacttcttcttgagttcatttgagtggttctagcacttctacgcatggagtttggtagttgttatgtgcttttatatcacgagttcagtggaaaaagttcgcaaattttttagctgttggaaaaattgtgtctacaggatggggaacgaatgaagatctgatcatatccatactggctcacagaaatgcagcgcagcggaaagtgatccgacaaacgtatgccgagacatatggggaagatcttctcaaagcgcttgacaaagaactctctagtgactttgaggtcagtttttttattctgcagtgtgaaggatctctccaaaagccagttcttgctcagctgttgtcctctgtgtttcccctgcctcttatttccatcaaacatttatcagagatctgtgcttctgtggaccctggatcctgcggagcgtgatgcattcttgtccaatgaagctaccaagagattgacttcgagcaactgggttctcatggaaattgcttgcacgaggtcttcaatggagttattcatggtgaggcaggcctatcatgctcgttataagaaatctcttgaagaagacatcgcatatcacactactggggatttccacaaggtactcctagcttttaatctcattgcaggatcatcctgtcgatcaaatagatatgaagtcaattttctgtagttgcactgcgtgtgaaagtatatgtttctcaaactgatgccttgaatacacaaggccagaagcttggagatttatgaagagaaatactaaaatatctttcaagtttgttaggtatgcttctaatggcaacttgtaagaatcacagaaatgtgaaagtcttgtgcttttctatgctattctgtttggctgtgtatgacctcatagtttcctagagcttgactttgttgtttggagctcaacaaagcatgcttattgctcacgcatacactgcagctgcttgttcctctggcaagtacctttcggtatgaggggcctgaggtgaacatgacattggcaagatcagaggctaagatacttcatgagaagattcacaagaaggcttacaatcatgatgagctcatcagaattgttactacaagaagtaaagctcagcttaatgcaaccctcaattactacaacaatgagtttgggaatgccatcaacaaggtatcctacttattttctccatacctacatactacagtattgccaaatttataatggtgtcaagtggatcttgatctggaacttgaacttaactaagcaaaggattcaccttggactctctgctctttggattaccttcagaatttgtgaagttgcagtttataatgcaattgcacatgcgtctaaaagcaagatattgaagtgctcccacaataatcctttacttctctggatgtttggcattgcaaatgtatctagagatctactctgctacaatgagattcttgaatgtgaccttttggagagtggaatgccacgattaagattttctcttgataccggcagcttccccccacattttcctgtactgataaatgaggacagatgaaagatctttttcatctgatacctagatccgtatccatcattatcataagacaaaacttgaaaatccatattctttggtctctaatgtaacaagattgatgttttgatagtagtgaatcgtcctcagatagtttttattataaaagagaagctgaaacctccctacataaagactaacttgggctgatgtcactttgatctgcaagttgcctagttgatttctcctgatatatgtgtttatgaccactctaatggtatcgctagatatttttcatttatatatgttcctattctgtatgtcagttgttagctgttgaatttctttcaatttcttagtagagatttttaagttcattttaagacacagcttactctgggagattgctttggtgctgtaatcatctggaaacctctgtatgcaggatctgaaggctgatccaaatgatgaatttctgaaactgctgagatcagcaattaagtgcttgacttatccagagaagtactttgagaaggtactgcgtctggccatcaacaagctgggaacagatgaatgggctcttactagagtagtcaccactcgtgcggaagttgacatgcagcggatcaaagaacagtaccacaaaaggaacagtgttcctctagatcgggctattgcaaatgacacatctggggactacaagaagatgcttctcactttggttggacatgaggatgcttgagtgagacttgtgtctcagtgttccgtgcgaggtagatttaactggctgcgagatgtattgttatggttggagttgagttgagagcgtcttgtttaaggtttcgtgtgcgctcgtgatttatgtttggggaactttttgctggtttgctatggttttaagatagccatggaaaggtgcatttagcatcagtatggtcatgataagctggtggttttgcacatttatggtgtggaatccaactaataactgggaaaaacgggactgagaagtgattgtcgaggaggttatgtttatcaatcttaatcaacttgcttgcttcttctcaactttgaagtcgtaaaacataattgtcttcgctacttatgtgaggggttgtcttcagagaaatgacgagagatgtgatagagatagcttaatcctatcccttgaaagccacactcaagtgtcacggtcaagaggtttccatggctaaaggaccgtgcatcttcaaggaggacctccgagatcaccatgatttcccgcaagagagcttccaaaacattccaagggcgggcgatatgataattgagtcgaagtctagaactctcctatcattagtgtccatagttggtagattgagtggtacaaccttgtctgctcgatgaaaactcgattaacggttgtaatgggagggcttctagtataagaaggttccctccccctcatttgtatccatccaaccatttcagtaatcaaaaagttctcaatccgaatgaaccgggtgagcaagcgagcgatcaatccgagctggcttaggtgccccaatgatccgtaacacaagcatatgataaaaagaacaaagttgtaacagcaacatggtattattgatgattgctatatattgctctttatttctcaagaatcccagcaaaatgatcctctaaagatgtaaaggaatctgcaaatacctccattggtcaaccacacccagacaactgaaaattgatagcgttagattatcccaatatgcttgaagccgaaggggtacaaggaggaggcggagtactcgaaagagatgataccaccggagggagagctttgcctccgtttgccaagcagtcgtcctcggcattgccaaaccgctcgactatttccaggtctgggaatgtcagagctaaatgagagtcacggttaaggtggacactacagagcaatggacgggcacaggttctttatttcaaccaagaaaaccggaattcctattttttcttggataaacaaagtaacaaagcgtgacccaagacgggccccctctaaccggaccagatggatttatgggccacttggttgggccggctcgacccaacagcaggcttaagttctattttggagagcaccctagtgatggaaatgcaaggaaaagggcccaaaagttgtgttcgtttgagttaaaaatatttccgcgaattaggctccatttagaaaccttttatttttttttggctctccaaactagaaaggatagaaattcatttagtaacatcaattaatttttctattccctcgaatagaaaaacgattgaggaatagatttggaatagaaataagaaatagaaaaaagtaacttcttgaatttatagaaataagtcacttttttttttctttttttcccgtcttcttccttgccgcttgtccccccctactaccgcctcccctcggccatcgggcggctgtggccggtggacggcaaacaaaggacaggatcaacaaccggcacatagtgaagaaaagaaaaagagaaaaataattttaaaaaaattattaaaaaattaaaagaaatgctacgttataagaaaatttatggattgtactaaacgcatttatattctttttctatttcgagaatataaattttgtgtagttaccaaaaatgttcttttacttagaaattattctagagaataaaaatagaaaaagactatttcttaaaaaaaaaaaaattctaggaacaaaaatgttactaaacagacctttagtttctttgactttcatgtgtttggtttattgaaaataatttctatagaaaaccatttaaggttgaacaaaatattcatacttaaaataagaaaaatgaattctctaatgaaaatgatgttcacccgtattgttatataaagtaaatggccttttctatttttaacatatcccaattgttccaaccccccccccccccccaaaaaaaatacttgtctcataaatattctattcatgaacaatcaattcgtaatttaattttaatttaatctctcacatatttcagcattcaaatttgaatttttttttcccatccaaccagcaccatcttaaaaaaaataaaaaataaatctcaatacatttttctctttccacgtctattgattcatttttttttttgtgttgtctgtatttattaataatttatttctcgttcctaatttatttgttgcgcatatgcacattcgcgagtgttatataccgaaggtgcttaacattatttcaaaaatcttatataaatgattatataatcacttaaaaaatttcacatgctttaattaaatcttttccttatatgttaaagaggaaaaagcaccaaagtcctacattttgcttactgtgatatatttacctttatgatgtggacacatagtggcaaacaaagctaagtgactcaaatgaaataaaaactgcgctgttttgactgggaagtatgctgacttggtgcaaattttagggctctttgttcatgttcttgttgggaaataatccagctgtttgtgtttgctgtgtttctattcaagggacagaacacacatgactagacatgggaaacaagcacattcaggccaaccaaaaaattgacttcattaagtggtaatttctctgtgtgattctcataaaaaacgtcagtagaaagaaagagaaaatacatgaatctgggcttcatttggttacgatacaaacggatatgctcatggtaattcgtcgaatgaaaaattctcggaaaaagaaagagagagagagaatttagttaagtagaatgttcgagcccattaattttttgagttgcattgagaatagtcatctccatcataggaaacacttaagccctcatcgttactcaccgatcatcgctacagcccttgaggggcacatagatgccgctggaatcgtgacctacggctaagtcttaaagttgctggtatggtcacatccttcaactactgactaccgtttgtcatccatgctttagccataatactctccagcaccatcatcaaatcaacgagataatatttacattacgacgtggatcttttcattttaagttaagtgatcgtcatatcaactttatgttgagataataattgggatgggacgttgtctttttcaattttaagccaagtgatcactacttcagctccatttgccatcaacatcccgtaagtctttaagtccgaacccttaacatattcaatcggaccgattttcctgcgtaggacgctcgatttgttattgtcggtgcgagggaccctagccatgcccgatctctcccaccacaaaatatgaacgcgataaaatattttcttccgggcgtgaggaaagggagagcgtgtgatccaaagtcagaatagaaaaataattcattcagaaaaatacaaatgaaagtttcttcttttgaggccgggcagaggcagatgggcatgatgcctccaaatggaaaagcaacaggagagtagtcatttactttttgacaattggcaactaattaaataattaataaaaggaagtcgaacaattcaaaccaaaagttggtgtgtacgtgggaacacgctttcagatccgcatttatagcaatcaaaatccgcccccacctgtcccactgtcctaataaaagaaaaaaagaagaaaataaaatcatatcctaaagctgaatttggcaataactttaacttattcatatcataccgagcatctcctcttttaggttcaataattctcattaattaattttctaaaaaatcccaactttaagttcaatccaaatttaccccgaactttatttatcaaaaaaactcaattttaagttcggttccaaatctactactctaaactttaactttaatttcaaatatgtcattgttagtcttttgtccaaaaataactatttaacgtctctctcaaagaataattttattttggagataatttccacgttaccttattaatgttgatttgttaccgatgtggaaatatcacgccaaaagcctcatggtgattttggacggtcggttaacaaaagtaaatttgagattaaattatacgtagatgattgctttttcaaaaaaaaaatttgagataactttaggattatgctcaaaattaataatttctttagatcaaaaaagatccaggattggatataaagttgtagacttgtttttagacaaaaaaaaagaagaagctcaggttagaattgagacatgacataaagtttgagattcttttttgaggtagaattagattaaatctaaagggttaatccggtaataatcttgatttcccttaatatttctctgtctgtctttgtaaaagcccggcacagcatcgtcttcggctcctcgcgatatcaccaacttgcttccgcacagagagagagagagagaatggcgactattacggtgccaccgtcggttccgtctccggctgaggatgccgagcagctccaaaaagctttcgcaggtctcctgtattcatcatcatcatcgtcatcgctaaacttttctctttccatctactttcgtgttgctctgaacattcgactacgtggatcctcttcgagctgtcgtttcgtgcttcgatcgtcgtcggtttcgggagatcggatgctcatctgggtgtctttatttttttttctttttaatcttagcacaatgcatgtccttctctgtgtttgtttcgatggatctatgatcccgtgtcctgctgcggagtctctttctgatctgtgtcatggattgttagttccttctgatcaagaatagtttttagcgctagacgttcctttgtccgcgttgatctgatcagtcttgtcttacatgtcccctctttgcttctgctactggatgagctaatcaaaaacacagagaagaggcaagagccattgcttccgagttcatttgactggtgttaagcacttctacacatggagtttggtagtgattattgattatgcgcattttgtaggacgagttcagtggaaaaaagttcaaggatgatgttgaataattgataaaagttctgagaccatttgtgtcgtaatcgccatttttcttctgggtttttgtcaatcacgcgggctgctcttctagcgtatgtatccgcagcgcatttttgtacgttctgatggttgtttgtttgtggtgggcgagcaaattgtttagctgttggaaaatttgtgtccgcagg

SEQ ID NO: 10084 - DNA, 3594 bp, Eucalyptus grandis
  Intron number 6 from transcript Egrandis_v1_0.040822m (loc us Egrandis_v1_0.040822m.g) derived from phytozome v7.0 (c hr-ID scaffold_8; pos 27372847 to 27376440)
atagcaagatcaaggaagtgccgaaacaatttaaggtgcgcatttacttggtcctttttcattacttattccagtatgtattaaatcaaatgattttgtttttttatcctgaggaaaacatctacaattactatattctttatacctattaaagcatcaaatgtaggctgtcaatctagtacatatatccaatgcagttaaaatcttccgtttgtaaatagtctttcttataactaacaacttgttgattatagttgaaatacatgtaacaaagtcttcatttcttattagtgtactttaactgctttcctaaccatgtccacgtgtctttaatttttctaactgagtcattctatttacgcaaattgtttaatcgagtttcaccagcatcaaatctgatcaaattcagctaaatgaccatcaaaggtgttggagtatgatgtggattaaatatcgcctacgcggttgctctcataaatagtgattggcggtaaatgccataacctgtttaactagcttttattttaagctaattctatgattgttgacgtatgtgtgatatttaatccacattatattgccgggtcagtctaacggccacatccgctagaattggctatatttggtacgggagagatttgattagacaatttatttaagtagaaggacttgattataatgaaagtatagggacgaaaagtagaagttttctgtacatttacaaaaaagaaaaaaaaagaaaaaagaaaaaaaaagacaacaacaacagcgagcttagaccatcatgactttgagctgaaaatcaaacaaaaacttctcggtatgtaatttaatgtttgaatatagaatgtgcttaagcaatacgatgagactttttatttgatttgtagacttttaatatatgcaatagtcccaaaatctttaaagacctttcccatgagagaattgtgaagccacgtttactctttggacggtacttgttaagtttcaattgataaaatattagaatggctaaatgaaatttaactaattcatagagaatcaacaattttatcaatgtgacggagcttgatgaaggcttttatttttcatgctaaacccaagaagtttttatccatctcatgttagaaaattacaaaaaaggattttatccatccgatattagattaatttcttaacaaatataaaatagtgaacaatattggaagatcttgacaatataattagtaagattttaatttttattgaatatcttttgcatttaaccaattaagttagccctcttttgctaatcacattaagtgattttcaacttaaaggaattaataaagtggtgtgtaggtagagtttatcaaatgcacttaatggtatcaactatcgaaagaaagttttaattttaagcaattaatatagttatcaaacaccccaagctaaaagtagatgataatttaagtcgtgaaaaattggtaaaccaccaaaattaaagttggtagtttcctatatgatttaataactttaacaagttggcaaccataaaaataaatgttgctaattgttagagtaattaaaaatttcaaaacaatcaaatagaagttagtaaatggactcaaataagagttataatatgtaattaaataggtcaagcttgtgcaaggttgagctacgtggcatgctcacgcatgagctttgctaaataattcggtttttatagtcaatttagcaaatctttatcctacgtgtctaattgttacccatatttcgataataattgatttaactttatattctattgcataattctctaatagagtaatgcaaaatttggtaatacatgttgattttttatttatttatgtatatatagagtctatttagaaatatatatatattattatatgcttaaatatgattgctcatgatgagccctgaaaagaaactaacccatctcgtatttgacttacatttaacaaacaataataaatgaaaaaaatcaaattcatatttggctcatattttacaaataaatcatttaaatcatatttgagaaataatcgtaaggccccagaagtttaggggatcatctgtccaaactcctcgtggggttcatgttgggtagaaactgattgcccaattttattgatcctggggatgagtctaccatgaccactttcttggcccattcacttcggccatttcatggccttgcagtcaatgatcccaaggcccacttttggtccatcttggatttgttagttaatcctaactacagcccatagcctattacacgttgttggacctaacaaagaaaagtgctctcaaaaatgaaaatccatctgagaatcttggctcgtcggatttattcataggcgggtcatactaaaccaaaagaaatgggcaagtggtccgtccgataagaacgaatgaagaagacgatacttacagatactaaagttactaatggcgaaaattattcaatgtaattccccgattagtgcttttcattttgacgggggctttcgcacataaaatccattcatgaagatacatgtttttgggctttggtcagattcgatgaagggagacccaaaccaacgtgttattcattttttcatgccatgtgcggtgggcaaaggttattgcccatgggcatccaagtgacggatgagtccttcggggcaagacgaattaggagtggtacgcattgatataacgtgtcaaaccaaagtctcactcagttttttcagtaatgtttactgttttatgtttggatttaatatcatcacacgtaaattttttgcgtgggatccgtcattctctacatcaaatccattttgcagccgtctaccaagtgggctgacatatatgcattgtaacaatggaggatcaatttgggcagagggtacaagtttgagatttttgagatgtggaaattaatcgtaaatgtgtcatgagggacagttttgagtctttaacgatattaaccctctctattaatcagatgctaaacctgctaattcatataagcttagaaagaaattcattgatgtgtatatttattttgttctgcacatgttttatctctattacgaaaaagtcatgtcgatattagcattcagattagtaaatatagtcttatccatgcatgcacaggcatcatactacttttctataaaagttagtaccattaacttcttggtaagctctgtaatgaaatagtttgtaatttaaaactatgtagtaacttaaatgtattagttacttaccaaagcattactgttaaacaagttttcaatcaaaattttgttggcaatggaatttgacaattgataacgtctttcaacttttacaagcacagaatggtgttccaattttacacaatgggacaacagaatcgtccctatgtaatttgtttaggaaaactataagaaccatgtatatgcctctggatagatagaaataattacttgttcattaaagccaaattttgaattaaatacttatctcaagttttttctttcatccggaatgtctacccaagttgctttctttgttcttgcaggccttcataaaattgaagttcattaacttcagtgg

SEQ ID NO: 10085 - DNA, 8305 bp, Eucalyptus grandis
  Intron number 11 from transcript Egrandis_v1_0.011086m (lo cus Egrandis_v1_0.011086m.g) derived from phytozome v7.0 ( chr-ID scaffold_11; pos 20040234 to 20048538 reverse stran d)
caagggaggcttttaagcatttccccagagaggtgaacagaatcacaatgagagaaaaggctctctctctctctctctctctctctctctctgtgatgcagttggatcgagcttgatatatgctttcgttgtctacatacttgactcgttgtactctgatctccaggaacgtaggctcggcacctcacaaccgcagacaactttcaacgaattcatcaaactactacatgatcattcgcagactatttaagggtctgactggagtttcagagatcttctaaactctcctttgaaagaaaagatctgagggggaccaaatgccatgcacaacgaaagacgaccgcatcataaataaccgctgtcatgacatgctcggaactggtgtaacacttttttttttctacttttggtttttccaatttcataaattttaggtatgagagtgtgcttttgaatgcagactgtgctttattatttgctttctagcttttgctttgttctgcagttatttgggttttgctatgcttgaaagccttttatgtaccttttaagtattattttgatacatggatagtatctttctttcgataaaaaattcataaattttccaagggatttcacttaggacaattcggaaagctcgtcccaagcgctatagtgtggccaaattgggttcctccatttgcagcggtttcgggtttgaaaatccatcggtcaagcacgttttggagcactaatctattttcgggcctttctgagtttttttttttcttcttctaggaattagagttgaaacgctatgtatatgtcatgttctttgtaagaactcgtttttgcctcttttcagaaatacagaacaatcgagacatttgtctccatgctttgagcatgtgttttgcgagtgtttaccggtgcttttcatttcctttgtgtcggtgaatcgtattcgaccaggtgtcttaccaaacgtgaggtaattggattcgcatttctcgggtaatccaattccaaacaagatcagaaaaaaaaaacttggcgaagaagttgaagtttgaaggctatccaggaaattcctaccgcgcactaggagtggcacagatagatgcgtgtggttgggccaaggaaacaaatggcaatctcactgtaacaatgtactgggctttttcagcccattgcatgtagttgaatattcgaagtcactgtagagaaagaaaacaaactgggatgggacaagtgcactatgagatttaaaacttatcattaaagtgtaaattttcaaaaaatacaatcaattcttaaaacttgtcacgaaagtgcaaatttttaaatacaatcaatttctcaaacttgtcaccaaagtgaaattgagccttaagatttttaaaaagggtaatcaatggaattactctactggaccaatttgacgagttttagaatttatttacactttttgaaaggtctaaaactcaattaaacttttgtgacaagttttaggacttgattgaactttttgaaaattttaagattgaattgcatttcatgacaagttatagaatttgtgatgaatttatcccaaacaaatttgaaggcaagagtgacttgccatactaacgacacggtttcttctcaatttcaaagtatttgttttcatgtcactgtttataatatcatcgtggttctacctcgctattcacatttcatggtacttccaaactttactaaacttcctgttttaggattgtgcaccttccatttaggtatctctagcttgtagacatttctatgcttaatgccttgttcaccaattgatagagaactcaaatcttttagacgtttgccatactaacgacatgatttcttctcgatttcaaagcatctgttttcatgtcactgtctataatgtcgtggttcaccttgctattcacatatccatggtacttccatgctttaagcttgttcaccttctatttaggtatctccagcttgtagacatttttatgcctaatgccttgttcaccaattgatagagaactcatatcttttagatgtccctattagaatatcatctatataatggcttgtgtatctttcactggttattcaatcattaaaaacattagtttgtcatattcgaaatattataaaggattttcccaacaatattattattttattggagacggcaatagctttgaagggggagggctgttgagagaaccggcgtttgaggtaaagtacctaagtggacagttgccgacagtgatgatggggaggagaaaggagctatgggattggacttccatggaaacgaagtcctaggcatggaagcaatcgcgtttcacggtgtaggagagggaagctcgtctcttgccaagaaagaaggaaaaaaaattgaattttttgtaatttttctcaagaaaattgaatcagatttttatgtcgttggtgaaaaatattttccaattcattttcaaactttaattaaaaataaaaaataatttcttagaaaatatttattagaaaatgtcacattttttgtgaaataaatgaagactaacaagtttgagattttatcttaacaatctgagctttttgattacgaaggtcacaatttggtgatggttttgtttgtgaagacgtaatgctagtcttgatcaagtttatgttattgtatagttcaatttaatgattaaattaggtcaagtcccaatttaaattagatgttatctctaattagataatctctatcttaacatgtaatctatcaataaaaagatccaaaactttatcctaatagatctctggagattatctagaatcatattaaatatgcaatattatcttaacatgcaaaattatcaattaaaatctaccctaattttatctaagatttttttttttgataatatacaaacaaaacaaaagatagtattcaccatccaaggtatcaactacatacatatgcacattgtgaagttagaaaaaatatccgaacttcttacccaattcagcagatgatatttatgaattcggacaggacgatgaccggcgctcggcggcgttcgtagcgatccagcattttattttattgtgttggcgtgcggttctccgcagactccggtgatgggggctcctcctcaagatgctttggcggcgaggcttgtgcgacggtgtggtgaagcaaagaccgtgggttggagtagtttcgtaggattggcgactgtcggtagtaaagactcctcgcttttgtctgagcgaatcgtccccgaatgacacctgcacaaaacggcttttcttctttctgttttgaccgaacgtcagtcccaccttccaatttcgtcagctcccacgttccaatctcgtcacctctgctcccacccgcccgggtccagcgaagccagcaaacgaaagatgaagtcgtggaacgcgccagccgcgggtactttttcgaagattctttttttttttttgcatatgaaatgcttggagtcggtttttgcagtgatggtttcgcctctgtataaagcctgagcgcttcgccctttcttgttacttcctcctcctctctgggttttttgttttggttcgaccaggaaacaagaaaagaggtaagttgcttttctagttagtctgctgagaattgctagctcgtggcgtattttccggaaaggttttgcgaaatctatctcttcccgggaagatcagaatgagaagctgcttgttgagaagagcttcagttcatctgctagaactcttccttttgtccttcaaatggttcatgatccgaaaatttgttagggacccgtatagagaaaaacaacttgcaatctcatatcgaagttccctccttgaaactcaaaacccgctgtaatacttcctcttgtgttcgtcaatcttgggaaacagaaaaaagttttgaagcttcccattttttttttcagttaacattctttcttgggactcaagtcgaacgataaacaatagttttctcgcctatttagcgactttttggcttattggatttgcagtattaaatggaaccccccggtcacggaatacccatcgaaacccatgaagggcgtgagtgtgagattggtttggacaagaatttcgggtttttggaccagttcgccgcgcagtacgagatgggtaaggagattgggaggggcggttttgggcgcacatgctctgccaaggccaaggggggcagcttgaaaggccaagaagttgctgtcaaagtcatccgtaaatcaaaggtttcgttttcttttgtattccctcttcggatcttgctgcgtcatttgccttttcttgaaagaattttatatggattctggttcttatttagtaggtagcttcattgtgtattcgaatcaacaaaaaatttgtgatggtcctcttttttgtgcgggtttctatcagaatatacctgcttttacttgtgtggaaactgctagtggttgacagatgagtgtctagtatactgtgatggttactgttcattattgattgttcagtcaactgctttattttgggtaattccagttatttggagaaatctcttgttcactcgctgccctgatttgtgccagtgtctttatatatgtcatgtttgggaatggagtccatttttttttctgattagtagatggagtctgtctgagaggtcataaagagatattttaggtgaaatgctccttggatacgatggttgaattttcatagtttggatcccttgagctttatatactaaggaactactgagtcatacacactcaacttccaaggcccattagtcatatttcacttcacttgagaaagaaataaggatgatcagtgaagttttcaagaaagtgagatctgttgccttgatcgtatgaacttgccgcaccacaggttctctatagagcagctttacattcccgggaaatggaaagatgaaagggatgtatgtatcagcgttgctgcaaaggatgtgatgctttggagcatttgtctgcaggaactattgaagcatctcttttttgtactttgcagatgacaacagcaactgatgtagagtgcgtgagaagagaagtgcagattttgcgggcattaactgaacgaattggacataagaacttaatccagttttatgatgcctatgaagatggagacaacgtttacatagtcatggagtatgtttcaattgtgccaagtgcctatgcttctgttttctgtcatctttattgtttctggtgtgaagctgtgagcttctcagtataaaacatgtcataattactactaaaattaagtctggcgttgggattttggcatgaggggagttagaccagatcatgaggggaaattacatggcaatcttacaagtaacataggagtggtcaacctgcaaaatgattattctgttcatctgaactgagagaatcccaacgaattgggggaaggttatggttattcagcactgaagaatcaactattttttgacctatttgactgtgctcagtaagtaggtaaatttttggttgattatactcaaaaaacatattaaccgatggaacttctggttgttcagtatttgtctcaagcaaaatatctgtcagtttatgtttgaccattaaacttttggggtttatccagtgtattctctgttttccaggttgtgtcaaggaggtgagttgtttgacagaatattttcaaggtaaaattgtgtttctaatgcttagttaatcaaatcctaagcttgttttactatgtttttagttgagcttaagtgcacctttcaaatccttaagaggatggaaccatttttgtcttgtatagtgataaagattaccctgaagaagatgcaaaggctgttatcattcagatattgagtgttgtagccttctgtcatctccagggagttattcaccgtgatctaaagccagaggtaattgatcaattgctgatcatactttttgagaatgtattcatgaaacatagactatcattgaagtttaatgtcttgatcctcctgttgtttcagatacattagattggctctgttctgatctagctttatgtttctgtctcaaagtgtacaatcatgttccttaataagattttgacttttagatacggtactgctttccctttttaaactttcttcatgggatttcagatttttccattatttacattgatttctcattatagttatgtattagaaaataatgaccttggatgggaatatgcatgattttggataaatgaggtcattgttattgttttgaccaatactggtgtgatatgaggttattccagcctcgaggtgttccatcatagtgtataactgtggaataatgcagtgggtactttgccttccctgcctacctactaatgagtgatctaaaccgcaacaatcctgtctactaatggtagcttgattttctttccagaattttctttttgcgacaggagataagaactctccccttaagctcattgactttggaatttctgaatatataaatccaggttagaactacagattgaactttaagatattcccatctgttgacagtgtggagttggacttaatgtgtgaaatctctgcaggtggcaggttgaaggattttgtgggaagcgaatttactgtagctcctgatgttctacatgcatcctacggaactgaagcagacatgtggagtattggtgtcattgcctatatgttactatgtggtgatccacccttttgggggcagaatcaatctgaaatattccgggcgatccgtgaggaagagccaagttttgatgaagacccatggccttctcgatcccctgaggcaattgattttgtgaagagattgttgaacaagaattacagaaggagaccaacggctgcccaggctttgtgtaagtctatagagccatttaaacaaagaataacatacagaagaatagcaatcaatttgtaattggcaacctggccttattagtttgctaagttttatccctaatcaaacctagcaagggttgcagattaatattgatctgatcttcgaattcccataattttcattaggtcttccttggctggtttctcaccatgatgtcaagataccactagatatgatgatgtgtaggcttgtaatagcctatatgaggtcatctcctccacaaaaagcagctttgcaggtaagtggtgattttaccgaatttgcctatctcctgttgtctgctgtctcaaagactaattttgcttgtacgctgcatcttgaatttcgtgattcgactaatcaggggacagacagagcttgcatcagaataatcatacactctgacatagttcttcacttttcaatgattttctttctccaccttcaaatcagatgcgagtctgtgactgtttttgcctactgttctaagaactgaacttatgaatctttaccactggagcaggctcttgtaatgacattgacaaaggctcagctagcttacctcaggaaacagtttgaaatattaggcgggagaaagggttttattttgatgcaggattttaaggaggtcagttgttatcctattgcttgtggcacttcattggttttgcttttctttttttatttctcaattgagaattcatggtgactagtgtcaatttaccaggctgtgacaaggaggtctaccgaggctatgaagcattcagggactcttgagtatgccaatgaggtaaggcttgaaaatatcagtgggatgttgttgaaaacttatccggagcacttgggttatgcagacaaacaactagcatgataaatatggaaatgcaaagaaatagcaatgcattagctgttctggtaatatgcacgattaatgcttgaaaactctaatatttccaccttatgtatatttaacaagtgctctgagagcaactgttaacaacagtccctatcatcacattagttggtttatgcagacagagaactcattcaaaaaaaaaaaatatctaaccgtggaaaaattgccttcatggttgtgtcaggtttctaatttggcatatggagcaaagtttgatttccaagaattctgtgcggctgccataagtgctgatcagctggcgggaacagcgagtttggaagaatatgcaagggaggcttttaagcatttccccagagaggtgaacagaatcacaatgagagaaaaggctctctctctctctctctgatgcagttggattgagctcgatatttgttttcgttgtctacatagttgactcgttgtactctgatctccaggaacgtagggttggcacctcacaacggcagacaac

SEQ ID NO: 10086 - DNA, 3350 bp, Eucalyptus grandis
  Intron number 1 from transcript Egrandis_v1_0.030120m (loc us Egrandis_v1_0.030120m.g) derived from phytozome v7.0 (c hr-ID scaffold_2; pos 53368554 to 53371903 reverse strand)
gctgtaggtacggtccttccggattcccgtttcggtctatgcttgatttgaggttcgggagcttatctgaggagggaggaagcattttgtgggcgggcgtatcctactgctaaatatattacgcagattccgtcgatcgctttttactgtttctttgctctgttggtcgttttacttggttcgaagctgttttgttcgaattttcgagctttctgcatgacgtcgtgggacggtctcggctcctcgtgttgggaactgtggggatccgctggttggtccagtggattgaagtgggtcgttttaaggctagggtttgagtgtcaggacatggacttctgaagttccatttcgtgggttgttaaattaacccgagggcgcctgatgattgttgggctatagagggttttggaatgtgtagtttattcatgggaaatatgtcgccttgtctttcgggagttcttatgactgagaaatcctaaatcatcagatgattagacgaacttaatggctgttatttagtaaattagtaaattattaattaaggggaaaatgcgtcagtgtattttgttagtagtatgtaggcgtctctggctaatgtgtggttattgttccgtaatgatacgctgaaaaaaattttaacctaatatggagaatcgacaaccagagtctacactggagctactctctagttccctagtagtttgagctagagtcttgataaaaaaggatggtgctaggagtgttgatcttgcatttcaagcatgaaattgggattctgacttgtgttaaaggtggggatgttgatgtaaattgccccaagaaatgttgttttcaggtaatgtggattgaagttaatcctgtagattcaaatattggtctcatttggctatgagcatgagtcctgtctttatgtcacttttcaaatcacttataccgggtgccattgaaaaaaaagttggtgaactcgttgattttgagtcatgtatattctgtctatggtttgcattttaactgttgaaagaatggggaggccattctaagaaatcaaaactatctaaagctaatcctgtgattgtatttcagtcgaatgtgtatgaattcgtgcatggagtttgcttttgaaagaaataaaagtgtagtgactgttttttgagagtctcctaccggttgtttgatttattattatgtttgggctcttagcatgagacacgtgcaaatactacttatcattccggatttattgaaatactattattgtgtttccctctcattgagagccgcatgggcattattatgggtgaggaacttggttgaagtttatgcgtttaatatttgcggaagtgtgagtgcatgcttagattatttttgatgccggtactgacttcaatatgatttgttgtggaaagtataaatggattaatttggatgtttggtcatttttgtgcttcaattgagaataaggatttggtttatgtgcttaaaaaaacaccatttgtccttctgtgtgattagtggactttcaaacttcatattgctggtactccatgtgattatgctgtggtgctccgttggttcatgtgaagccaaagtttgatattatagggatgttataaataccatccatatgtcatatggacattgaaagtgcactagtatgtatatttaaagcctgaaatgcaggctgataagtggcaacgagtgttgttttacttttcgtagccggcttggaaaatgatggtaagattattctcatttagtggggtaggtggagcaaaaacagcttgaaatcttaaacagaaatagaaggcttcttgagaatagtcgtttgttttcctggttccttacagataagtagatgtctactgtaagatattggtgcatcaagaaaaggtatttttatcgtgtgaatatgatcttataactagtagaaaagtctccataactaggtgaatgagtcaagtattatgcaacgagaatgctaatgagcttgactgaactaaatttgtttaagtgcatgtcttccataagtaaattatttgggagaaaaagttcatgcttgtgagcgcatttgttcacacattggcttttgactaagtacaaccactattgctttgctcgtagactctagttttgtggcataaagtatcccgatggggttgttcagtcttgactactgatatctttagttgagtttaggataaattctcaacttcatgattattacttattatagatcaagcatttggatattggacaactgaaaaacacctcacctattgaatgcagtttctagtgtacttggagaccataaattgctagatttacatgtttccatgcatggtggcggaactgatttatactgatctcttttacattaaagtaatgtctattggtctttttctgtgtctgtgttttaaaatgtgatagctggctagacaaggctagacatgattcaatgctggttagacatcattggaccttgtcttggtctgcagcatgtgaaaaaatcgatccttaaacgtgatttgcgattggtctacccttttaatatgggggaatatgaactgtactttggcttgttaatagtaatcttttattgcatgtttccttctttcctatgtttggtacatctatctatatgtttaagctaggcttttgtccccctttctattgtttccaaaattacacttgcagttaaagttaaaacaacccaccactctctctttcatctaagttggcactcaattcacacatatttaatggctacatactacacatgttttcaattaaataatcagtcatttcctttcaaaataagcattcctttctctttatacgaatctgctgatgatgatacacctaggtagcgtgtaacttaataccagctgacgtttaaccaaaagaaaaggggaaaaaaacatatacagtccatacaaagtttaagataattaaagtaaagagattggtccggttcacatttaacatggcaatttatttcagggcggggctctcatttgctgatgtgaaaaaaaaaaaaaaaaggagagagagagagagagagagagagagaaatgagtaatgagtgaattttttaaaataataaagggaaaaaaagagcagaacttgtcagccctagccacaacatcatctcagcttcctttcaggctggttcatgccagtgattcagatagaatgttggttgccattggaaatcttgtactgaggaactctattgcttctgtggttatttttttgtacatttttttacaattctgtgtatgcaaaggaactttagatttgggtgaatatttgcagttccaaggaactttagattacttgaagagctcgag

SEQ ID NO: 10087 - DNA, 3991 bp, Eucalyptus grandis
  Intron number 2 from transcript Egrandis_v1_0.011623m (loc us Egrandis_v1_0.011647m.g) derived from phytozome v7.0 (c hr-ID scaffold_11; pos 40192695 to 40196685 reverse strand )
tggtccaagcaggaacgaaggagatcactgctaaggtatacagaatttggaattctattggtttggcttataatcatttggacaagaatttgcctctttgacgtatgtcagaatgtaattcactcgaactaggccagcaacaagttcagcagtattgatttaggatggagaagattggctgcagattttttgttcttgattgctttctcatgcttaacattctctattgtcatggtcgattttgtttagaaaagactaactgaggaatactttttcttgctgtatgcttgaatctttcttttgcatgctaatggcactggttagataaatccgtggatcaaagggtgtaatcgggatggcaattttttgtatggatagtgattgtagcatattgaccttttagaggttttggatgataatgctacaaagtaagcttgcttggcacagaagttgtgagcaaagttaaagcatgtgggtcatgaaaattactagtcatatatagtctcgtacccatctggtatatcttgaatttgcatttgtttgaaaaggtgtttcagaagattattttgagttgacctttgggcagaaattttggtgactcttgttggtatgattctgaacaatgcaacttaattggacaacttaattcttgatatttgggagctaacttacagcagaaaactgacagttgataatggcatcattaggcgggtaaggttattggtgaagacccactaaagttttttttttttttctttttctttggagtgagggacaatgtcgacgactactactacattactgcatttgcacttgtgtttgtggatacggcacttgttttattttgctggagagataattctttacttggggccaatgctggataagtattcttgctctttccagtcaagcaatgttatagagcatatgcggggtttctttgcaaaaaggttaaaagtaatttgaatgttttgagagttgtctccaccagttctatagatcgatgaccatatgttagatgataccaccctctaggactcggtttaatcttcgtcaaatagttactaattagtgggtagagcacttaggttttcattagtattctgacttcagattggccaggaattgctttactaccctcttttagtaattaatttgtagtttgtcttttctgtgtgactttgcctcaaagtcctattctgtttcatttccaccataagcttttaaaatccttgaagtcattgtatttttagtgggaacgtagtcacttttgaagcaagtgatgctcgcaaaatgccctttttattttcctgtgtcactttgctctttgtagttaatttggtatcactttattccctattctttcacaacctgtcctagtttgccttgaaatccttactgttgctgtatttccatgtgaatgtagtcactcactcttgaaatccttctttgttagtcaatgcataaggagtaattgaatcccagccaaaaaacataataaggatttgggggcaaatgtgggtgtgtaagggtgcgtttggtaacgtttctattcaaaacttgttccctgtaatagaaatagttttgttccaaggaacaatttttgaacagaagagcatgtttggtaattgctcaaaatttctgttcctggaatagaaaaaggacagaaacacgtttagtaaacttgtataattttcttgtttcttttattttttttcatttttttatttttccttttttcttgttctctttggtggtggccggcgaccggttgggcgacggccgcgcgaggctcggcctcgctggtggctgggcgacgccgacttagtggtggcctggcgaggctcagccttgctggtggctgggcaagctcggcctcgccgagggccggtgacgctccggcgaggttgccggccctcgacagccggtcgacggccatggttaaggtcggcgaccggccaaagaaaaaagaaaaagaaaaaagaagaaaaaaaaggagaaaaaaaagaaataagttttgtgtttttgtttttttgtttcttcaaaaagtgttccctggaacaagaaataagtttttcttgtttttgttccaaatttgttcccgggaacgaaaaaataaattttttgttcccgggaacaaaagcgtaaacaaacgtgtttctgttctctttttgttccccggaacaaaagaacagaaattgtgttccggggaacaaaaaaagaatacaaacaaaaatgccctaaatgtaaaggacaattttcccctactacccaaaaaaagaaagaaagaagggaattggaagggaaatataaacaaataatttgaggcagcaaattaatgtgcttgtcaattgcaaaattcattaacgttatcttttctctttggacaaataatagagaaaacctgtgtctttttagttgtacaaggatgatgagtcccaaattggtgtcccaattagaatgatagtttgaagacagatcactatgaatgataaatcaagacaaacgaattccttcaggcatcatagccagcacatttcatgagtccttgagcaccacactaaaaaaaaataattgtgttaccgaatctgaaagcaaagaattgcgagatctcaataaattcatgaactttatcttttctctttggacaaataatagagaaagcctgtgtctttttagttgtacaaggatgatgagtcccaaattggtgtcccaattagaatgatagtttgaagacagatcactatgaatgataaatcaagacaaacgaattccttcaggcatcatagccagcacatttcatgagtccttgagcaccacactaaaaaaaataattgtgttaccgaatctgaaagcaaagaattgcgagatctcaataaatttcattcagttgatggtttctatccataggagagcatgtatttatagataatcaaatctcactccaaactgaggtaggaaacctctagacaagaaacatagttgaaataggaatcttagtatgagaagtatgatatcctacttataataaattatgaaaatttataaatttttagcagtactcaaattttaataggtagaatctctcccagttagcactcttgatagagtcgtgaattgatacaactgtccatcataatcaaagcttggtaaaagcatcaatatttggacaattgtcaacttgtttaattgtgtgactgcatcgagtatgggggaagtggtctttgtaagcattggtttctcttatgtactttaaatatgtaatggctagcttctcctttttctccacattttgttagttttggtccagcctgtagctctcagcgattttaaagaacttgtcacagatttcacaaagtttaggcattttgcttttcttatgattttgcttgaaaggttccctgtattctctttttgccctataactaaattcgtgtgttgttgccaaaatatcattcatgaactgtcaaccatctgctggccttttaacaatgtggatgatgatggtagtatctttttcagattctttcatatatgaaagccgcatgtctgcagggtgttcttctgttagagtaaaatctatgatctttgtggctgttaaattggggcaattatctggatgactttttggaagatttgattggtccttttgattctgttgatatgaaatgctttctggttcaatttcattctccttcagatctcatcattgaatgctgggatcaggttgattctttactgctgaactcgggtgtctttgagaattagaagtttatgctgttactcagttaaagccctcttattcaactactattgactcgtaaagtgcatgcttttagtttgatactctggtctcgactatgatcagcattttttatgataaggatatgtgagcatttttgtttggtttttccttgatgggttaaatgaatctccttcttttgggtggtcatattgagataaatcattttccaggtgaaggaaggaggct

SEQ ID NO: 10088 - DNA, 5426 bp, Eucalyptus grandis
  Intron number 5 from transcript Egrandis_v1_0.022557m (loc us Egrandis_v1_0.022557m.g) derived from phytozome v7.0 (c hr-ID scaffold_9; pos 38229196 to 38234621 reverse strand)
aagagttaaggtgagcagtttgatttcctaaattcttatttcattgactaaataaaagctatatctggcaagatatttcttgttaatagtaattgacgccacttgtatgattaattcagctcaacccatattatacatcacatcccttctttctagaatcctagcctaatagctggacctaaacttggcagaaagctaaaaatgcaatggagataattgataaattcatattttctgcttactgcagctgttttactggttgtgctcagtttgcatgatgtgatgataatataacatttttgctccatttctattgctttcgagattattaactatgtagaagtgagagcctgaaattaagcaccagaaactattggcaaggggattccattctcagcaataatttgtgacgtttgcttgaatcccatgcatttatggtataatgacagagaaaggcagtccactgatatggaaactgatctttgtgcttgcagaatatcgaggggtgataaggggaatttgttcatcttgaaaatggtggatccatcctacagagtccccctctgaaattgatgtagtcgtacacgaatatatgttgcatcagagattcatatatagccacagaaccacaatcgtaagaggagttgcccacttcagtttcatgaatttggggcatgacactggttgagcatcgggctgaatcccccatgcaaaacttggtgaggaggcattgcaatattttgatattaggcaccgccaggcgtatggaggttcctcatattctgagcaagatagggggattctaagggataagctaccaaaatcgaattgaaagagttatgactcagccacttggattggacttttaatgtgtaaaatctgactcttctcctgcttcccatgtatcgtactccatgttggaagtggattatattgttcagcccagccccaatgtttgcttgtttttggtgtcaggaggatgtgtctataacatcgatcatttgtgtgatttgatcatgattttggttctcttcaggacgggtgatggtgacagactgcgacgactaccaatcgaggtttcctaggaaaagtcgttgtcctgttctcgtgcattgattttttctccgccagcctcctcatcagagacttttctcttctgcgataaatataaggttgactgcacaatcctctttaccaaccaaagcgccgtcgacaatgttcctttgaatgttgaagcaagaagtatgcacgaactttccaggcaccgctgttatatccttcatgggagatgggaataatacatagaagtcaggaattaaaagtggtgtgtgttttttatcctcacttcctcccaaaaaaaaaaaaaaaccaattgattcgcctcagttttcatagataacccatattcattaattgatctgtgtaggatgcttttcgttcgcagaagtctttgcatgagttcatccattactatattgtacacgaacgcaagaaaaatatagaatacactcgagtacgatgtgagagactaaagaaagttatgagagaagctcattctatacttgacatgataaatcacagctaaaaattactcatagagtaagatgtatatcctagccatgccatgggatgcaatgtgaccgtatctatactatctatagaggaaaaaatcaaaagaataatattgcgcgaaattgatcactttacccttttttataacttctttagatcacatctcattctcaacttctccagttttttttttttttgcacttattttttgtcttacttttccttcaattactaatgaatttttatctatgtgctccaattagcgaaatgtattatgtgattggcttttgtcgaatttaaattatgaaaggaggcagtgccaatttatcaattcattttacttgtctcggataagaaaaggaagagttcatggaaattttatatagtcaatctcatttttaaattgaaaatttgtctaaacggtaacgcacttgatttggatatagcggattacattattaaaagtaatattggaagaaagccatcacgcgtccacgggtagaaatcttacccgatgcatgtggagggtggacaagttgtttcctaatattcgctgtattaattgagttgcaatggtggaacgtccaaaaataggacgaacgaaagaattaaggaggggccagacgacaaaatggaaggagaaagaaaggccgagggaaggactggaagcccaccaacttttttccacgtcaaaagccatgcaatttgcaggttgccctatacacattcattcgcataaagccaaaagtcaaatcccatacgttgattacagctccggttagggactcttaatgtacaaaaaatcacaaaaaataatcagtcaaactcgtcgaccttcgacttttcacccttccatccacaaaggactcgatcaaaatcagacaaagatagcccctacttttccaaatgcggccacacaaggacgaggtccgtcggccccgatccctctctcgctcgcgattagcggccttcagctttgaatattagacctcacgatcgaaattttgcgcctataaaatctcactctccccatcattcactccatcttctacacacaacaagctctgcttcttgctcgctgctcaccaaataaatatagcaaagagaataataagtacgtgcatccacgatggcttcaacccctggcgctactgcgtactcccgtcgcttcgcgatattttcttcgatgctagtgctcttgtgcatgtcctgccatgcgcagctttcctccacgttttacgatgagtcatgccccaatgccctcgccgcaattcggacttccatcagaaccgcagtctcgagggagcgccggatggctgcttctctcatccgactccatttccacgattgcttcgtccagggttgtgacgcgtcgatactgctggagaatagccccaccatctctagcgagagagacgcagggccgaatagaggttccgtgagaggttatgaggtgattgacgacgccaagtcggaagtggagaagatctgtccaggagtcgtgtcttgcgcggatattgttgccgttgcagctcgagatgcttctgttgccgtaagtcttcccatagttctcaaaatatgcatcttatgatcacttgattactttcaaatatcgactacgagtctaaatcattttccttactgatataactgatgctgctgtgacaaaaatgtaggttggcagtccttcttggacggtgaagctcggaagaagagactcgaccaccgcaagcccatctctcgcgtcaagcgatcttccatcgtttcaagatggccttgagagactcgtatctcgatttgcaggcaagggccttagtgctagagacatggttgccctctcaggtatatacgaaatgcttattcaaacctgacgatggagcttggcctatgcaagaatttctcattcttgctcacaagctcgaatgatattgaataaaagggaaaaataatgttgatgtgaccttttctaccaacgttatgcaggtgctcacactctagggcaagctcagtgcttcacgttcagggacaggatctacagcaacggcagcaacatcgacacgggattcgccagcacccgtaagcgccggtgcccggcaagcggcggcgatgccactctagccccactggatttggtgacccccaattcattcgacaacaactacttcaagaatctgatgcagaagaaaggcctactcgagtcggaccaagtccttttcagcggaggttccaccgacagcatcgtctccgattacagcaagaagcccgcaagcttcaagtcggatttcgcggctgccatgattaagatgggcgacataagtccgctcaccggttcaagtggccagatcaggaggatttgcagtgctctaaattaactagtccgaaaactcatcaagatttcatttgttcgagtgcaagtgtgaatgtaatttttgcctttagccattatcttaaaattcatcaagatttcatatgtttttgagtgctaagtgtaaatgtaattttcgtctttaatctttatcttgtcaagaatccatcatttgtcgaactgttacaaaataagtcatcttcactgatctttttggtaattcattgaccaattctcgaaccccctttgctattttcctgcgagttattgatcaagaacgacatgtgttcaaatgagaaaataatacttttcttgggccacatttgtatttgcaatgagcaagcggagggaaatggaacaaacactatttgcttgtgggaattcgtctcaaacgagtacgaaatgacatttgtatttcacctttgtgcactttcggataatttcgaattgatcaaatttggaagatttgatggaatattgcaatacatattctgatgggaaagggttcccagcaggaacccatcagagagaatatcaatgttgaccatttgtttttgtctactggtactcacgttgagccttgataactggttagatgcaatactaattgccgccgagtctttcagtgccgtgtgatattattcatgtgcagcatgctttcatacgtccataaccaacaaaaacagctgttagtattcagtcaattgaatgcttaaaatccgaaaggcacaccatgattttgatgaataaaacattcatcccttgatgagaattatttacttgatcagattgcacgtaagcttgaggcggttaacccagtgaaggagcctctccaaatctgaattgcttaatggtaaatgggagcttatctatacaacatccaaatcagttttgcagacccaggtaagaaagttttcccacttttatgcactttatcttttggctggagagacctggcgaagactcgttgagtcagtttgatgagtgacatgctcagttttttaggttaatctagagcatgaactactctccatgttacaaacttgttcggttcttcaacattctaattctactttctagggtgaagtctattgaccagatggacaagatgactatctccggttggaatgtctatggatactgttacaacacttgtcctcgtactagcactctgtattccaaagtctctactttttcgtttgacaccatagcaacttcagtgaattaaagatctatactttataattattacgatgtgaagggcctctgtgcttctaccttcttctctcaattcagtcatccagtcaagcttcttccagttctcttcatttgatatgatggactcttagatagtcatctatctaggataaaggatctacagggaaaaggatatcggggttctatctgtccaagtgctcattttctgatatgggaactgatctatgtgcttgcagaatatcgaggggtgataaggggaatttgttcatct

SEQ ID NO: 10089 - DNA, 2107 bp, Eucalyptus grandis
  Intron number 3 from transcript Egrandis_v1_0.021086m (loc us Egrandis_v1_0.021086m.g) derived from phytozome v7.0 (c hr-ID scaffold_2; pos 26001390 to 26003496)
aatcaggccaccagaggtacggttgctgttctctcaatgtccaattctctcttttccaccatctgatttctgaatttactccttactggagctgtgctttttctttcgatagtttctggttagttagtgttgctagtggtgatgtttgttttcctattcttgggttttaagctttgatttcagataattgatgggtgttatggatttgtattgctttacgatcttggggttgacaacagatatcgataggtgcatcgggtaacttctcagttattgtacttacgtgaccttcacttgaagcgactttacatatcatgttgggatatatccagaattctactgggaatattgtgaaatgtgaaaagttgtccggttgtttttcgagtctgatagttgttaccgaaagtaagcatgcgtgctttctgggccaaaccttggtttgatcttttcaatgggtttttcccgcggtacatgaaaaagaatgtgaaaataacgtcagaccatgtatttgttttgtcgaactagattaaaaacattttgcaaacaagttatggagacactcctggacagctattttaacccataaactggaataaactgccactctagattcatatcgactagtaaaagtaatagaagaatgagtcctaaaccagcttaaattttgttatctcttcttatttgggagagatgcgcagagtatttaacttccttggatgatgaagaattggtcaaaagaattctgtttcctaggattttaaagtgacttgcctttcttctttggcatgcaatttgaagtatttgatgtccgcctgtaagtactttcgaagatgtgtctggattactttgcaagttcaagcagatcattaaacccaatttcccgatcctgatatctgaaattgtcgatcctccaatggattttaggatcttttagaagccacttggataatgtcttgttgttgttggttactcacatcatgtcttgttggtaaagcccagttggacttgaaagctgtaatttttgtccacatagttaggtattgtgaaatccttgacactttctccctccagtgcaaggaatgaacttttttaccgactactttccgtcataaatgccactcagcctggatggatctttttggagctcctaagtcctatttcttttgggataagttacctgcttattaaaattagcagattagctaacttttagccagttatgactgcattttttcgtgtaaagtggcatgtccatcaaacatgagggttgttcctgcatcataggcttaattttctttctgaactttgaatacaatttatgctataaaagttatagcttttcaaatgcttaatctacccagttcacttaaaaagtttgttgattgagaaacttcctggatcactgagctaatggattaggtaaacagcatcatgccttctgtgataactatatatattgatatacttttactgtgggaggtatgaatctgttcttgtctttatagagatacagacatgagattgattcacactgagatgattgatggatttatatgtagaaccattctgatttcaagtccatgatcatcattatactcttgcagactttgtatctttggaaggaaacctttggctattttagtttaactttgcttgtggactgttgtcagggctctttctgctcaaattctttagcacagttggttatctcttgttattatgcattatcccctctgtgaatgaactcgatgaccttaataatcggtgatattcttgtgagaatcaggtttgtgctgctgggtatgaatcttgatatgataaggccctgcagctgcttcaacaatttttagtcatcttcattagtggtttcatgcttggtttgtagtaaaaaaatagttcacctgttggaaggtggaaaaattttgccactctcttgtggttcataatgctaaacatccttctttcggatcttttaaaagcctgaaattttttgtagattttacaattgtattggagtattcagtatcttaataaaatgtaaattttgttaccgtacttttgaatttgtccaggcatagagaaggagattggaggacttcagctagaa

SEQ ID NO: 10090 - DNA, 5426 bp, Eucalyptus grandis
  Intron number 1 from transcript Egrandis_v1_0.032309m (loc us Egrandis_v1_0.032309m.g) derived from phytozome v7.0 (c hr-ID scaffold_7; pos 7690257 to 7695682 reverse strand)
acgaagaccctcgccgacgcgtacctttccccacggtaggtctcggttttataatatctttagaaaaaatagggagcaccgccgacccctttttctctgccctgttttggcccgttccggactcgcaggaccgggattcatcgtggttcggctcacgcgagttcttgtcccgccggattgtgcccggccctttttagtcttggcttgatgattgttgtgaacccgaatgcaaatccgaatcccgaatttgttggcgttcacgctttagtcaatgcaccccacctgtttgatgaaatgcctgaaccagattcacattgtcgtctttgattctcgttcatgttggtcattagacacggctttgtgaattttcatgctgttttgttagtttctttgtgtggccgttgctttgtgggtgttcgtttttagtacggggacgataaatcggtccccatactctttgaggttcagagctccgcagggcaatcgtggagatcgcccctaatccacgccttggttgttatggctgaaagagagggtgactgtgagggtttactggccgacgagggggccgtagcgattggttattggtgtgggtcttgcgctgaacatgagcatttcagtgagtagagacgttcgaggtggtgctgtgagtatatggcggcagcgtttttccggtgaccggaactagcctgtgatggaggtctggcagtggatgtaggctgattcatcgtgaagcgtggcgttcgtgttctatcgtttcggttttgacctttgattgagatttcttttaaactttcgcgtgccctgatttgtcttggtagaacgtgatggataaggggtggaggaagagacggcaagggggctcaggccaagttttgttgggttcgggctcaagagaatattctaaatttttttaaaaaaaattccaaaacaattcatttcttctaaaaattaagaaaaggcttaaaaattatttctgagtatttttttctcttaaaatgtgggaaatccaaaaaattttgtgttgaaatttgaacaaactcttagggctttacgatagagtttgaatgttcttagagacaaatgttaagttgttgtttgcacatttctatttcgattatcacttaattgtgtatttttgacatgttgattgtgtttcccttcgatgtggttgggaatggcatttttcttattatttagtgttagattcttgcttttttttgcaatttattaaatgctttcttggttactgattatttcaatgattatgcatccacatgaataccttatatattagtggataagtttaaaattaatttagactacctaaaattaaataagattaaatattgcaaaggtactagttgattaattaatgtttttggggaaaaaaaattccccccccccccccccccccccccaaaaaaaagacaattcgatactcaaatatcgaaaaaaatgaaaacatggaaacatgctcagaaagaaacatgtaacactgatcaaaagcatatcacagaatcggacataccttaattgtcatagattaagtatcgtcgcagttttgaggaattctttaaaaccctggttccgttcgtcgaaaaaggtgcatattgtttctaaaggggaaaagtgaaagaacgtaactcactttctgaaaaacgtaacagttcaaacataactgcactcttttgggccaggttttggcccaacatgagcggacaggcttaagttggcccatctaatataaaaagaaaaacccatctcccacttgcatatggtgatctctctacaacatttatattgataaataattcgtgcaatcaacatattttgagaattcgttgccacacatctgttaagaatatatagcagctcatattgggcatcacattttttagtagatttagtatgcagtaccctagatcgatccatcacatttatatatttcttgatttctttttaacaatgatatagcatattcacaattatgattataaaaaaaacaacataattggtcgactagtgaatacaaaactaaaatatgattcttcaaattcaatcttcctctctttgaaactctcaatttcaattcaacttacttttctagaaatatttcattagatcgaattaattcatgatcattgacaacattttaatatagcaaacactaaaagttgatattaaaacttttgctattcttgttggttgtttcacatatacgtagtatgaaataggtattacggtatttattcatttcccatggaacatatgtctatactttcaataccgtacaaatgataattcagatatatttaatgtctaacttgagttcacgtatctactctttcacgaaattcatcagaattcacatatgacatctaaaacaaataaagtaaaatatgtgggttattttactttcgatcataataaatattatatcctcatcttaataggtgatttaagcttgagctctcgattatcacttagataataagcttaaaaactgtctcatatctatttatcacatagtaaatagagacgattacctgtgtgagtaagctaatcttttatctgtccgacatactttatcaattttatataatgtactaaatattaagatacataaacgtcaaataaagactcatatgcattaataatgaaaacacaaattcattaaatgtgaacacttaagggaaattacaatattcagtacatcagcctttacgcaaccttaaagattttacatagccacataacacatctctaggtattggcttcgtcataagatctggtgttggccacataacacttcttttcgtgcaatcatatctttgacaaaattatccttagtatctatatgtttagtcttgtcatgatattttagatttttggtgtacgttattactgtttggctatcacagttaactaataatgagtttgttgcatttttaataatacctaaatgattcaaaaatctcttaaaccaaacattttattatattgctgccgataatgtcacgaactcaacttccatcgtaaataaggctatacacatttgttttttattgctctaagatatggcgccattattcaaaagaaaacaatttagaggtaaatttcatttcatttaaggctgcgtttggatgtggcatttccaagccactttaggcctccaaagccctttgggcttaaagatgagtgttaggcaaattttttgtaaacacccttggctgaaagtcggccttttgaaggctaaaagcccaaggcaggcatttcagcattctcggtaaatcgactgcccattaatgaattttgtttgattgctattgttgccctcataatttaatgaaattccaagtttaaccctttagctgaaagccctacatctgcacatgctgtcctcttcccttccagacccactcgcaagttatcgtcttcttcttctttctcaaattcatgagcatgacccacccgcaagttcttgtcttcttcttctctctcaaatccacgagcatgcaccaagaatcgtcatcaaatcgagctcccccgtacaacccgaaagccatcttctcattacgctcttgtggaatacacctctggtttcactgcgcctttggtgtcgctgctctttattgctcggatatttggtcaccgcttggttatcttccgtctttgctcatcagttcatagtgctcgcctctctcttggtgtctactttcttcgctgaatcaagtcgttgggctctctcgtgttcgcctccctcttcgctgagaacctacttgctcgtctcgctctaaatctaggttcttttgatttgattccttcttattatgctttttctagttgtcattgttaagtggaactcaaatctttctatagacttggtcttggtgcaaagttttcacgtcaaatgagacctggattttcaaatgaccctatgccaacttgtagtctagaaggagagaagctgcgaaagatgctgaggagtccagcctaactgtaagagatccaggtggtgatagtgatattaataatgagttagaaagcagagcgagtgcttttgcgaagaagagaccaattactccacccatctctttaacaatgaagaagaaacggagataaccacttgaaaggattacttttttggtctttaaaaggaaaatctagaccgttgaacagggttagttcttctagaagattattccccttgtttgctaagatggaaatacaatagaaattcttcgtttccctacttcataagagaggtccacttatttaatgagttttcaatgtgctagccaagtgaggcttgatgtgatctcttttattgctagttttgattttcttattgtgtatcttgtgtcatatatactaaattgttactttttttttcaagcaaaaaagattatatccataatcaaagctatcagcaacatacccagggaaaattacccgggccaactccagccaaaatacctgatcttacagcaagtggttcatagacaaactctccctcttctccaagtccatggaatattgcaaggcaaattttgctcgtctgtataacatgactgtgcctcttttggaaagttcttggcaagctttagaactgagtatttgagatagatcttgcacagaagtgccttctagtcttgctggagctttcaatcttggcaagtcctcatgaaaacaacattagatgtctccttaagcttgttattccaatgcaagtgcttctagtgcagttggtagagcaaccaaagtcgtcgcttgtgtttcagctcttacaattggaggagacattcaaggtgtcactagcccagggaggtgctgtcttcaagttgaagggaggcatgtgtttggtacaactagtgaggagcgcgacaaaaaacttgaacagtaatatccgctctaatttttttagatggatagtccagacaaagttattgtgcattggttccatctgctggtttggaacaatttctgatgaatgggttgttgaacttgtaaaggacaatctattattgctctttcaagattgcaaaacagacactccctcttggccttgtttttccatttgccttttctttaatggcattccttatgtcgagaccatttgttttgaatttgaaccttatcttgtgcttatacattcatcaactgtatcaagcactgtcaatggccatgagcgatgcacaaaaaacaacttccatttcagaatgtttgttggagacccttccatctcaggatgtttgttggagacactgtgggtctggatgatcttgtatctgcagatacaggcaaatttgtacatagtgtttaggggatggactaaactgcatggttataagtagagtatgattcatttgatgcccactatccttgcagatccatcctgttgcctttaagcaaggagggatttc

SEQ ID NO: 10091 - DNA, 4093 bp, Eucalyptus grandis
  Intron number 1 from transcript Egrandis_v1_0.024852m (loc us Egrandis_v1_0.019605m.g) derived from phytozome v7.0 (c hr-ID scaffold_9; pos 27941314 to 27945406 reverse strand)
ctctatactcccaccaattcacactcgattgcttagcttggcttttgcttattcaatggcttccgactcggatgtcaccatcccctctaagatcaaggcttgggtctatgccgagcgtgggaaccccgtcgatgtcttgaagctggttccagatgttggggttcctgagattaaggaagaccaggtccttgttaaggctgttgctgctgccctaaatcctgttgatttcaagagagctcttggcttctttaagcacaccgactctctcccgcccgtaagacatcatattacctacaatttatttttatttttaaaaaatcgttcatcgccggtgaccactgatgcctgctaaatgcgaatctattaagatatggaaatttttcgttttgtatttcatcagttatgataacacttgtgaaaactagtttttggccgatataaaaacttgatagcttctaattactcgttttctgttggaattttttatttttcatctttctttttttcttgttcactaagattgtgcctggctacgacgtggctggtgtggtggtgaaagtcggggatcaagcgaagaagttcaaagttggggacgaagtgtacggagacatcattgagaaagctgtggaccacccaaagcaacacggcactctggctgagtacactgctgtggaagagaggctgctggctctcaagcccaagaacttgagctttgtcgaagccgcttcacttcccttggccatcgaaaccgcttacgaaggcctcgaaagggctggcttctcgcctggcaaatccatcctcgttttgggcggtgccggcggtgtcggttccctggtgattcaggtatatcattttgagttgctgagctctgctgatgctcggaaaagcaaaaagaaaggctcataacggaaacaatgatgtcaactgttattgggtcgggatctgctccagtattcattcaatttagactttgagaatacgatgcttatgatataattgtcttatcgtttgaacctatggatatatttatgatcttttgttggtcctaaaacacagctagccaaggaagtctttggtgcatcaagagtggcagctacatctagcaccggaaagctggacttgctgaagagtttgggagctgatttggcaattgattacaccaaagagaacttcgaagacctcccggagaaattcgacgtggtgtatgatgcggttggtatgtgtttgaaatatactctgttattccatttacaagtttggagttcgcccaacttcttagtcttgtcttaataatcttaagctttgatgaattcccccgtctcaacaaaacaaacaaggggatgcatatacactttccaagtggaattacagctatttctttatcctcttttagctggtatttgactaaagttcaaggtgcacttatcatatgttttgtaggcttctttgaagagtttaatcattctaaatgaaatgcatgcaggtcaaagtgagagggcagtaagggcagtgaaggaaggaggaagcgtggtgacaatatcagggaaggcaactccacctgctgtcctattctttttgacatctaatggctcagtcttggagaaactcaatcccttcctagagaaccagaaaataaagccagtgattgatcccaaaggcacattcccattttctcaagctctcgaagcgttcttgtttctccagactggccgagtcaccggaaagatcgtcatccacccgatcccatgagattagagagagggagatcctagcgttctctctaaatatagaactaggagcacatccacacatatgtatatatagtggctagctgtataaattatatgtgtgatatcaaaaacaagtcatctatcttttcaataaatttatattagaaatattcatttcattagtaatattaaagcgaatatcgacggtttatttcattgatcaatctcatactatggttgtccaaaaacccaacccaacacgacccgaacatgacccaaatacaaactgtatacaaaacaagtcgagtacatgtttcaagtcttaaaattgttcaaataacaattataaaataagcaaacaaacatgttttggtttgatttagagtcggaactttgtttggccgtgaacactttattgactccaaacaaacacgttctctcatccaaacacatcagaccccgagtaccgacgactctgccttctcctgacaactatgccttctcctctcgtcaccaatttcattgccctccaccgcccgtcctctttcttttccagatttatgcattgcgcgcacgtcactggtgattcgctcctctcgttcgaatgccactgtcaatgacttcttctcgttcgaatgccactgtcaatgacttcttgtgactctctctctctctctctctctctctctctctctctctctctctctctctctctttcgctggctctgtttctacgtgcgctctgttctttcgcgttgataaaatcttggggaggaggaatttggcgtctagtgaatccgggtctccgtaattacatgcttttcatgtcttgatgctctgaagcgtttttggttaactaattctagtttcctggtcgtctgcgttctttccgtagtgctctctagtagttatttgatcttgcaaagcaccaagaaagaaaaaaggcgaggatatgagattctgctgtagtttctctatgttgggctctgtctactttcgcgcattctctaagtccacatctaccgcactgctgttgcatggaagatggctcgaaagaaaagagagctgcttaaatttagatggaaaaaaatcaatttgtctgctcttgttattagttttagactgtgtagatgagaatactgcactttcttgctctttttagtgtgcaatccaagcatcgacaccagccaatctatgtggaatccatgcggcactgccattaaaattgatttcatgtgtgatgctggatagttagttgtagggttttatagtgagagatgataggttattaaacacgtaggttgcactgaacctggaggcagaattcgatgctcctgacagcccaaaccagaccaagtgctgatcaaagtcctcactgctgcattgcatgctgttgacctgaagagagcacctgggttcctcaaagccaccgtcacttgcgctccagtaggtaacacttccaactgtatgattgaccatgacatattattgggcagtagagaaatgccagtcgggcccaggtcccggatgatcgggaccgagacctagggggccgggccgttgaccctggcggcagggcttgggacctcagtggccaccccagagcccttgaggctgatcccaggcccagatccccgacaccctggcccaagatcctgatgaccggacctggcaacccggttctctagcccggctcctgctaagatgagtccgggttcaggattgtcaaagcttgaatccgaaacttagagttatacttgagatttcaactttcatattatttgcaaagtgcccaaaaaaaaaaaaaaacatccttcgaaaatattttcgaacaaagttcattttcaatgaaacaaatggagatataaataaaagatcgttttattcaaaataacaattaatgttgcagtaatatgctgatgaatcataaaatgatatcaaatcaaaataatagtgtctgaatgattgaaaagcattgatgaagattactattttaccaaaaatgtcccactatcatcatgaaatgatggagtccactcgaacattgcatctagacacaatgaacttggaccacaatcaattcttatacatcaacgaacgcaatgaacttggaccgcaatcaattctttatacatcgacgaatccaaggcgcttaaacccaactcaagttttcacgacgataatgaacctcacccaccctttacctttacgcgttaccttaactctttttatagattgacaaggtgaggtcacttcaagcaccaagaatcaacaaaactctattgttcttccatctcccaccaattcacacacaattgcttagcttagcttagcttagcttagcttagcttttgcttattcaa

SEQ ID NO: 10092 - DNA, 1177 bp, Eucalyptus grandis
  Intron number 1 from transcript Egrandis_v1_0.049784m (loc us Egrandis_v1_0.049784m.g) derived from phytozome v7.0 (c hr-ID scaffold_187; pos 35795 to 36971)
acggacctcaatttgaggtttttatccaaatccatcaggtaaccttgacttgatgtaattaagacaatgtattctattcttaacgaaaccaattcaaacatatcacgccatcttcttcccaatttagtcgcatgtggtgagaacaaggttaactgagttcaacttcggtgaataaaaaatcatcatgcgattactctgttttttagatgtcgacctgttagagaatcgacaaaagacgagcatttttagcaaactgacaacatacttaatgagaaattataatcgagaattgaaatataatgatatactaaaagttcttgaaatgcgatttgatcatccaatttggtcctcgtagttataaattttcttaatggatagcattgatgaagtcggtggtaataagatagccctttaaattattgaataattgatttcatgaaatgatggtgatctataagtaagtgttattcatccacttctttaaattttacaagtcattttcacaatacataagcaatttctatagttatatgtagggcaaaaatgagattctcaattcctgtaagcaagatcaaattcatcagtttcatactccattgcccaatattcgaagctacttgtatgaaaactgtagttcatttgcaactggattattctcaaattatgtaaatatttccataatatataataagtataactcaaaactaaaatagctgtgaaaaacctataagcttctaacgcttttctcaccttccccattgaagccatattcttaagaaagaagaggtattggatataataagccataagaatcatcacgatgttcattatgcaataacatttggtgcagttaaagattgatcgaaaataaatttgtatatttactagaaattctatatgttgaaatagataaaacaaattaaatacaatcgcaaattagtaattagtcttaaagtagaatagagtaatgcattcttcgatatcgaagccaatctatggttgtaagagaaaatttggagatacttgagcaacgagatttgccaatcaaaccttgtacgatttatcttttgaatcttttagaattcatgaatttaatctcaaatgtgtgtaagaacttatggacatttattgcgtatatgcaggatccaaccagaaagaattggtggctcaccgttgg

SEQ ID NO: 10093 - DNA, 579 bp, Eucalyptus grandis
  Intron number 7 from transcript Egrandis_v1_0.038761m (loc us Egrandis_v1_0.038761m.g) derived from phytozome v7.0 (c hr-ID scaffold_5; pos 10766225 to 10766803 reverse strand)
cgactaccattaaatctgctgtaaaaggtaccctgtaatagagttcaatttgatttgctagctggtgttctataaatagctgttttttttcctgttgattcttttttttttgccttacctgctctcctaaagtcttgaactgtcaattgattgtcaacattttctccctgattgtttatattcccatcaatcctatcattcagctgctctgcaaatttatgtaactaggggatgcttcgtactcaccaaactgatattttaacacaatgtgattcggagctttaaggacacaaattcatgggatgtttacgatcatggaacgatttccacaaattctggaacttgcagatgcaagagtcagttcgttgttttcatatgtagctaacactttcttcattgaccaaatatagacagatcacaattgaaaatcatctctgttatttatatcatcttctccttttctgttaaggagtgagattcccttctcttcatgttttgcatgatctacgataattacctgattctgcaattgtgatgcactgaaacatgtattcattagtactctttcagaagaaaaaa

SEQ ID NO: 10094 - DNA, 3153 bp, Eucalyptus grandis
  Intron number 4 from transcript Egrandis_v1_0.006020m (loc us Egrandis_v1_0.006020m.g) derived from phytozome v7.0 (c hr-ID scaffold_9; pos 406774 to 409926 reverse strand)
gtgattattagttaattgctttgtatattagtgatgtaattagtgtaattagatagagaattgcatgtagtatttattggatccttcttgggatttttcccgtcccttatcgggtgtttattaagcgattcgggcctaggtggtatttttatgaattaattattaattttcgaaattaattatttaattatttatttcctggaaattcaattgggatggccagtgaccaggattttatgctgatgatcatggcgcagtccgtttatttaattgagctttatattgtgctagcgaatttattgtatttatttatgtaattttcgaaattaataaattaattatttatttttcggaaattaagattttgatggccgacgactgaaatctcgtgctgatcgtcgtggcgcagtccgtttattcatttgagctccacgttgtatggaattgaataaattgtgatattttagggatttaccctaaattgattgaaattgattgagattgaattgttgattggtaaatggccaagtatgttattcagcggttataatgcttgttgagttgatttaattatttgattgagaaattgttgggtattggttatcacctgaaaggaaatttgtgggctcggtgaatcggaatatcacctggagaatgcacgtgtattcagtggttgattatgtcatcttggcgaagaagttgccttagagaatgctcgtaaattgttgaaagttgatcatgcctgtgtggcaataagtgatcatgcctgtgtgtggcgatagttgatcatgcctgtgtggcgataagtgatcatgcctgtgtgtggcgatagttgatcatgcctgtgtggcaataagtgatcatgccggtgtgtggcgatagttgatcatgcctgtgtggcgtagattgtgcctacgtggctgtatttctgtgtatcgattatcgaaagtggtcgagtgggatcgtaaagccattgagtatcgaaagtggtcgagtgggaccgtaaagccattgagtatcgaaagttgtcgagtgggactgtaaagccgttaaatattgaatgttgtcgagtggtggactgtgtcttccacctttgcttaagatgtgatctgaggatcgtagttcgtaattgacgattgagatggaataatcgaattgacctagaatggtccgtctgacatgtaatcgactaggtcgattgatcattgttttgatctgatgttgtgaattggttgattgaatgaaagtgaccatgagtggttttgttgacatgtaatcgactaagtcgattagatcgatgcttcgatctatgatgtgatcgcttgtgtgcctatttgatctgtactaatatgcaggtggaatctgaggctaaggtaagtcctttgactcatgttgtgcataggcagccctaaggtgtattagtttactaatcgggtcttaggaggtagaacttgctgagacgtggtctcaatggttattgaataaccatttcaggacctggatgaggagtctaaggagcatgaatctgacgaggagatccttgttgaggaacccgaagaggaatacgtggaggaggaccccgagtatgacatcgagtacgacccggatgaggaccgaaatcctatcctgtcttgtcagaccttgtttacttgtaaaaagttgtcgttgtgaattttcagtgagaaaaatgtatggcctgcttttctatcccattgctttattgtttggggatttataactgcttctgcatgtgctataaagaatgaaagggtcggcgatacatagtcctgggatatcgcattttaaaatcgaccaagagtaagggatgtgtgcgtgcctgagggtcggggcgtgacacatagtgttgaagctacttgattggacagagatgtgtatccatcctaatgcttttacaaaaatgagaaggttgagattgctcatcttgcacaatgtgcaggattctttccaaggtcctttatgttttcctaagtggcttagatggtttgaatggcctggatatactcgccagattactgaatattcctctggttcaatgaaattagtgagaattgatttaagcaaagccagttccacggtaatgcctaaacaatttaaggtgagcatttacctaaatagaccttttcattgtctacttcatttgtatgtgtatatgtgtattacatgtgctagaacacgaaacgaagtggttttacctagtttttgaagccacttctctcttctttttttcttttttttatccctttcaaaatgaccctaattactcgcataggaaatatgtttacgtgcagcaaaattggcatttaaaaattaagtgaaacagctttattagaaactcatacacaatacaaagaagttttataaacaaatgaggtagaaaaagaattttcaaggtttgaatgctttatgctgtaaaacaaggcattcttaaatgcttaaatcagtttgtgaagagcagcatttctaagtagacgaaattaaatatatattagaaactttgcctgtaatgcgtgtgcatttagaaataaattgatatacaagatccacacggtataccactaatttcttaattgaaagtcaaagctaggttttgagttgaatatatggactttttttcttcaaaatgatttaaaaagttcgtttcattgtctttaaatggcttaaaaaaagtttcttaatttttggaaaaaattcattgtgatagaatatatatttttgacataaagctattctatatagtctaagatgttcatttcagtgctcaccacgtgacattcactttacttctacaattggcacatggcataacatgtggcttaaacttgttagtggtctgcctttacatggttgccacgtggcgcttcattttatttttctgattgccacatggcatgcttttaccacgtggcccacttctgaccaatatccattagtttttttgtgtcatttctaaattcattctcttaccacatatatgtatagatttattattattagtaaagtttctaagtgtttacttatttctcaatgcaacgcgcaattctcagcaaattagttcatagtaattttgactgagatgtttgttctgccatatttgcaggacttccaacaattgaagtacattaatttcagtta

SEQ ID NO: 10095 - DNA, 2533 bp, Eucalyptus grandis
  Intron number 2 from transcript Egrandis_v1_0.007730m (loc us Egrandis_v1_0.007730m.g) derived from phytozome v7.0 (c hr-ID scaffold_10; pos 11684589 to 11687121)
gacaagctgtggtcagtacgtttcttttacgagtcacgtcgtattaatttcaactaatatccattttatatgattgaaccaatcactgtgtggttcaggcagtgccactattcgacatggttagtgatattctgtgtcttttactggtcgtttcaattagagcatgttgtccccccaaggacagtacccgtctaggtgtaaaaacccatgttcgtgcacgttcaaaacagcagaaaaaggggtaggcaagacatgacatgaaggtccaagtctaaaatggtcacaaaaggctgcaagtgcaaattggaccagaattggatgagtttgacatagggcaacccccacctcccctaagattctctatggccacatgttgtccctcctcatcaaatttattctgaaccttaaaaaggggagacgagaaggggatataagaagtattttaatgtcatccgataaaattttattttttatagagattttaatttataattataatagcttagaacagctgtaagaaggtattttaatgtcatccgataaaattttattttttatagagattttaatttataattataatagcttagaacagctgtaagaaggtattttaatgtcatccgataaaagtttattttttatagagattttaattcataattataatagcttagaacagctgtaggaatttttttttttttgtcttactttacttcttctctaactttcactcttagatttttatttgacaggacgtgagaatcgaaaccacacttaaaattaaatcatctatatcctaacccctcctaagaaggtgagaattcgaattcccacctttccttccatattgaaagggttcgtcttcctttcatgttataatgtagtctctgaagtatacctcaatgattacctatagagaattattatcaaattttaagatgtttttcggctttaagacacttcgtgtgagctgcgatgtcttagatgataaacccatataagctaacaagttaacacgtgtaaatttaataaaacacaaaagcttagactcccatgacaatttatagtgatgaacatgatgatgtggtcatgcggtggaggctggccatgtgagtgggaatggggaccgcgaaggcccaatgattttattgcgacgtgggggatagattggactgatgatgatgtcctttccttgccacttgccctctcaggatttctccaagcctttgaatgatttttttcagatccgcatgtcggggccgtccccatcaaaagaactcgcccttggttttttctattgcatttttcgcaaaatcaaattctgtcgaaaataaataattcgagatatttttttcaatataattatttatatcgtcaatgatgaaaatattatttatttattatttttatataagatacaagtaatcatttttatataaatgtttttcaaatcatttatctttcacttcaagctaagtttaattatcaaaatatagtatgtagatcaaaacagtatgggcaattcttccggttattgtgatcatccaacattcgtgtataataacataccccataattgcaaccacgtaggaggtgtttatagttttgtttttttctttttggttcagctagtctacaatataatagttcatatagcctcagcttaatttaagacctatcttgatgagatctttggatgcaagtggagaaaagtcttttatattccatatgctcttgccagccttgttcgtgcccgtcttctttgtgcgtttttctttcttttttcgagtattttaagttggtgaaatcttggctggtgtggtaggtggtcggaatgaatcaatctgtgttttattgcgcgatggcacatggtgcacatgaaccgttcagcggcccaaaaaataaatatgatgtcgcctatgggatagtcgaagtagtatacactaataatgcacagaggacaaagatattaactccagcttctgtttagtatctttcttcggatacatcaataagagaagagcatctccccttttcataacttggatgcctagatagttgttctggacattccacttttggtcctcgtacttgcacggttatttgatttgtgcacttgaacttttggtttgtccgatcaaatccttaaactgttctgggaattccacttttggtcctcaaacttgcatggttatttgatttgagtacttgaacttctggtttgtctgataaaatccttaaactgtcatacttttctgatcaactccatccaagttccaatccggtttgttggacccgattcgtgtgttggaacaggcaagatgtttgacatggagagttcaaatgcaatgtcagtgttaagaaaccgctgtactcaaatttggattttgatctttcgagcccttaggtctctcaaaactattcctacttttcaaattctgtgcaattacattagattacatacaggcaatacttgtttcaatgagttcgtgtgttttatgtttaattcattaaaaaaaccttctctataggc

SEQ ID NO: 10096 - DNA, 4092 bp, Eucalyptus grandis
  Intron number 2 from transcript Egrandis_v1_0.025947m (loc us Egrandis_v1_0.025947m.g) derived from phytozome v7.0 (c hr-ID scaffold_5; pos 4906706 to 4910797 reverse strand)
agttctctacctcaaggtacttcagttagtgaaccaaattactgtcgttgctataattactagctgtttcttgatttgccgtcttcggtcatgactagattgggtgcgaaaaagcgaaacgaaaggaatgaaaaccctataattcttatcaagttttctggtaggaattagtgcctttctattcattttaattttagtacagatgacgctgtcattaataataatgtttctaggtagtctacgactttatataaataggcaggttactatcatctcatcttttttcttttttcggccctataatcagatctttatcttctgtggttacagtcttgtacggcaattactacatagtcaaatttatttccgtatcttctggcccatgctccctggctgagatctgcataatctccgcggtactacttggagtacgaaatatagaaaacagacatttgtttgcacatggatgaaaaaattatatttgcagatggtatttactgtcaacaccatagtggcctaaattttcattttatgtaactaaatatataactatatgaaaggcgaaagttttcttcgcaagatggcacgtgtaaaagatttctcactgttgggtcaaatgtaattcctcataaaggtagtgtaatagcaaattttaagtgggtatttgtataaacaagttggtcatgttatgctcaacattttctaaaccatactttgtatcaacataactttgatctatatgagtatagtttaacttgtctgacatttccgttatctcaaaaagtatgaatttttgtagcaaaagaattacttcttcattgtcaacttggaaataagatctttatacatatatattctcattttcgagttgcacatataggagctcacatgaaataaaaacttcctactgcaggtactggttaatcaatttgtgaactagttattttattttttcataagacggctatgcatgccttgtgacttgactcatcctaatggatgcacgcgaattgccccatccaccgcattgtgtaacctacccacaaaatggtgggcgtggcttagatgacatcattttttttttttcttttcatctaatggttaccatcaaatacattttggttacactgaccaccatgggaaccaacgttcgttggtgttgtcttggaaagactcgctgacaaagataagcttaatcttgccaagaattctcatactgaaatcatctatggtagaggaagatggtgtatctctttctcaatattgtatgcactgtgagggagtttatcacctcaaatctgccttccttagttcttgatttgtttaagagctatatcttctgaaagtttgggtttatggccactaagtttattatttgttaggattgtttgtatgatctcggcggctcattggactcaatatctgtcattcatatagatagtttatgcattttctcgaaagtgttaagtgaagcagatggggacaacgtatgcatgaaaagaatgctaatcttttttggaaaactaatctgctactaagagcaacagttaggatttcccagttccagtacttaaaacagaaaatctataccgtgcaatgcactcctagttaaaatgatattattctctccttaaagcaaaggcactcgttcttctcttcctcacatttatacacttaccacaagggatatataatatgatgaaccggtgaggaaatattttagacatgtgcttttggtccacttcattggagcttacatttttgaggagatagatcgatgtaacaatttgcagtacaggatcgaatcctgacatttcatctcagctttatcgtatctgttattcatgattttgtgcctattttcctagcttgcagtggttgtaggtttggcgaagttaaatacgcatcatgtgtttcacgtccaaagatcgatatacccacgataagaaataagatataatatatagaatttgttcggtgttcacatattacctgccagtttaagttgttgaaaagaaagggaaaaaaaagacttgtttctaacaataagggtgtaatgtcctttagtgataaattaataaccaggaggaaagagatcatatttaccgtatgattggtaatacgaagaacaatcctatatattgtaccttggcgatctattaaagattacttgaagttatgatctatcatctcattgtttatcttgtgttcgaatgttcaactaaaaaacttatactaataggtgaagagacactgaattaatataaggctcattgaaacctcatagacaagtaacttgagagatagggagcctcacacggtaaataaatttggggtggaactcaactcctataccatattaaaaagtccaatccaaaagtttaaattaataggtggaaggacagtatatgaatataaaatcctaagtaatcattgtgggatgctttaacgtgatgtatatagtaagattgacgatgaaaaactgttggaaattgtgatccattttctagaatttcctagagtttgtaaacttctagaattctctagaattccctagatgaattttctagaagaaagaagaaaatattttctagaagaaagaagaaaagtctagcatgtaagagaagcctagagaagtctagcattcaagagaagactagaatcttctaaggcggtgactcacgcctataaataggcatgtaagtttatcatttgaggtgtgtgagaggtaaactctccaccttgtgtgtgaggtgaaccctccaccatgagaggtcaagatctctattgtacctccatcaaactattttattcaactaatgaaattattttccccatgtcctatatccttcaattatcatatcttgtcccttatccatcctctacaaactataccatacacttgcacacgtcactaaccaaaaactataattaataccaaaaccatgcttccgcagcgcacacatccaatattttttatcaaaaacactcatatttcggccaagttcttgttaagccctgagatatataattgctaatacatgatgccaaatacttcaagactcccaaattttgaaatattagttacctatgtatgtttcttcaaagaagatagaaatcctatctttgatcaaaaactgagtgtactgttctagaggctcttatgtctttggtgaccaaactagctgaagacattcatttaagaatggataagaaaaaaattctcaaattagaattcttttattaccaaagcttttcaaggacctgatgaactctccgtgtttcatctcgatgcccatgcatcaattaccatagcagccgaaaaaaatggatctttgtgacctaattcttgggtggtttccattaattaacgggagccgagattacatagaatttgtctctctataaatgaccacttgcactctttattcaaacttaaattattacggtgatttagtagtaatgaagattaagagaagagaaatcccagttttcaagtcaacctggctgtgctatgcgttaataataaggatggctgaattagtagaaaaagtgctcttaagataaatatatgtatatacactgtaaattgccgctccctaatcatttaaaacttttagagtaacgggtacgcacttaatttttagcatgacagcagaataagatgtcagttcgtttcatcaaactaattctttgccagtcattgagttccccttttccggggttaggttgtgctaaaatttatgaattgctgaaaaaactcgtccttcaattttcttttgctcatctgttgattagatcatcaatcatatctctctagttgactcaccactgagcttgtcagttcaaagaacttcagctgagcatccaagcaagatgtatgaagcaacacgtccatacatatattcttggaaaggaattcttactttgatagcaggtcaaagggtaaatatgtatcagtgtatttgtgcgtatcgttaattgtcatctcgatatgtttcagtaagcatttggcctggtatggctctggtcatttccactaggacacatgcaagtcatataaatgctgatatggcagtggtaattttcagc

SEQ ID NO: 10097 - DNA, 1302 bp, Eucalyptus grandis; identical to SEQ ID NO: 9950
  Intron number 2 from transcript Egrandis_v1_0.025372m (loc us Egrandis_v1_0.020214m.g) derived from phytozome v7.0 (c hr-ID scaffold_6; pos 33954139 to 33955440 reverse strand)

SEQ ID NO: 10098 - DNA, 1619 bp, Eucalyptus grandis
  Intron number 2 from transcript Egrandis_v1_0.024481m (loc us Egrandis_v1_0.022869m.g) derived from phytozome v7.0 (c hr-ID scaffold_10; pos 111905 to 113523 reverse strand)
agcctcttggttcgcaacattcctctggactgcaggtctctgtctagtcatggaatttctctcttatgctgttttgcctgagctcttgggaaatgtgcgattcacgggttttttttagttttctttgtaaagggttttttcttgcccccttttactggtgattgcttgcagggcggaagaactcaggattcccttcgagagatttggacttgttagggatatttatctgccaagggactactatacagggtaggtagttgtcctggttgaaatacttatttttctgattgcaagcttctgttatttgtatctttaatttatactgcttgtgcttgctgttaacgggttggacctggaacacttagactgaacaagaacaaaaacaatagcagaatggaactcttaggtacatgatggggaagtttatggtctgtaactgcgtctgtatcctgttagatccaatgatttgtctcatcataagtaaaaaaatttaagtgaagcagtatctggttcaatcagattgcgtatctcaaacatataaaagtgataatgccaatgtataatgaacttttatgtgccaaacatgctactacccagctaccataacctttttggcatttgaaagattattaatagtcttctcttcacactttaaaatgtagacttatagatgtagcgcgatggttcagactctgcatttgaatggtacatttgcgcaaactatcgcgcttaaatgtttagatctctgtctaatcaaggcaatatagagctctaagatgaccccctttttttttggggcgagccatgctacgtgttggcacatagcaatattctcatggcttttctgtttctctcatagttcccactttgactggtttatcagggtttgttagtttgaagttaaaacagggtgaaagcctacatttaacggaggatctgtcattgcctttcaaattcgttcttgacggctttagaagatgatttcaaacggagaacgttcctagtgaagagaaatagaattatactaccagtagagtttggaagcagaagaatactcttgacccattgaagactgcaagaagagagaatttaagtgtgggaagttttgatttctttgtcatatgaggaatgttcctaacgaagagaaacatataattacactatcgatagaagtttggcagaagaagatcattgttgaccaattgaagactcacggagacaatttaagtatgggcagcattgattcaagcgcatcttagttttacaactctggagatttttgaagtcattttgctcttttgaagtgtcatttcatacatcattcataacaaaagcgcagccaataagcttgggtgtgcgagctgctttatgcaagcgtatccatttatctgttggtagttcgaaatggatatttattagattcaaaagacacatgcactcagatgacagcattgaggtaacaattagtacactcgttttagtaggtgcttgaataatctgtgctaagtcgaacgttctaaacatatcttgtccaaatcttactgcttctttgttttttttttttttttttttcctttttaataggcaacctcgaggatttgcttttgtggagtttgtgg

SEQ ID NO: 10099 - DNA, 958 bp, Eucalyptus grandis
  Intron number 3 from transcript Egrandis_v1_0.001841m (loc us Egrandis_v1_0.001841m.g) derived from phytozome v7.0 (c hr-ID scaffold_4; pos 33342550 to 33343507)
cagctggaaaaggacatagctgggtcaaaaagaaggttagaggcaaaaacaccatttatgcctgtacacccctcctcaagtttctctgtctaaaagtatcttgggatgttcattctcttagcaaagttttcatccaacttcaactaccacatactgcagattcaatggaaaagaaaggagttttaaagttttgctggtgaaaactgaatgccggattgtggaattatgatcaacaatctggtagaactttgacttcgtagcttttcaaaagcaggaagcacgttaaaatccttgatcatgtagatgcagaacatcaaatgacgctaaaaacatgttaccacttctttactgttgtattataactcacctgcagatttaatcgtctataatcagacattgcagataccatgtaaccaagaatgggttaaagtaggtttggcactgacagaatggaagcctttattcaggaagctagtaaattttagatttttttgggtaatactgtatttgtcaatatcattggaagtatgctaaacattctaacctgttcataaacataactctcaataagatctgtctgggtttatatcaaaactatcgcctccatatgtttctaaatccgaaactggtgtcaaagacccgaagtatacttttactcagaattatgagctctatatgtgatgatattcttcccaattttttcttctatctgatcagaaaatagtgatttgtctggaaattttccatattcaaattggccgctgcatcttttctcctaatagtgtttgatattgacctgcattaatttcgttttccatgtatgcatcaatgtggatagtcttttaagattttcttttttttttttgcttcagcaattgctttggacctcctgatctttttttccttttggctttattacttaggaagtaggaacgatttacagtcatcatcagaaaac

SEQ ID NO: 10100 - DNA, 3544 bp, Eucalyptus grandis
  Intron number 2 from transcript Egrandis_v1_0.027412m (loc us Egrandis_v1_0.027412m.g) derived from phytozome v7.0 (c hr-ID scaffold_4; pos 33499717 to 33503260 reverse strand)
ctcgtccagggcgagtaacaaggtggcaaggcgatgttgacacctaaattttggcgacccgcttagtcatttattgcattaaaaaattaagggttaattttattccggaaaaaatagttaattgcatagcatatagttttaggtgcattcgtttcttaatttgcatttacattgggtcggtgacaaatgggtttgatttagtagttctaagctttaatttggcaggtcggactaagcccacgaagcaagtaaattggcctgagcccgttttcttttaatgacaagaatgacctaaattgagatttgaaataatattacggtggatttttggaatttaagaaaatcgggttgcaatcttatctttaggtgataaaatcaggagatgtggaaaataaaagaaaagtgatattgcgtgcgaaaaagaaatcttcgcggatgctgatttgaaaaggaaaataaaaccctaatcttcagcctataaaaatgttttcgcgtagggtttcaaaaaaggccatgcacaatagaatacagggccattgagagagatacacattgagaagagagagtagaaaaggtttttctggaggtctttcacggcccgaagtcggcggaagcacggagaagaagaaaccaaaagaaaaagaggaagtgaagctttgagacaccattagcgagtggagatttgtagagattaaaatatgtgaatcggagacattatctctcggcagttctcagatctcggaagtcacttctccaagaacaacatccacaataccggtctttgcccactccgcagctttctggtgtctcatccggcgcatcctgcttctaccgcattgattccagcaacaccacagcgattctcgacggcctgccgcacttccgctaagatgacgcggccgctgcttctcttgacccgttgccggtcctgctaaaacaacaacgctgctgccgtgagaccacacgtcgatctgttctccagctgttgcctcgttgatgccgtccctgccttgctgatctgcttcggaccgagaaggccctgcactgttcgatccaatcacgagccaccgccatgatcccatgaatcgcttcagattcatgcttccaatttgggttttctttttatttattttctcttgactacccactaaccaggaagaaaactttcaggggaggctacacatattgatacacggccacaagagaattgagagaaaaatcccttgtgcgctatccgaatctactgctgtccgttatccgctgcccaatacgtgcctgatatccttaacgtccagcagctttcagtcgcagcttctagtgagcggctcgagatggttcccggcgtttcaagccctctcgatttcccgattctttcacagatttcctgattctttcacagatttcccggcggacctaacccaacgcaagctgttgcccttcatcaccgcctctgctcgtggctacctccggtgcccgtggtgccgatcttttccatgatctgacgaggtgctgctgtcttgatccagtcccgcgactatgttcctgacgtaagcccgacgccgagtagagctgctccccgtcgttgtgcggatgagcgacactgtcctttgacccggcatcgagacgggttgctatttcatcgatctctgtcccggcgttcttgcatgaccaaaccggttttgccacagagctatctttcccgacgtgggttataataagttatattttcttttcttttctttgaacgattcgctcgagttttgttgcagctattctacttgatatccacggaccgtaagggtaggcaagtcaaaaatttgactttggagctatgaaagtcaaagttgaatattcaaagaatattgtcaccagagtgaccagaattcgatcaaaaagccgagggatttctatagttactgtgtgcattcagcaagcccgacgtccaccaagtcaagccgaaacgccggcggtaaggagattcgagggtctggggtctaattatttaatgctatatattgcgttgctccttgccgcgcatttgttttgattttgctgtcaaccgagcaccacaccatgaattaccagctcgagcatcccaagctgagatgccttgccggcttgctctgaagcatggttggtcatcacaagctggccgcctttcgaagaccaaatttggaagcaaatatttggaataggtaaaaattttggctattttaatttctgaaaattttgtttccttatttgatatattcattggtgcacatgatggaaattctcgatatgccatgatattcgcaacttgagttccgcaacgtgcatatgattgatggtccgatttcatgctcgaaatacgacccgcaatcgcacggaaaaatcaccaatccgatctcacgctcgagatacgattcgtgatttttatttaaaaattgaccgatccgatctcatgcgcgagatacgattcgtcaatttatttccaaaattaaatggacatggatgatatcttgcttgatttgttgcagtgctattctcgatgcctttatttgattgctcccgtaagggaaaaaacccaaaaaaaataattgagttaggttaaatgcatgttaggatgttactggttttaatgttatgttgcatgtttaggataggaaatttatttcgaatttcttaaataaaaagaccaaaaacattaatttaggatatcatattttcttctcattaatttaaattgcacgtttaattatttggcaattttaaatttcgaatttcataaaaaatttagaattagggcatttttgcacgtcattacatattatgatagattgcatacttattaggaaaataaaaatcatgtgcatgttttatagaattaggttcatactatgcacgtcatttagtgatttttgctaggcccatttaattagaaattacatgtcattagaattaggtcatttagttaatattgcattgcatattgcatgattttcattaattaagtgaaaacaaaacaaaaattgcgtgttaattagaaaccatatctagggttgttgatgtggattttaatttaacattgcagatgttttcgttgctttgaggtaagtcctgcaatttatttattgctttacttgggtgttaaattggtggtttgcgcacctgcatgaacacctcacatgttagggaattagtttaaaatcaattcaagctgcctgcaaaacctttttttttaaataagagaaatggtaccgaaagggcgttagagaaatctagcgtaatcaagtccccgtacccatagtctctggttcgtagaagtaaagtaattctcctgttattttacttgggtttctaatcgacccaccaaaaatagattagtggcgactcctagttaaaattcaattgcatgttaacaattcaaacctaagtcgcgaattggtatgggcttgggagagcccgagttaagtctaggcttaacaatccattagccaaaccataggtggttcacccctcgaaaaaatgggtcgcgacaggcgaggcggggtggtgcattctt

SEQ ID NO: 10101 - DNA, 791 bp, Eucalyptus grandis
  Intron number 16 from transcript Egrandis_v1_0.049525m (lo cus Egrandis_v1_0.049525m.g) derived from phytozome v7.0 ( chr-ID scaffold_2; pos 24163478 to 24164268)
tggcatccaaaggagcggaatctctgcttgagtgggtaagtatgagtagaattactttcatatggatcttttaaagttgtttaagctcatttttattttggccaatggatttagaggatccggaacccttctcaagtttctttcaatgagtataagaatttgcaaatgaattttcaaatgtgtcatgcgtatgggcatgtgcaccctgcatgtcgtatatatgcggtattgcatatgtatctttatgcttgttatgtgtaggtatggatttgtgcatatttgtttgtatgaggggcatgtgagatgccactgtgtacttatcgttctctgatgataaagacaagctgtatctgtgacaacgttacagccactgcacttataaagttttctaattaactgattctgcttcattaaaaagatctactccataccttaatggatgtgctgaactatggatatatagtttctttgacagaaccccacatttaggatttagattaataatgtatatcagaaaaatcagcaagaacattttattcaaaagggtgcagataatccgcttcaatctgcagattaactgaaaaaaaatgggcgtgtttcttgggaaaacaactgttgggaagggattggttcctccattgtcttcaccttttggtgaaaagaatatgagccaatccacttcttttcttctttggtaacagtcctctggttttcaatcatgcactttagtttgcttactttgctgcatttttttgcttttaaggcctggcaactgtacgagaacgagtgcc

SEQ ID NO: 10102 - DNA, 7400 bp, Eucalyptus grandis
  Intron number 2 from transcript Egrandis_v1_0.008296m (loc us Egrandis_v1_0.008296m.g) derived from phytozome v7.0 (c hr-ID scaffold_5; pos 67857944 to 67865343)
ttcaactggagagaacttggattcttcttctgcaggtactataagtaataatttaattcagtctttttaaggtgctaactttttaaacttctccgttgtatctcatattttatcttttcatccttatttcattgccttctggcctaaatttgtctgcattgtcaactgataattcaggtcaaggatcaagtgatgggaaaaaggctttgtatcactgtaattattgcaacaaagacattacggggagaatccgtatcaagtgtgctatgtgccctgattttgacctgtgtatcgaatgcttctcggttggggctgaggtggtgcctcataaaagcggccacccatacagagtcatggttagtaatagcatcattaaatttgatcttctttggaccatctgctaacatcaaactttacattttttagtatctatagacattagcgggaagagagacaggacgttctctaattctcatgagtgctcacgtgtcaattattgtttccaaacagtaggcatgtttttctagcatcaatctcaagaaatctactgcgatgtaatttctcatctgtcacctttctggacttctggacgtagtgtgaaactgatcaagttgttatctagaaactaggatcatccttctttgaactacagtactctctaatgatgcttccagaatgtctgaaatctgctgttatgcaatggtgacaatgcaaaaggtttgatttttttattcatgcaatgtaattttgttatggtcttctcatttcaacaggacaacttgtcatttcctctgatctgccctgactggaatgcaggtgatgagatattgcttcttgaggttgtctctgcctatttcgaatcctcgatttattttgtttttgtctttttccttgttttggtatgtatattttggtatgggaagcagatggttattgtggaatgcatttcagggaattgaaatgtatgggttagggaactgggctgaagttgctgagcatgttgagacaaagagcaaagaactgtgcattgatcattactatgaagtgtatatgaactctccagtctttcctcttcctgtaagagatcctaattgaaatgaattctgtttctgttttttgcattaacgtggcatgagattttaacattatatcttggataggatatgtctcatgtcgttgggaaaaatcgcaaagaacttcttgcaatggctaaaggacatggcgaggacaagaaaggtgcttgatgatgttttgttctttccctgtgaatttttgtaaaagcttatgtgacaatattggaaacaacaatctatcatgaaccctaactaatgacctcaaagatggaaagatgtcactattgactgatgtgcctgtactagttactattgtatataccaaaaagataaaaccaaactttttagtgagaagctcatgcattaatgattttgtttggatagaactcttcattggtctgtcttatgtattggtattcttatcatttgaattgagcaaaatttataagtgacaaatactctttttgcgattctgtttgaataaatctctttcttctggttcatatcaagtattgatcttcacattcatttgttaagcaactgcttcattatggtcctcaaatttgaagttcttggtttatgcttattgggtgggtttattttcacataaggtatgtttgtgattagtgcaggaccttccgttggtgatcgtaatcatgttcagtcaatttcaaaagaaccttctcaaggaaaatttgcatgaaatcatgcaggatgcggatcagatacataatgatcattccctccccagtccccaccactcatttttctgggcatttcttcaaagaagacaacaaagactgttttccattgacctacatgtgcatgccggcgttaggtttgcatgtagttatgtatgtctgactgtgctctatacaaaactggataagggtacgttcctacattcatttgttctgagagagagacagagagagagagagagagcattacatgtttgttttctttttccattcagagccagacagaagctgatttagtcaaagaaatatctccaccagcatgcttgggttgtatgaattggtgagcaaagttaaagagagccgccaaaggcagggacgtgccggcgttgccactcatgactcatgatcggcgtctgtcctgtgttattcaatttgctgtaccacccgctccttagcctccttttctgcagcactttctattcatttttattgtacgacgatatctccaaattaagtttcggaagactaactctagtgaaggtaaaggtagttttggaacaatgagaggtaaaaccaaaaaactaaaaaatttatgataatagttttgaaaaagaaaaaaagtagtttcagcatttaactaaatgttgaaagcccaaagctagtccttatcgacattgaactttcagctttctcaagaccagaattcgattgccaaacaccccagtatttcctcaaagggctttgaaggctaaaagcccattgggaaagttgaatcaaacgtaccaatcttttaccatatctatttccataaagtcaatcattacaatttaagaatgaggcttcgcccttagagaggctcatggcccatggttgtcccgttgtcgatgttggacgcctcatctccgatgaatggtagagtcaatggtttgaccatcctcacacgaaatctatctcggcatcattatgtctctatagatatatatgtacctcttactctttgtacgtgcgtttttgtatttatacctatatatttgtgtatatactattaattaaacaatttaacatggctgctttaatctcaaaattgcaaaaaagaaaaagaaaaaaaaagaaccatggaaagccgatacacatatttaaagtattatatgaccgcacataaccataaacataactatcatgatcaagattattgacaagtaattaatgaattgccttttgaatttgaattccaaatcattgtcagagattccataagtctctcgtatttccttttacggtaatttaaattatattcatggaaatgaacaatttaagtagctgagctcttatagctaaatttatttaaatgttgatctttggaacactccaattatatattaaaacacaaggtagacttcattgcatatcagttatgtgttttttatgtgtatattcacatattaaaggaaacaggcgtccttatcatgataagatttgcatttaccttatgcttgacatctcacttcattaaccaaagtttcacacatcaattcatcgtgcatcaaccatgtttgttaaagtgtctactcaaaagggtgttgaaacatcatatgctgcttgtttgcaaagcttatatgagcatgaatgtggttttaagagaaattgttcaattagtcctaagcatattgtgtggttgttaattcaatcctaatttttttttttaattttgccaattcaattctagacctttatgtgaaactcaatataatctttttaaccaattttagtagaaaattattcacatgactatgtacccataggacagtcaacaaaccaccacgtcaatgatttcaaaagaaaagttgatcaaaagtactatattgaaattttgtgcaaaattttataactaaattgacaaaattgaaaagtttgggactaaattaatatcggcacaataagtttaggactgattgaaatttttttccaaaattttcacgttgaactttttaacaatacattttaatgaattcccttcttcttttttttaatataggcatcgcccttaacctagtaatctagaaatctttacctatgctaatataaaaataatgctgttattacttgcggtgctgaatattcctatatacccttcccaccagtcctatcagtatggtataaaataagactagtgtatcaaatctccaagagccactcttcataggcaacttacttataaggtcagtgcagtccatgatctattaaagttcaagagaatccatgtatttgacccttctatagtaacatggtaatcgaatttagaaaacgcaaccatcgaatagtattggtagagttaaaatctttggtgggataagtgaatgcaaatgtgtggacaaattaccagattttattatctaaatctgcacaagttatttcgacaatcaaaatctgaaatttaatgttatgcattttcgtaaattgagtgatggccccatcaacgcctattaattggtgcgacttcaatgatcaaatccacacatttcgatttatccttctcaaatgtccctctctcttttctttagatacgagtccattctaattcttctgagtttagtgtattttattgaagctcaaggcaagcttgtcaaaccctagcttcatcatcttttggcttaccacaacaaattcaatcatcaaaactacagttcgaaggtatgaaatctcaaaaaacttctctactatagcttccttatttttttttctttcagggttcatcatatgtgtccatggcttaattactccataccaagccaattatttatttcaaaatatctttttattatctttttttccctttacaatcggtcttaatattttcttttttccagattaatggctaaggaggaacgtgtcaactcaaaaaggttttttgaattcccacccaaaaatgaacaaatatatatttacacacgcacgcatgcacatatattagtgaatttatggggacttgaaatattgtttttgatatgcttttaaagattcgaggtccacagttttacataaaaatcatgtaagaatttgaaatcgattatttatttaatactgtgcgcctcaaatctttaagaaattatgaaaaccaacgctttgggaaactccaaataccttgatattgcttgaaattcgaaaatgatttttacggaaaaatttaaaattgactttgggtttggtttattctatccatctaaggttcttcctttaagaggtgcgtctgctctatgtaaaatggtccgaacagtatttctagattagttcaagctacattattaacataacataatgaatattcaagtgagttatattggtttgatattcatttgaaaccttacaatatgtattcctcaatcttgaaatatcagaaacttaaagacagcaatgaatttcgggtatagaagagataaacaccttaaataatgaaaatagtgatattttactaccatactcccagatttttgcataagcattttattatatttgatgggaaattgttgcaactcgctaataattactggtttttgccctaaattcgttaataactaagggaaaatggaaaaacaaaatcgatgccaaaaatctgataatttagtatattaaaatactgttgtttcggttctatttaaaattttctttattaacaaacaaatgtatgacttttgtaaagcgaagcaatttttcatttccatacacaaaaataatttgatcctaattttttctatattgattttcagtttcctattgttcccaaaagagatagatccatgatcaaattttgcagagaagaaggttacacaagctgcatactcaatgtttatctctttttttagccaaactaattttttttttattgctaataattaatccaataatcttgtagcacttaattttgttcttcttcaatcatttattctttttttttccctttctatgtttctactttttgggtcaaattccttttgatctttgaaaaaattaaactttgcaatttcgtgttgggccatcaattgaagtcagccctaatctctcaagcccacctccaggcaactcgtgctgagaacccaaatcccatttccatacaaagcaaacccaaatccaatctcacctgcaatttcttgctgacatttcgtgtgtgaattcatgcacaaatcagtgctgtactaaccaaaaaaaaaaaatccaattttgcggaaatcccagtctcaatccatgaaaaaaaaagtagagagggaagaatccaagttgcccaagaaattgcagtaattcccagtatctggaatcgaaattcctgcccagttcttgattttcttggcgccactagggttttgggtcccgctgtcagcgttccgggttcttgctggtttcttgaaatcgcgcgctctgcacggaagggaaggcggggaaggcgaattcctttgctgggcaggcggtttcgcgagctcattcagcttcggactgacatgggtcgctctcgtggcaacttccactcgaatgacgaggacccgactcagaggtttgagctcgttgtcttaaatttcgttgctcgagttcttttcttgcttgcggtggtttcttgaggattaatcttagctacattgaaggttttgggagtgttttgaggctgggattgctgttgctcgtgctttcggagcgtttaatgttggcttaggctggtgaatagcctgaaaatttctcactttaagaccagaaagttctcgtacttagtttattctcttctcaagacgctatgagttagtaagttagcgctgctaatccttttgtctagttgggaacttacgagaggatcaagttatggtcacgggaccatggagcattgtctcgttctttggggattggggtggggtggctctatcacttctccaagtaaaatgtgcacttgcttgctttgcaactttatgagcttttctttactttcgtttgatagtaagagattagccagaattgtagggttgaaacgtggtggaactcatgggagtttttaatttcttctctctactttcagtgaattcgaatcgaaagtaaaaactagctagccctctgcattttcatgagtttgttgattgtagttagttcggtagtcttgcttctgttactggttcaactgaaaattgatatttcatgttagatgtgattcattaaggatacttgtcatcagcttgtaggttcaactttctttgagctattgagtcatctaacttcatactttctttgaactttctcaaatagttgattccgcacaattcagtgtcctcatttcttgtgacaatcaatacttttggaaaaacattactttttttttaatgatcttggtatgtctcaccaaaaaagggtcttcaataattgcctgtttttggccttgcagatcgaggagaaagaagaatgcttcaactggagagaacttggattcttcttctgcaggtactataagtaataatttaattcagtctttttaaggtgctaactgtttaaacttctccgttgtatcttatattttatcttttcatccttatttcattgtcttctggcctaaatttgtctgcattgtcaactgataattcaggtcaaggatcaagtg

SEQ ID NO: 10103 - DNA, 7843 bp, Eucalyptus grandis
  Intron number 4 from transcript Egrandis_v1_0.005506m (loc us Egrandis_v1_0.005506m.g) derived from phytozome v7.0 (c hr-ID scaffold_250; pos 32244 to 40086)
tctgaggcaaacacaaatcgaattgtgggaacatagtaagtgcaatatttgcttaacgaagcatttatcagacctttcattgactatacattttctgcgaagaaagatgcatctgggttgctctatggagtcccttgtggtaattaaagaacctgaccccattgattgatatctagtggctatatgtctccggagtatgccttggagggagtcatctccgtaaagtcggatgtgtttagcttcggagtgctgcttctggagataataagcggcaagaagaatactggcttttatcagacggattcaatggatcttcttggacatgtaagaagctttgcgcctgtacaaaaagagaatcatctttgtacttatatgtttatccttttttgctcctctagtttggctatttaattaggatcaggtgccgtttttgtgtcactctaaggtagctctccctaagcattgtcttgacaacatgagcacatagccgtctcttgcttttcaggcttggcaactgtggcaagaagacagagctctctgcttggtggattcggtgttagaacatcacaactctgatggcacactgatgagacatattaacgtggctcttctgtgtgttcaagagatcgcagctgataggccaactatgtcagaagtgttgacgatgctcacgaatgagctgttaactctaccttctccagagcagccagctttctcacatataaggactcagaaaatcccagaaccgcctctttacagacctgatctcgaatcagtgaatgatgttactgtctctctaatggaagctcgatagcttttcagacatgagattcagcttgtttcgtgtgattctttgctgaaaggctgcacttgtgatttcctagtgcaaaagaaaccagatttgagctttattgtgtaatttagttatggtggaatttgtctccatcaagaaacaggaagctcgatatgagctcaattgagttatggttgacatgatcactgtaaaaataatggagctggagctttctattttagtcgttctgttaagatcttttgcatcctgaaattcaattttggccgttcagccccttcatgtcttcgtaatgttgcaatggagtgctccatagtactgtgagcacgttgtaacccgatgtatacagacgcattttacttgagacgccacaactagcaagaacctcaataaatcagccctgatagacagtactgacttatagcaggaaagctatgttattttcattgaaactgtgaataaatctcttccaatctgcgaatctcaactgtctaagtgcaagatcgttgcaactatacatgtgattgaaacaactaagaattttgatgaaaggagccttcgaaaattattgactctctagtaaagtaactttcaaagcgtgttggaagaaatgtccttttcgtttgatgagtattccatgtcagacagatctcttcatcgaagaagccaggctcttgaggcagaggcaatgccgtgtcgcttcctcaacagcagaactactgttggtgttggcatattaggcctctcgtctggactgtgttgcgcacgtagcagagccgcacggattgatcttagcgctttggatttgttaccaaatttgacggatcgattagttcacaagatttcgtctccttggacggtctccatgcctggaggggacaaaaaccaaaaccagataattgcgacgctgaaagaattgcgggatttgtataacagaacgtttgttcggattatgattgcatacgtggccaagtaggttaagctgtcgatagaggatggttgaatttcctgtttctcctcccacctacaatctctagcaccaatacactacagataaatacaagaacattgtggaaaagaaaatggtccattcaaactgatagctctaattactactaaaatgtgagagaacaagtgcctcccacgatctgagaatagaagctcattggaagaagagagaagagtaggacaggaagcggagcgtgcagaagtgacctccacataaaatgtataacgaagtaatagcacgtcacgcatcagttctgatcctgaagttaaattcagaagattgatagggacaaaatggattggcaagagaagaaacatcaacgattccaactgggtaattaatgcataagcattaagcagcacactgcactatgagtccgcgaccgaacgacgtgcatcagctgcagcggcttctctaggggcaagattcgatcctgcgggggcagagtccacatgatttctagtcgtgtccgatggccactccggctcatttgacgaattttactgtttaatgatataaattaactaaaaacccgatgaaggcaataattttgtgctgtgtatactgttgctgctcttcccataaatacaaatcactatgattagatcacataaatttaatatctgatttattttctttattttctttattttattgtttgattacttatctttcgcaataattgatattagagttaggcttaattgagttgaagcaaatcgataaccgcagaaaaaactgaaaaaggaaagttgatcatgtactttgtttaaatatacacacggaaatagattttgtattgaagccggtaagaaatcggcagaattgaaaaatccgacttgaagactttgactcggtcaacgatgggtcagagaaagattcagaattattccgtgtagaagttggttcgcgttcctagggctgccctagtagggcagaggcatatatatcatcatatgtactagaagccgagcgttgcttagctggttctgaaatcttgcagcgctgttcacgagtacttggcaatgagtttctccattggttacgttcgtgtaattacactaagagcttttatgtgctaaaatcgattaaatttttatgataagaatttatgtatcatgagatggaaagattatttagcgaagaattgtgaggctaaacactacaggagttattcaacgtaatcggattttgaaaaatactaagagtgtttgattgagttgagtgtggctgtaatctccattgcattgcttgatctatagtaaaattctttgctcttctcctcttggacatagttaactaagatcgaaccacgtaaatctcttgtctgatttattttatttattctgtctattttcctgttcgattgcttacctttcacaatacatgctatcacaccttaaaccttagtagaaaatgagaatgatgcggccatccttccatccaaagaacacagtctctaaccacccaaatccaacccccaaaagtcctctttgatatcactctcactctataagttgcttaccaagggacctgaaaagattagaaagaagatgagtgagcaatcacagttcaatgaggagtaaatatcttcttagcaaatcagtcctccatattacacatttaaaacttatatcatgactcatttatgtcaatccaaaatacaacaacttacaacaatgacatgatttatatactacttcgaacttggtatatcaataacaaaatttcttgttcatccataatattaaaacaaatatcactggtttagttcaataatcaaactcatcatatctcatgtcaatagttcattctattttctaaacttgtatcccattatatcttaaggccttagaggtagctcatgagactcatgatatcatgtagcacttagcccttgagtagtataagactctagaggtggctctcacaaaattacattattgtgtagcacataatcattttccaatacatatcaataacacaagattttaaaaatggctcccacgaagttatgttatcgtgtaacatttagccctttatcagtccacatcacaattgccttcgcaaaccaaaacataacttttcacaaatcaattctcctcataaaatcaatttagaatccatattataattcggtttcacataccgaattatatcaactttcataaattatatgcaagtcaacgcaattctttctggaaaaggtttagcaaacccaaactatatcctcttttctaactccattcattggacataatatacacacacatttctcacaccatttaggaatcaatttcataatgcagtaacattttgaaagatctttctcattgaatgtttcccaaattatcaaagaacccattttataaatcagttctcattgtaatatacacatttaaactttcacaacaccttccattaaaaaattctcaaccattctcaaatgaataaaatgtagtaaatgcctgatccattacttttaccttttagccaaatcgcaatacttttcaattcaaaaatgagattgtatcactcatctggaaatgcctacgataaaaaaacaaggcttactcgaatcaacgaatttgcatatgcgagaaataatatcaaaaccaagtaaaatgctaaatcaactatgacttggctaaactaaacttaaatgctaacaaaataactcttatgtgtcaacaagtcgcttatccgaaatgattattcgaatttcaacgcaacgcagaatacgtgaaaccttaaaatcttgctataaaaaaaccgtcactttaaatcaatgaccgtcaagtctcacgactctacaatgccacaatccaccattcccaagaaattctatagcttgataacttaaaaatcggattttgaggctcgagtttcacaaaacttcgaatatatcacctaatttcgagaactactttagttggacgaatggaggcacgagtacttaccaagcgttgcattagacgaggtacttgcggtgagtactcttctttcttccctctctcttttttctctattttctctcccttgctccttgcgcgagccctcggttaaaaagagaggagccgaacgtcccttctcctcttttttatctcttctttgactttcagatcttccttttattttatcttacttacttttctttcttttgacttggtcaaaagcctttgcggggcgtttcattcaaaaggctaaatgacattcgtcggacgtaacttcgtggggtgtatccattgatttgtcgctgcaagacatcgggtgccaagactttgagagctgccaagtctctgcacgtctccctcctatcatgtatcacttcccttggaattgttaccagaagaaaattccactctgtttcttcggcaattccgtgaaccattatcagcccaaacttcaaccagttcaatggattcaccctgcaacacgaatatgccgacaatgaaactggccctcctgttcttgttgatgttctcgtgccattgcattcgattctctgttgttgttgctgctgcaacgagcacgatttcagtgggacagagtctcacaggctcagacactctagtatcttctggtggggtatttgagttgggtttcttttccccaggaaattcttctgatacgtacctcggaatatggtacaagaagattgaggaaagaaccgttgtctgggtgggtaaccgagaccaacctctcaccatctccgctcctgctcttgccatagacggagccaatcttgtgatccagggtggcaggacaacctaccacctgagcaataattccgtcagtggcaacgtcagcgctacgctgttggattcgggaaattttgtattgaggggggagagctcggaggcaatactgtggcagagttttgatgatccttcggatacttttctgcccggaatgaagcttggatacagcagagagactaaaaaggtatgggcgctgacgtcgtggaagaatgccatggaccctagccctggggatttctccctgagattagattccgaaagcttggatgagtttgttattcttaaaggtagtgagaaatattgggctagtgggccttggaatagagattcacaaacattttcacttgttcctgagatgagattaaactatattttcaattacagcttcattaacaatcccaatgaggtttatttcacatattcgatttatagttcgtcaaatgtaagtacaggattagttatagacctgtctgggcagattaaacaacgcatctggctagagagttcgaaggcttggaatctgttttggtctcaaccacgggacccatgtgatgtctacaagttctgtggttcattcagcagatgcagcgacaatactttttcttcttgtgcctgcttggatggatttaggccctcggatcaggagaagtggcaacaggacgatacatctggagggtgtgtgaggaaaaaactgttgcagtgtgagcaaatgggatatgaaaatggtggtgacggattcctcaagatgaaccatgtgacatttccactgtattacaatgcatccgaaaaattatcctctaaagcatgtaaatcagcctgctcaggtgattgttcttgcactgcatatgcttataatggcagtggcactggcaggtgtttgctgtggtatgaagacctcttaaatctgaggcagctctctgaagatgatcctaacagtaatacaatatacatcaaacttgccgcatctgagctccaaaactcccgaggtagaggcattattctaatcctgttgatatattatgttagtttcctgcagaagacttctactttcttcaaatgcatgttttttcagggattaacaaaacactgaagatagccctagcttctgcttttcctcttgttgctctcttcctaaccacctacatgggttgccaatggaaaaagaaaaggaagggcaagtcttctgatctttttttctcctttttattgttttggggtctctcaaggtataaaaaacataatgtggatgtggctttgatgaacaggtaaaatgggaccgactcaggacattttgctgtttgatgtggataagagcattgctgctaggacaaatgaaacttctgaaaaaggaattggaaatgaaaagattacaaaggatgcttggttgcctttgtttagcttttcaagtgtaaatgcagcgacgcaaaacttctcgaattcgaacaagctaggagaaggaggttttggaccagtttacaaggtagtagcttttattgtcttgcaaattttatttggaagtggcaagtttgcattagtaaaggctatgcaagtaaaatctctccagggtaaattactgagcggaaaacgcgtagcagtgaagaggctttccaagaagtctgctcaagggatgttagagttgagaaacgaaacaatgctagtagccaagctacaacacaagaaccttgttagactcctgggctgctgcttagagcgagatgaaaagattctaatctacgaatacatgtccaacaaaagcttagattcattcctgttcggtgagctgttttgcaccccctcaggaatatgtgtcatcacttagtttaactttttatgttaattcattcaaaataatgtcttagtaatatcaaattggaacagatcaagcaaaacggcatctcctaaattgggaaacacgtgcacacattgttgaaggaattgctcaagggcttatctatcttcatcaacactccagattgcgcatcgtccacagagacctcaaggctagcaacattctgttggatagtgacatgaatcccaagatatccgatttcggcctagcaaagatgtttggtggaaatgagtctgaggcaaacacaaatcgaattgtgggaacatagtaagtgccatatttatctaagcatttatgagacctgtcatttgactatacatgtttttgcaaagaaaggtgcttttgggggtgctctatgaaatctcgtggtaattatagaacctgaccccaattgattgatatttagtggctac

SEQ ID NO: 10104 - DNA, 849 bp, Eucalyptus grandis
  Intron number 2 from transcript Egrandis_v1_0.002504m (loc us Egrandis_v1_0.002504m.g) derived from phytozome v7.0 (c hr-ID scaffold_9; pos 35049373 to 35050221)
cagatattctgcattacacttgacttcattggtatgttaatattgctctctccccaccaatcgtctgttgttaccactttgtgcagtaatcaagcttctggctagcctgggaacaagagtttctttgagttgtttgttaatttattccgaaatgcaaccatttttctgcataattaatgagaaagacaaggaaagaaaaagttgatttagattgagaagataaagtggtataaggagattttagccagggacttgcacaaactttagtcaaagacattgtagtatatcttatagagcaccttcaagtttaaatgttaccgaagggagcgcccctcatgtgcagttggaaaccatacaacaatgactaagcaggtgcctgaagctatcagatgctactgccaatctcaggacacactgggagtgacagataggatgattcttcacattgtaaagtggaaatccatatagaaaataaccatcagtggttttcctatccttaaacagctttggcctcaatgaagaactgccctatgattatccccatctgtgcaattacctgacatgagagcttgaacttgaaggaagcaaatctcagatttgataaatctagtcgagtactataagttttgaaggttgagggcgtaggttgagcgatcaatacatttttgggttttctgtaagcagctattagaatcagctgttattctaagttgaagtttggttatcaaattggacgctttatattttcatctgagtttgtttggcagccgagaaattttattctgttggtagattctaatagtatgattgagttcttacagtttattttcttgcagccaattcaaaatt

SEQ ID NO: 10105 - DNA, 5325 bp, Eucalyptus grandis
  Intron number 1 from transcript Egrandis_v1_0.033408m (loc us Egrandis_v1_0.033398m.g) derived from phytozome v7.0 (c hr-ID scaffold_6; pos 7778492 to 7783816)
ttcttttgatccaccaagctgaatctgattatgtaaaacatgctgtaaatcaaattttttttttttttctttgattgctacttttcagccatctttgaagatccgttctcatagaatgtacttctattgagcttccgtcaatgccctaattgaattctccttttgttaggtgattcagttgaacacagctgaggaaccagctcctccgcctccgcatataggtatgaacacaatcacattttcattcggccttgaaactagaactccggagtacctgtttattttaagcttagtttctcatgcacatttcaagattgcgatggagcttgcgatgctcggtgccaactgtcgtcgcggccgcacctgtgcaagagggcatgcgggacttgttgcgctcgctgcgactgcgtgccaccaggaacttccggcaactacgacgcctgcccttgctatgccaacatgactacccacggaggcaggcacaaatgcccctagaagggtttcattttccacttagcttcacctgcgaaaaatgtttctattcagttaatgtattgccgagtttgtgacgtccaatccataaataaactttcggagtaatggttattaatattgatggatcatgggattggccccgtaatcttgtaattttagccttcctcacttgagtaccatgtttggtggctttgagttttcttaaacaataaaattttacatgtcaacaaaactttatggagtaggttggtctggatatgctctagcattggatccaatcatgaagttgagcaccaaatcgctccagcttgttgttgaatcaaatcgttattatctaagcatgctatacttaatcaaattctatcgcgttttacaatatataggcgtcataatgcaatttttttttcttttttggttgcaattgattatgtttgcttttctataaggtaggagggtggagagagttgaccggtattagcaaccttttttgagcattcatcaagaaatgttcgatttgagttataatgaccccatattatcttgtagccgctcactaaaatattgatagttgggaagtctttctttgtgatcatgaagtatgttgctgttaaataagacaatacaaactatgtagatgattagttgcaatgtaaattgaacttgtgatcttgtcctcctataattgatttatgtcggttgttccacaataattctaacttctaacccatattttgtcctacaaactccatgagagctaaatgaagtgctaggactacttgagcccgatccacgccgcgacgcatctaaggattgtcaaccgacaccgtccgatggggcaactgagacatccggttataatggcctaactcaagctaagcatgcccgcaccagatccggacctctaaaatccagcgtagtttggtgtgaaactgcatggggtgcgaactagacaagttgcaaagcaaagacgaaaggtggaagcggaaaaaagcaaggtccgacggtgttgtttattgaggacgttcatgcgtatggggatagagacctttcatccgtccaacgtggctgacatgtcagatttcttgatcttctctcctcttttgagaaattgttaggaggctttgcaagcctaacagtctttgagtgagaataatgatttattatgagtcacaaattcttaaagaagtatgtcttacaataatttataattatttatgatttgatttttttaagaatagactgttattctcataatacactaaaaattctcacacaatcatttctcaatattaggtagagctctgaggttagtcactatgtcaaaatctcaatccattcatcgggtgacatgtgtcctcgaacccactgcgctagaacccctctcctctctcaccgtcttgcctctctcttccctatctttcttctcttcttttgtcctttcttgccttctttttccctttcgttccgatagggacgacaacagacatttgtcccctttcaccaccaccactacctcgccattgtttaagtccaccaccttgtcgcgattttagtcctccattgttgaacacaagctccaccagcaaacttgggcctcagatttctgatcaaaggtcgagtgagccctagatttgtgatctagagctcagctagacctcaaatctaagttgattcaaggttgactaaagtcggcttaggcaacgaaccaggcgtgtcgacggggtgtggggtctcgaccttttggctgacgtgggatgagttggacatgaggtggaggtgttggaggttagagaaggagcacgcgaagatggaggcatgcgagaaggagcattcatcgagaaatgttcaatatttgaactacccatctgtatcttgagtcatttcttatccacccaatgacagtgacggaatttttagtgtgtttagtatttacccacctaatatgaactttctcaacacaaataaattgttcgataacaaaaaagaagttttttcggacgaagttgttttggtttgattagtttatccagccagggatgcaagactctcatagttgcaaggtgatggtggctggggtagtaaaggattattttgagtcaaagtacaagaagcctgtcgcattcacattggacatcgatccattcaaccacttagctcgatccgatatgatacattggcggctttcgcgagttttctggtttggcgtttgctggaaaactaaaagaggaacagctgtgcatgccgagtttcccagctggcagtgggagatgatgatgctctctgctctcatctggtgcaggttcgaatctgaggctcagagccccgatgctttttccttcacctcatatcgatcgaaagtacgcaaaaccatgcaactttatgtgccaaactaaactcaccttcgaacaaaatgtcgccattttatcagctcaggacttaaaaaacacacaagagaaagccaaacagcccacgcatgcatgcagctgtgcagatgaccaccttacgcgcttcttcgaaagtccggtcggccgcaaataattcactcgggctacttgctaccaaccctagatggtcatcttaatgagaggtctgcgagacgaactttacttgcttaggataagcctatatatatagcccgccctctgccctcccccttcattgtatcaaacatcatccgaccaaagtcattaggactgcatcattgacattcaattataactccgaaaaagtcttgaccatggcgatccacaggcttttaattgcttccgtcttaatctccgtccttcttcaacttgccgaagctgaccagatggtaccaactcgttctgcttttggttattcgtatattctgctcgtttgattttcttctctcctgtatcacactacctcatgtccattcaaactaaccaaaacgatccttttgtgtccttgacagacgcagggagttggaaatgcaggagacaactcgaagcttctgaaaatgggtacagaactatatatgaagagtcatttctctttttcgctcttaaatttttaataatcatctagtaacgcgaggtcttcatcttcattgtgtagactgtagtggagcgtgtgccgccaggtgtcagctgtcgtcgaggcctcgcctttgccaaagggcttgtgggacgtgctgctcccgctgcaactgtgttcctccgggcacctccggcaacctcgacgtctgtccgtgctacgccaacatgaccacgcgcgacaacaagcacaagtgcccatgagatgctcgacggcctttgttttctttctcatggtcggacaccaatcggtcaagcttgtgcaattgctgctaattattgtcgggacgttgtttttgctgttgtactttcatggagctggtcaggaagtggtttgcaaatgcaaattcacaatgcattcagcaatttatctgttgtatctatcgtgaataaagtttttccatttatttttcgtttcattgcgcttattactcttttgtcggaccaatataagttgcacctaaattgacggttcatattcatttttaacatattctagagttaccaaagaataaatcctgattgataactgatggttggatcggtgaaaacaaagtttgaggcctgaattttactcgaattgataaaattagacctttaccggtgctgcaagcttactgagacattgaaactgattgtccactttgtccatcggaaatgcagaaccccaaaaaccaagtggccgggataggaaccaagccgaatcatatatatggtcctaaccatgtatgtaagcccaaattcacttaaagacaaagtaaagctcataagttcacagccgataaatagaaagggttagcttgattgacttgacaaatctcaatcgttaataatgttatcatcttcataaatcaacgattgagattcactgatgcatcaaaataagcacttacaagatataatatccacgcctattatctatgtcatgtattacatattatgaatgttcttatttgctttccaaataataccaatttgcttatggagattaatttgaataggtaaaagatcctcctatgccgagaaggataaaaatgatattccgacaatggtaatagatggattcggagctcggatgttggggacaaaggacacaacattagcaaggaagcatgagttaatctccttctcaagtagcccatcaccatatgatgctgtgtccaaagtacccatctctttgatgataagtgctgtgctgaaatgattctgtgattttgcacctatctcaccattgtcttcattttacagattggaccttaattatgattttccagcccatgatccgatggatgatgaccatcaggatcgattcatcagtctctttgagttcaaatatgtttatcttctgcttaaatgttaagcataaggaatatccctacgcagcatccacctactcatcactttccgctttccacgtattgggtgaattttaagaagtaacctaactctctccctctcttcttccatgctcgatctataaattgtgctcgtttcttgaattccaaacacgccacactacacttgaagctaatggcgttgtcgaggctttgtacggcgttgctgctcctctctcttcttttgatccaccaagctgaatctgattatatggtaaaacatactgtaaatgatctttttttgctttaaatgctacttttcaacgatctttgaagatctgttctcattcaatgtacttctatcgagcttccattaatgccctaatcaaattctccttttgttaggtgattcagttgaacacagctgaggcaccacctcc

SEQ ID NO: 10106 - DNA, 4435 bp, Eucalyptus grandis
  Intron number 2 from transcript Egrandis_v1_0.021558m (loc us Egrandis_v1_0.021558m.g) derived from phytozome v7.0 (c hr-ID scaffold_1; pos 24662957 to 24667391)
agatactggaactggcttcccactgaagaatccaggttggtgaatatctccaattctacttgcacagctgataatggttttaattgctaactatgtcactaaattagcatctgggcaaaatgtatactgcgggaatgatgtggccatgacgtgtttatattagtgcgccaacttatgaggcttataaagtggatagatttttttttctttgaagaatcgatcaaattgtagaatgaactcctttctgcatcataaaacttggaaatttcgagaagtgcttagatatgggtgcatctggatttgcgcaaaaggaattgacatctggtgaattatccctgtttagggtaagatataattacgaaatcacactaaagctgaaagactcaaatagaatctgattatacgcataactttcccttttaaggttgttaatttccgttggtggagatttattctaaatataagattcatagaagggtggattgaagaatgataaagcagggagtaatctgctatgacatcaaatgttattggtagtgaaattggtgaatacaaccaagcaaggccatggtactcgccccccagcccaccaaacaccaccactgatgccgccacgaaaaattggcatggcttctgcttgattttcgttctgaagaacatctcaacaatgcgagacaagtatagcataatcgcaataatgaaggtgtgaaaggaacataaactggaaagtttatgagtcatattttaacataaatgaagttatctttaatacactatagttttatagttctatgatttaaagctcttgtgtattggttatgacttcgcacatacatcgtttcctgcccccttgagctttaaggcctgcatccagctctgctggtttgctgagtacatttaagatccttctcactgatttccttcaaactttgaagatgatacttttctgaaagtctggttctcaggttttcagaggatgcctttcctccgttgatacttagtaatgtgctcctggcgagataataggcatttctactgccttattgttctgtctattggaaggtttctgtgctcttttcctggggggcgaaagttgtgcttatgtttgaagagcaataaaactctgtaaagcttgtagtcttgtgaacaagggcgaacctgggagatttgatctgatgggacaatagtaaatgatgaaagatactttaacgtggtaattatggaaaaagtgtcggcagaactgccaaattctcgagatacatctaaattttaattgaatcacttgatatttatctcacaggaggaatatgttacagtgattagtgacctctattacttgtatatgtttggtcagtgaaatttcatggcatgcaattaatgtcattattaagaacatctttatcactataagttgtcaaaaagtaatgatccatgaggatgggattctgtattgttaaaagaattcaataatatatgaaccaaagagttccaagcatgtatatgggaggatatagatctttccttatttatcactgactgttttggactatgtacccagtgaagccttgatagaatagtgaaaaaaaagaaaaaaagaagaagaatataattgaagaatcattattatgggcccttgctggatatctaaaggaagaatagtgctagagcaattaataatttactaatatgtgcaaattaatgtaacaaagattaaattgtttatttgaattagttaatgatgtggtcaggcctgatgcatagctagatgaaattagtactgtagcaatcaagaatatcaacaaaaattcattcactgattattgtcgaaaatatacataggaatgattaaatgcttagcccgatcattcacaatgcctgtatttatataatttttttactattttacttttctaattattcctgcccccccccccccccccccccaaaaaaataaaataaaataaaataaagatatcacacaggctcctaaactcatgaaaattgaatagtctgaaagatgcaatgggttgagctactccttaaatggatttgataatcatttaaaacttttgcatggaagagttgcatataaaattttatctaatgaaccttttttaattgggcttttagcttttagctcaaattttgtgctagtgctttttctccttcagtctcgtaaagataaattaatttgactcaactctttgagtgaaacccaccggtgatttgttctcaattatacttacatgtaatagtattgacaaaaattaccagccatacaagagtttttggtaatcctctagtactgctagcacaaaaattgagccagttgagattgttgtgatttatattctgtgatagcacctttcttgctcgtatttgtcttccgattttgttgagaagttgcttagaagattttatcctttttggcttgagctgccaaaaggatcggattgcattgtttctgctttacaaagcatatagtggcatgatgatgtctcaaaaagtttatgcccatagctggagaaagaacaaggaagtctttggatggaatttgaacaatagccattcacacatctgccatcttaatgcacttaaataaagggagttgtggactgcatgaagcaggaaaaatttatataggatcattcttatcactgcttcttgcttgaagtacaataaatgcagtcatagactgcatgaaggagagaaattcatatagtcatgcttgctatggctctaagaaatggttgctttcagatgaattttgtcacttcttgaatggttttgtgaatttttctgaaacttttgtaagtgtcatgctttcacattaagccaagacaacatatttgttgttaattctccaagtttaaaagcttttgccccttttctttagatgattccctctgagatgctgaaattctgaaattggatcttttcgtaatagaaattcatcagtcattcttctatgttggtgaggagcagcttctatctccaataggagctgattagttttgatctctggcctcttcctttgctgaattaacaattagaactatgatttgcaacatttgggtgattacttattggatattgtctctatagtccttccccatccaattgacggcccactacagagcttccagagaatttattttatccagaagctattctttgaatgataaaagggagtcatgtatatggttgagagaaaacttgcgcttcatttaggaagaaaggaggtaaggaaaatgagaggtgggagaggagaatggtaaaaatgtgaacattctgttagggagtaagtaatttaaatttttaatataattttctctatgctctgtaattttccctcgcctcacctcttcccaaacaaaacctttgaattgtttgaaaaccatatgattcaaacttcgaattaatcacctctctctgtggaaaatcaagtgtcactgaattttgcctaatcagcctaattcaggctttagagctttaggcatcaagaatttggatgaagtactgtactattgatggaattttggcatctatggacatggacgagttgatttaatcattagttcatttcgaatctttccaactcagagctagctttttaagattgttgctttggcacttgtttccaatctgataaacttctaatggagagagactgggactcaagttaattccactttacattttatgggaaagaaactactaagctgaagcaaatttcattgtctgagtcaagcccattatctgatgttgaggttgtctgcatggtactttttacagtttcagccgtctgtacttttctcctagaagtaacagtgtgtaggatcttgtcaatgtccctacattgaaggccttcctttctgagtgaatttccttatgctctttctttatcaaattactttagttcatagagagttcgttttttttggttaacaaactcaatttgccaccaatatttcatcattcagctgttttatgtgtgcttcgtcttacagagttgtggaaggaacttgtttgcattgacatgtaggtgatgaagatattaaatatgatagcaacagtagcaaaaatttccatctgtgggttcctttactgaaagttgtgtttactgcatgttgaaacctagttcggttaatttgttttccagggatttggcatgggttggagtattgacaaaccatctcgcatcccccacgccaccctgaagaaaatgaataagtagaaggaaaagaaagaggttaatagtagttgtatttgtgttctagttgagaacttattgaagtgcatgtgctctagtcacagtgtttagttacgctcattttgctttcattttgcaatattagatgtctttcttatctgacagcttattgtatcgtgctttcattgctagattccacgaagttgcctatttgcagcagat

SEQ ID NO: 10107 - DNA, 4819 bp, Eucalyptus grandis
  Intron number 1 from transcript Egrandis_v1_0.008447m (loc us Egrandis_v1_0.008267m.g) derived from phytozome v7.0 (c hr-ID scaffold_1; pos 8327950 to 8332768 reverse strand)
tattgatttcggattgtcgatattcttcaagccaggtaagatcttcaatttgctatttaatgcgcctcccctcccccggatgtagggccgttctcaattggaaagtagcattttttttttttcatatgccattgggagatctacatgagtaatgtagtatatgtttagcaataaacagcatctctgtcaatttttcgaaatagtcttggcagttaagaagaatacttcttccttgatttcattggatgaaaaaataatacttggaagattcttaccgacttctaggaagtcaagctcctcgaattgttggtctgatagctgtgtcgtcacgtgccaaatgatccgctattgtgcttttcgagatgattttatgtcgcaattgcaaatcttctgacaaatagctatgttatattttaaagtactacatgtctttcacaaagtgtggaaaactacagggatgctctcgatttggtatgttagagtgaagttggattgtatgggaatcccataggaatgtctttgatacggaaaagaatgaaaattctgatatgttcttgctgtggaggtttcagaatgaattggcatttcccttgccccatgaccttcgtggaacctagaaaccatactcggaaccactttggaacttgtcaattcctccacaagtagagtggtatctttttccctttggatctttatatcaataagtaaagtgtttatgcatttaatgtctgtcaacctcttaaacagaagttaatcactggattgagtatgtgttttttgttgattacaagaggatagaaccaataaaacaaattcagtcaaaagaataaacacgataacagcagaggtaaaactacagcaggattaacacacttgtatgatgtttgtccaattccaccttcgtaacattcatatctctaattctacttgtgtagtaattcagatagcataatgtcggatgttaatttagatatttggtagttgatactataatcatggtgattaaatgcacgtgcacacatttaagtgtagtaatcatattttaatgggtgtacattgggtacagagtaagtatgacctcaacatatcctacaccaacaatgcctataatatttggagttttgaacctaccctatgctctttattactcgtcctaaagtccaccaaaccatgaacctactaaatgtgtatcgcttatttgcctatacatccctacttggatgacccttcttgatgacattttaaaactgattctttctaggtggatccaattaggattatgtccacatcgtttaaccatgctgacatagaccttaaataccatgttgttaattgattctgtggtagcctatggtgcttggtacataaaaaaacgagattcttaagtgtgatactagccaagacattgacatgataactagatagtcatgtcaactaattagagtggttttgcatagaggatgcacggctcaatgtctagcattttattaggatctggtgggagctttctgattgattgcatatctacttattagtctttaacaacagataatgatcatattgcttatattgaactgattaatttgtttttggtgctttatttgtatcgagtcaaactggctttgatcaatgtctttcaaatggttttagtcatgcagcagagatcaaaagatataagatagaaattttggtgatgtgtaccaagcacctaaagtgtcttatatcaaaatttcaccttttgacccagctctggtgcatgctttgcatgtcaggaatcttcgtatggatagaattaaaaaacttgttgctaattggtggatgttgaatttttggaggagagagagtctccaaacaaatggtttcttgagatgtgaaacctgttaaaagcatgtcctggaaagaaaatggcaataggaaggaaaagaatgacttcttgcctggactttcattgttgagtatatctgatcaatctgaaccgttagactccattataactcctttggctgggccttgggaaaaggaactgtagtttctctcagtgtctctctggcttgaagtaatatagatgatattttttttttttttttggatttcataaaaaataaacatttgatcagatcatgaacttgacgtgactcatgatcccattctaataggattatgtttgaacttttctggataataaaaaaaatctgttttctatatgtcaatcaaacttgtagagatgagtaataaatctaattggatgccgggcttgaactttttcgtccatttgttctacccattccactgatttcttacagactgagctggaggtctctctgctatttctcttaggctatgttggggaaatgagataaaatggggggatgaaagttgggtggaaagaaaaggaaattttaaagtttttgtgtggagaaaaggagggaaattcaaaatttttatatttttctctccaatttttctttcctccgcatatccaaacatagcagtaaaagaaaaggaaatgtctgcttcacttaagctgtgctattcatcaaacttaaattccagcatgtccttcaactttcctaatttaactgctatttataagataatgactcttaaagtaccttaagtttggtgtcatacttgagctgtaccaaactaagttttgtctagagctttccgctgtgaattatctttgaagtatttcatgttggtgtcctatttgcctggtgtaggatgtctgaactgtagaaccctgatatttttatgagtccaaggagcaataactgtattgttccttagccatgctctcttaagaagatgcttcatatgtataccagtgcagctttgtatgtaatattcatttcactttccagcatatggtaggtacccagctagatacctatggttgggtatgccattgagttttattttgccttgttgatgtttaacatctctaccttcctgccaaaagtatgtgctggcatgcactttgcaataaatgttatttatatgggtttgccatgtttgtagtcgttaaatattttcaaaagatagaagagttgcaaatttttctgttacttgactcaaagagtttgcggagaattgtgctgcaagttataactacttgatgtcagaacctaactaggttgactttgatgagataaatgtattgcttgtgtcgcactgtgagtcttacttccttgtggtgggcaattgatcaggagaacttctacttatcagtgaagtttttactatagaatcatccaatttggttttctgggtcaaagagtaccctgaaaataaaaaatttgcttttgcaaaagttgagcattagcatatcgagaatattgatggagaaatgcttcctttgctatgggttaggtacttttgctcatcttttagattgtttctttatctagtcagagaaaacataactttggcataggtctcttctgaagataaatttgctactcctttcatatttgagtttcttcaaaaatttacctgcgacaggtaattgctgtctttgggattgatgcatcgttcttacatagtataaaggttactagagaactccatgtgttggacatgtgactttgcctcttttttttattacctttcccttgataaaatggggtatccgaatcttgcagttagactaatgccctcagataaatgcaagggcctctggtgttatcaaaaccctattgattggctccttgaaatagaagtggagttcttttgcactggttcttatattcactcttaaacctcaaaaaataatcagcataacttcagtcccaactgtcatgttgtatctctagataaatttctaatcctatcttcctcaagctggcttccatcttgcttctgcttgcttttgctagccttttcatctcccagttccttgttactttttttatatagcataacagcgtagatacaattgagttgtgtcatcggttgtatatttaggatatccccgtttctatctgggtttattgacattactttatctggtctgctatcaattatgcattgctgatttactgtggtactggggcaattgcgtcctgtaattttgtttcatttggttttacttttcttgtggtggattctgtgatattctgtttttgactttatgattggttgcattttgtaacgtttttttgcagattacagtgtatagattctaaagtcaacgatataatttctgatagattgacctatttttatgaagtcatcgatattctagagatcttttctgattttctatgatgaagatcatgaaactacccattctccttgcatctagggatattgtcatgcaggaatttcagttcttcaaaactgaacctgccctcagccaaattagttcttttgagtttggttcaatcttcaaagtttttggcttgggagtggattggcgttttcttcatctaattgagtaatagtattttttttttttttttgggtcggagagtaacatcaattaaaatgttgaaaaagttgatctcaccaaaaagtctcctccagtgatttcactctctgcccgatctctatccccattttcttattaattagatttgaatgcaacaacatggtggttaatttaaaaggatatgattgctgaacttgtcaagctatggacaacttagaaagcccttcaattcgaacttgcctagattttcgtgaaccttccatttattgtagttgtttgaaatagacttgttctttattgtagtttgaaatagacttgttctagacattcctaattcctaatattccaggtgagaagttctcagaaatcgttgggagtccttattac

SEQ ID NO: 10108 - DNA, 854 bp, Eucalyptus grandis
  Intron number 2 from transcript Egrandis_v1_0.036615m (loc us Egrandis_v1_0.036615m.g) derived from phytozome v7.0 (c hr-ID scaffold_3; pos 12452120 to 12452973 reverse strand)
cttcagacagtggaaaaaggtaaagatgctctcaacactgttggtcaatgtctcaggtacttcatttgagactttggcgatatatatatttaattcgagttgggtaaaggtaatgcccctcctgtttttactgtaatgttgaagtcaaagctgtatcccagtgagttcttacttgtttatattttaggacgtggtgagctttgcttgataaagattattttggaatgcttttgcttgcttgtcatcatcatatccagtacgcaggagatgatgatgactgaattttctaatgggtcattaatcagatttattgctgtaatgattatcttgacatagattaaagaagattgaaatcttaaaattctggggatacgaaattcttttgtgggttgcaaacaagcatacgccaccaaattctctttccggtgagatgatatttgtagaaaaatagcatcttcatatcctccttcatttatcaattactccttaaacttttcttgcttgaaatgtgttaaggcaaagcttcatttgggaaaagatttctaaaagcttgtgagaagctttgttctgctgagttttcatcaccacagaggatgctcccatgttcccctgaaaatgaaatactcgattctggataaacatttggtgccttagttgagacttaagactgcagtacatgggttaaatccaagtttggagggaatgcatattcatcactcaagcatgtctcaccttatcaacttgtccttatgtaacttcaaatgttatatgatcatctacaaacaataagagtgtcattttgagagagctgaattttttttcttgtagagcgttgactgattccttgcctctcc

SEQ ID NO: 10109 - DNA, 921 bp, Eucalyptus grandis
  Intron number 3 from transcript Egrandis_v1_0.034672m (loc us Egrandis_v1_0.032392m.g) derived from phytozome v7.0 (c hr-ID scaffold_1; pos 155373 to 156293)
gtgcaactgacggcaaaaagactatatctacctcggtatgctctctctctctctctctctctctctctatagcatgcgtgcgcacgcacacagagatgcgtgtgtacacgtgcatgcgatttgatcctttctaggattatttccttggtgcaatctgtaagttcaaccaaatgcaatctctggcatttctctgggtcagaaaagataggctgtgtcgtgcatggaatgtgctactaattatatttatatgtacacctgctccgttttgaccacccagttgagaactgcttaataacgaagttacattggattggaggacttttctaggcatgtaatgtggtttcaagcctttgtcctgggataacgattgtttgttcctctcagtgtgattactcagaagaagcaaatactatttagtttgtcctatcttgtatacttcttttcagatcaccaaatctggttagcaagttgtcataaattgttgggaatacccctgaattggaaagaaacaacacacaacacagcaaaactatttcaagatctaaatgctaatggaagattctttggatgtgattaatcctcttgaaataggagcaaaattctgtctgaggatcatatcataaacacaataaagagtgttgagagcagtaaatgcttgatggtttacgatgatctcttagaagagtactttcaatttccatccgtcaaactcttttttggggaatcaaaaaccagcattccttgagttctatgtgattttggatgacgctttcagttctccaaagagtagttagtagttcaagttacgttatcctttctatctctagtgaggagttgatgactgatattgctgttattgttgctattataatgtataaataggtaggagctaaagatcatcagcgttttcaagcttcttat

SEQ ID NO: 10110 - DNA, 2279 bp, Eucalyptus grandis
  Intron number 6 from transcript Egrandis_v1_0.014231m (loc us Egrandis_v1_0.014231m.g) derived from phytozome v7.0 (c hr-ID scaffold_10; pos 3180811 to 3183089)
tcttggcaacaagtatctctacttgggtacctacagtgagtccccagtcctccatttttttcttccttttttttttctttactacgcttagtcctaaattagtgaatgtatttaactggtccaaactaaagttagctttgactaaattgcatctcacctgttgaggtcaatgtacttccttctaggcatcaattcggatcaccctccacctagaaaatcgattctattttggtctgtatattgatcattcactgtatgtttgaacttcacattaggcaaatttacaggagtaccttcccaatttgtggaaaaatgaacaaattaattaatggcgcaataaattctcggacccttaaggtcaacaaaaaaagggtaaaaatgaaatgatcgctccgtaaattgtactacggttttcactttttttttgccccccaaatttgttaattgtctaccaaatttgaataaagttgagggtttcgtgcattttttttggcctttcgttttacttccttttctattagtggattgtcatcatccatttcgatttcgtagttgggcaattggccattcacttgatgcatcgctatccattgctctccccaagcatgtttaacacattggtctttgtctcttcttctcctcctttttttaaaaaaaaactttttcccataaagttggtgatttctttttgttgacccaaatcccacttggtcaaaattcttcatcgtctttttttccatcattgttttcagcaagtttcatggtcaaggttcactgatttgatcaaaaatattatgttcttgccgttatttgggttattcacattatttcaccaatgttccaagattgactttttaatggaatttaattggtcgaaaaagatatagagtaaacccattttgtttccgacgtaaaatacggtgtatatgtggacacacgcgtatatgtatgatgatttttattctttttcacccgtcttgtacggtgtgcgtatgaaggtttttgtccttgattaaagaaaatttgtcgtgaaaattttatgaaatgaagtggaataatatacacgtggcgtctactctaggactggggtgatgacaggtgcgtttatgtttgtacttagaaaccctagtgagattcatccgagaaaatgtttttctaattttcaaatgtcattttcttgtctgacagaacacaagccggcacttggcctatttgccaagcatgcagcacgtgacttcccactgagatctttttgattctaaataattatatctactttagagatcaacaaatctcttcgaaactccctttctttctccctttttttttttggcataatgacatgcacgagaggtcacgtgagggtgtacccaaatccagatttgaatcactgaatttatgaacatggctatacaaatttatatatgtatgaacataagattctaaaaaactttgatgatttatatagattccgtgtacttccaacagggtattcataagccactattcattttagaatcagagttgggatggatgatgtcatattcctaggtgttgaatttgaaatcgatctctggctgcacatagctttgaatcgactctttggcgacacgagcctcacgaggaatcattttgcgtgtgttcaatagagaagaggactaggttcacatggaataggttcacatcgaaagtcttgtctccgtcctttccgtccttgaaatggctaggttccgaggttggagcaacttgagttcatgtggtgcgcgtgagagcaacaatgggtttttcatttttctccttgcttgtgtgattcacgaatggtagggtttctttctggtatggtcggctcttcagtttggcctcaatgggttttcctctctctcctttattggtccataaaccctagaatcttgatataaagttgtcagcaataattaaattcgcttaccggagattagtcaaatgatccattggcatcaaatctctctctctctctctctctctctctctctctcttaagtgagggatggtcaacaaaatacaaatcttgactgaatggaatacggtgtcacgtgattatatagatcctgtcttacctcctaagtagaagctcaaccacaagttaatttttgttaaattcgatctatgaagtcagcaaaacttacccaattgtttagattcaatgttgattttgtcattttatgtaaactgaaaattttgaattattttgttggtttgtctgcttgatgaagatacacaagaggaggcggcagcagcgt

SEQ ID NO: 10111 - DNA, 7526 bp, Eucalyptus grandis
  Intron number 1 from transcript Egrandis_v1_0.044170m (loc us Egrandis_v1_0.044170m.g) derived from phytozome v7.0 (c hr-ID scaffold_8; pos 54813086 to 54820611 reverse strand)
agggcttcctctctctctgcaccaccaccggcaaggtacctttgctttcactactaatctctaccattgatgtccagctcaacccaatcgaaacttagttgcctttgattgggtaggacgtgattcggtttgactggctattctatgtcaaaactgtagtggctatcgatttattactctttttttcccaagtttagcttgctcaatcgaactgaatggcagcagctcaatgctgcttgggatttcatattttctatcatcacagattgttctgctctgtgcttctgattgtaatactctccatgattaagcctgttttgagtagtgttgggaattactgatccccgaaaaccggattcgacactaaatcgaacccctaaatcaatgcggaagcgaagcccaagaaaacgacacgtatcaccgatcgtaaagcacaccacggattcgagcgtaccttgattgccacagattagacaccgacgccgttagaggaagagaaatcgagccttgttcgatccgaggaggcaaactccttcaattgcttcactgttttgcttttggagaaaacgggagagagggagagagcgttgagagaaaaacagcgtacgtacaatttaccaactgttgtttttctctctctctcctcccttttatacctccctctttccacgggccttattcccgtgggccgggctttctaggcccaactttggcggatgggccttaagcccaaatcaaataaagccttcatctcccactcgcacatggtggtccaaaaccaacatggacggacaggccctactcaggcccatcagagaataatccatcatagactctctcttaacatggtgggccaaacaggattctctttacctctcttcaacattcatactggtgaataatccgtgcgaccagcatactttgagagctcgttactatacatctgttaggaatatatagcagctcataatgggcgtcacactccgagtagatttagtatgcagtaccctagatcgatcgatcacatttatatctctcttaatctcttttaaacaatgatatatattgtattcacaattataattatcacaaagacaattataattggtcgaccagtgaatacaaaactataatgtgattctccaaaatcgatcttcctctttccttcaaactctcaatttcagttcagcttgcttttctagaaatgtcccattagatcgaatcaaacacatgaccattggcaacatcctaagatagcaaacactaaatagaaatcttgagaataagtaagagtcatgaggggacaaaaattgaggaactcttttcctcaagagtctcacacgtcataaaagttgagatcaaactttttgccactcttattggtcgtcttatgcatacgtagtatgaaatacgtattacggtattaactcctttcccatggagcgtatgtcttcacttttcaataccgtacagatgatagttcagacatacctaatgtctaacttgagttcacgtatctactcaatcacaaaattcatcagaactcacatctggcattttagacagataaagtaaaatatgtgggttattttactttcggacatagtaagtattatgtcctcatcttaacactcagttaaggcgacatacgtgttttaagcttgagctctcgattatcacctagataataagcttaaaaacagtctcatctctatttatcacacagtaaatagaggcgattacccgtgtgagtgggctaatcttatatctgtccgacatacttctcaacttaaaataatgcactgagcattaagatgcataaagatcatacaaagattcataggcattaacgatgaaaacacaaattcatcaaattgtgaacacttagggaaattacaatatttagtacatcagtctctacgcaatcctagagatttcacatggccacaaagcacatctctaggtattggctttgttataggatctgcttccattctatgcgtagtatgtactctaagttcacatcttttcgtgcaaccatatccttgacaaaattatacttggtatctatatgtttggtcttgccatgatatttggatctttagtgtatacttttgctgcttgattatcatagttaactaataacaaatctgcagcacttccaataacacctaaatgatccaataatctcttaagccaaacatcttcttatactgctgctgataatgccacgaactcagtttccatcgtggacaaggctatacacttttgtttcttactgctccaacatatggtgccattattcggtaagagaacaaacccagaggtagatttccttttatttaaatctcctccccaatcaatatcagaatagccttagagtcgcagatcctttccataataactcagcgtataatcagcagtcccctttagataccttaatattcttttaacggctttccaatgtgcttgacctggattggattggtaactattcatcattccaactgcaaagcatatgtcgggtgttgtacacatcatagcatacatcaagctcccaacagcactagcataaggaacatattttgtttgttccttctcttgtggagtccttggacacagtctatggctcaatccttcaccttttgcaataggagtgtttatgggtttacaatcccatatcattcatctcaaagttggaagacaactgtctcttgacagtattaaccaactccatattgcttccggcaattagtatatcatcaacatataatgatatgatcacaaattgatccttggatcttttgatatatatacaatgatcctcatctatcattgtaagatcatatgctattatggtattatgaaaacgtatatatcattgtcttgacgactgcttaaggccatatatcgacccccaaagtcgacatacattttcttcttggcctttcactatgaaaccgacaggttgttccatatttatttattcctctaattctccattgaggaaagcagtctttacatccatttgatgtaactcaagatccagactagccactattgccagaattatgcgaatcgaggtaaatctcaatacaggagaaaatgtatcttcataatcaatatcttcctgttgattataccccttcgccacaaggtgagccttatgcctttctatcgagccatcagcctttcgctttattttgagaacccacttgttcccaatgactttgcatccttttggaagatcaaccagttcccagacttggtttgacttcattgactccatttcctcttccattgcattaatccattttttcttactagggcaattaagagcctcattaatatttctcggctcatcctcatcttgcggagcaaccataaaagtttccctttcaatgtcaaaacatcgacggggaatactttggcaacttgttcaccgtatgggagattgtacacttagcacatcattcccaattatgctcccacttggattaggtaatgatgatgtcgtcacatcaggtggttgcaattgagaataaattgaattcaattcatcacatctcatattactcccacttggatgaactccactaatatcattatcttgatccaaggtttcaaataggaagtaatcttcccctatttcgcccctctaaggaaattcatccactaagaatgtgacatcccgtgattcaaaattcagttattctcccactttcctgctcacctatgaacacatatcctttcgagtgttcggattatctcattaaaatactctacttttatctgggactcaatttcccaaacttgtgagaggacatatgagtataggtagcataaccccatggcttaagtaaacttaagtccggtttctacctatccataacttatatggagtggaaataactaatttggaagacacccggttaagtatgaaggcaacagttagcaacgcatcactccaaaaaaagtgatgagtaagttagcatgcgccatcatggacctaaccttttccattagggttctgtttcttctctccgcaacaccattttgttgaggagtatatggaatagacaactgtctttctattcctttttcatcacataattttccgaactcatcagataaatattcttgacctcgatcggatctcaatacttttattttcttgtctaattgattctctaccaggttcataaactttttgaaacaacttatgcttcagatttatgagaaatcaaatagacatatccaaatcaagtagaatcatctataaaagtgatgaaacaaacagccccttgccttcctctcatattcattgaaccacagacgtcagaatggattaaatgcagaggaaattcagctcttttacctttttcaaatggtttcattgttgttttcccttctaggcaatgcttacatatgagcaaatcgactttttcaatattgcccaacaagccctctttggctagtcttttcatatgttgttggcccatatgaccaagtctagcatgccaccatattcacatcattatcatataaagtagaagacgtgaaacaagggaataacatattgacatcaccacagtcaacatttagtacaataaaaccatccagaaagtgaccaaaaatcatagtagtttgtattcaaatacaaatctacacatctattatggaagttcatactaaaaaccaagcttaaccaatgcatcaaaacagacacttaaatttcgacgaatctccggagcatatagaacatcatgtaggaacaagtttcgtccaccacgcatgttcaattggcaggtgtcaatccctttaatttcagctctggagctgtttcccacatagatccacttagttctagttggtatcgtcggaattctacgaaggatcctttatcctttgctacatcgtctgttgctcatgaatctacagtccacaaaggattggattcagctaataatgcagaacttgacacataatcaaagttctcaaatgtacaagaggtgtttacctttttcggctcacaacaattgcgagcatagtgacattcttgttacaattgtaacacctcacccttgacattttcttcacttgatgacgttttcctctcttgtgttggttaactcttgatctcttgcaataaggacttgatcctttgctttcccacatattgaacgaatcaatacgtttgcgcttagagctcaaagccctttctgagctagaatcagcatagcctatgtctattttcggctcaaatgccgatagccagtcctctactagctcaaggtggcgcacagtatcctctagatcttccataatatggtcaagagcttctaatgcttctttgcttttccagcacatattgaatcttcatattcaatatttcacaattgttgccgttcatatcagcaataacgttcttagttgctgaaaatatcgatctgaacacatcagacatacatgcacaaattattaatgcctatcatttatgcatccctatttacatagacccatcatattaataaataatttcaagtaaggtttcagaatcaaaaggtcactatgtttccaattatcctccaaaatcctaacttaaaactatcatcaatataattgtcttatgcaaagtcaattctatgaagctacaaaaacttctaaaactacccataactaattacccacagcaaccagcaataacagaaagcaatatataatataacatctaataaaaacaataatgctttcaattaacacaattaggtagtaatcattacataatatgtccacaaatcacacttaacatatatcagccaatacaactaacaccaagtcagcacacgaactgggaaagatcctcttttgttcaatttcttgatcttttccctcgaaacaatacaataatattcatttacaaaatccatcacaattttcttataggaagcagctccgttgacatctcatatgcgattcaacacatcttgccattcaggtggaagagtgtttatgaaaaatcgcaccatctctgactgtgacataggacgaccattccatatgacctgttgaattttcccgttgacttcaaggatgtgatcaattaagtcaccactctcccatcgatgatcagtcagctcagctatcaacttagacagcctttccttttattcatcggtaactgcgcgaataggtgtgcgcaacctcaggggaggcattgttcctgcaacaaatgcataacaaataagggatcacattataatccatatagacttaattgaaaaagaaacacattcttttctttttcttttttttttttttcgggtcaacggtcaaagtcaacggtcgtcggtcaaccaaggtcaacggtcaacggtcgtcaccagtcaacggtcgtcggcggtcaacggaggtcaacggtcaacggtcgtcggaccggtcgcaccggtcgggccggtgggtccggttcgcgcgaaccaacggcacgtgtcgtgcgcgtgcgcaggatgacgtcacgcagacgtcatccggcacgtgccgcgcgcgtgtcgggtctcgcgcgggtcgggtcgccgtccggccaaccgacgtcatcgctgacgtcatcgatgacgtcagcccagcggttactgaccgttgggtgacgtcatgctgacgtcagcacccgtcggtccatggatcggcgcgtgccggttcgccggccggcggcgcgcacgcgccgattcgccgaccggcgcgtgtaccgcacgtgcctggtgatcgagcgcttccgggcgcgtcgcgcccacgcgcagcgccttccggcggcgcgtgtgggcgcgtgcggtgtctcccggccgcgctcgagacatctccagactcgtctcgacgtcgcctttatcccagtgctttcagaatttgtttttgacattcgaaaactcatgaaaatggccgaagaagtctcgggtgtcgggattttcgcccagttccgtacggccgaaagtttcttcgcgaaaactcaatcaaaaacatcagaattgatcgggaaaaacgtgaaacagggctctgataccaatgttgggaattactgatccccgaaaaccggattcgacactaaatcgaacccctaaatcaatgcggaagcgaagcccaagaaaacgacacgtatcaccgatcgtaaagcacaccacggattcgagcgtaccttgattgccatagattagacaccgacgccgttagaggaagagaaatcgagccttgttcgatccgaggaggcaaactccttcaattgcttcactgttttgcttttggagaaaacgggagagagggagagagcgttgagagaaaaacagcgtacgtacaatttaccaactgttgtttttctctctctctcctcccttttatacctccctctttccacgggccttattcccgtgggccgggctttctaggcccaactttggcggatgggccttaagcccaaatcaaataaagccttcaagtagattagtccatgctgtgattgatggttggatatatgataggta

SEQ ID NO: 10112 - DNA, 587 bp, Eucalyptus grandis
  Intron number 6 from transcript Egrandis_v1_0.007651m (loc us Egrandis_v1_0.006173m.g) derived from phytozome v7.0 (c hr-ID scaffold_5; pos 7568501 to 7569087 reverse strand)
cgactaccattaaatctgctgtaaaaggtaccctgtaatagagttcaatttgatttgctagctggtgttctataaatagcttctttttttcctgttgattctttttttggaggtaatttgccttacctcctctcctaaagtcttgaactgtcaattgattgtcaacattttctccctgattgtttatattcccatcaatcctatcattcagctgctctgcaaatttatgtaaccaggggatgcttcgtactcaccaaactgatattttaacacaatgtgattcggagctttaaggacacaaattcatgggatgtttacgatcatggaacgatttccacaaattctggaacttgcagatgcaagagtcagttcattgtttttatatgtagctaacactttcttcattgaccaaatatagacagatcacaattgaaaatcatctctgttatttatatcatcttctccttttctgttaaggagtgagattcccttctcttcatgttttgcatgatctacgataattacctgattctgcaattgtgatgcactgaaacatgtattcattagtactctttcagaagaaaaaa

SEQ ID NO: 10113 - DNA, 2855 bp, Eucalyptus grandis
  Intron number 3 from transcript Egrandis_v1_0.024506m (loc us Egrandis_v1_0.021756m.g) derived from phytozome v7.0 (c hr-ID scaffold_11; pos 27572670 to 27575524 reverse strand )
caggtttgatttgactctttctttcatttgctttgactaaggtttaaggtgattctgttctttctttgggttgttcggggacatgtggttagtggagtacaacaattggtagattagttagaactgctgctgtttcttaaaattgaagtttggttgctgttgactcaaagcccaaatgagactagtaaagtctaagatggataattgtgcctgtgcgagctactcctttcctttattcgttttgattgatatttccattttatgaggaaaaaggagggtgtttctctatacttcgtacacccacagccaaccctgtaattgcctatgtagggacaaaagaaagcattatcttgagacagagatattacaacctgtctatgaatcgtttcaatctcgttaattctaagctaaataattatgaactatatataggataaacaatccacattcctcccatttttgttggttgtcctattttttgcccatcttattgagcattgttttttttaaagtgatcagagaaacatgtactctcatccgacatgtttttgcttccagatttgtgtaattctgattataactttttatcgtttgcttgcactttgtcttaactaactttagagtgaaatctgtttttgattgtcaactctaacatgagcatgtctttctctaaaaggcttagccagatgagtggtgtatcctatcacaaatatgtagcaatttagaagtctattctgtccgaaaatctgctaaaaggttagccagcctgtagaaagataactatctacctttatgcacctaaatttttcattgagttttaatgctataattttaactaggataaagaaacttaataagaacgcgtgccacttttttagtaattagggcccaaacatttaaattcttgggaaatgctctaatgtgtcaagcgtcacaatggaagaattggagggtgattacttaaatcctccatcgcattcatttgtagggttctccaaattcttgttccaaatcttcattatggcactaatggagacttcaactgtttgtatgtaatacttgatatgtggtttcaatttctttaaagattgaatgcatttcgggtcagttcttcagaacataattatgcttctagacaaattcatttatagcaagtgacagagtgaaagaatgttagtatggaatatcaatctgtcactaatctaccttaccttgacattttctatatgtgtaaacataacttggcattctcgatcgaaatggtcaagggttttggctaagagttaatatttcaggtatatgcaatgcaggagcgttgagaaaattacagaggcttaattaatggagttagtccttagctatattagctatgtattataggactttctctgtttctctgtttactttattgagttgtgtccttttagagtttaagatatgacgggattgatgtgtggctcttaatgactttaacattaggagatcttgaagtcgatcaagggcttagatccttgggaatttagtaacatgcgctaaccttaatttcacggagaggcaatgctcaacaatagagtagagtgggtttgcttcccttcgaagttcaactatctcaatactctgtggtatccaattggaaaaaagaaaaaaattctttgtattctagataatgttgtcaatgatgagtagcgcacaccaatgctttgtttactatatatcacagtcgtggttggacttacacactccaataaaggtcatggttggactttgttctattgaaattggttttaccatctacgtcaaacaaaatcatttttaaaatttggtgcccttgttattgtttggggctatgtgtgtatttactgatcaagtgaagtaagcagacatagattttgttgtgatgagtatacttgatagttcctaatcactggtctttttgtgttaacctgattaccattagattctgaggaacaaaaactactagaacatgcacttaaaatattgggcgcctgaattgactagtctgttttcaggttattaggctttggtcccaagagctgtttaggtcgagtggattgtccaggaaagttttcttgccgtctaaccctaaaatgctcgtttcttagtaaagtctgatgaacatcagttttgtcaggtaactcacatctggcaaatttgactcattacctcattctttttttttctgatttctgttatcatttggaaaatatattatgcactctttataagtagttttagttgttatattaagattttagatcctttaccttcttgcttttcattttgccactgatgtatttgtttctgcattgggtgtcagaatgttgacaagctaaatgctgtagggaagtggacgaaggatctgctaattgattctctgtttatatggcttagttgatattttaccaaggatgaaagtcagattaatgaatgttgaattatcttcaatgagaatttgagatagaatgaaatctaggtgctgagtggctctttggcccacaacagtgtactttgagttgtttgcaccttaaattcactgtcatatgagttaataaatggatagcatttatgctatggctttattctgttgtatgatgttgccactactgtcacagccaggttttaatgaggtttttttagctttatggttcttaagctcatccaaaactcacctcttctacaatgtcgttcctacactttggctgtatcataggcttctttaatgtttttcttaatttttgtgttgcacatataatggtgttgatcctttatgcatgagatcataaatatctttcataccagggcgccccatcatcgttgacttctctccagtgacc

SEQ ID NO: 10114 - DNA, 2171 bp, Eucalyptus grandis
  Intron number 2 from transcript Egrandis_v1_0.014081m (loc us Egrandis_v1_0.010161m.g) derived from phytozome v7.0 (c hr-ID scaffold_8; pos 63494565 to 63496735)
gacgatctaggcctttcattagcagaagtaagcccaaatttatcggtcagataattttacaaggcagaatatgacgtcaatagaccaacatagaactctttgctctcaacgttgccatgtctaatccaagttaagttgaaagattttgtcgcggaggatcgatgcggagatgtatttcttctgctctgagtaattcatagcagacattgatacttgagcaacataaagaaaaatcttaaccgtaattatgtcacataattacggtgaagattttaatgtggctcaagaagtcaggagccaagtacgctcctgtaattcaatggttaatagattaccctggtggaccaggatttactgggaaatatgcttttacctaacatccagaccatctgcaagtcgggtgatttgcggggatcagacagtcgggcatcaccatgcataggcgcgggaaaatggtgaggtgttgctgtctgcccctgctcttgttaccaagaaatcatagcccggaaacttaaggggagcacacttagcaagtaccgcccagctcccactttatgaaaaggacccctacggaaggtcaaatcaaggacctacaaaagtcatggtcaacatttgaccaaacgataggggactgtagtatcttttctctcttattttttttttctttctctttaatttgattcgataggttaaggaaaatgacagtatttaatttattatgaaagtaataatctactctaaatcataaaaaataaaataataaaaaatagaaaaaaatcttcctgttcggagcagcactcttgctacctcttatacaagtacgaagcttctgtcctttcaggctttgttaaatgagggaataaactaagaaaacttacgcttaggaattctttttcatagtttcaataagagcccaatcctttctctagccggaagtttcttggttccgggacgaactccaccgcatctttcccatgccggttcttcttctcgactccatcttccccctcagtgtcgatactcctctcgaggtgaaatgcctctgaaaaagacatgtcgtgatagattgatgactcttaacgtttctaaatttgcttatcgctgtcgggtgcgaagcaattaccccccatttgtgaagtgcccctcttcacatttagggggttgagactcagccatctctcccagtggaaagaggaaaagaatccgcaatagtgggaagttcaaaccctcccaggaattcacgtcacaagggtcacaggatgtcggaaagttcgtgccgcttcagtaaattgtcagctttggtttcttgccctccatcgtcatcttccctttggccggaaatcaacttgaaatagttgagttcaacggggctcttgctccttttctttgcttctggccaaataggaaagataggggtatctggatcagtaagtcagctagtctctcccagtgtgttgccaaatcaagatttagagcatgctgaatgggactgatggcacctaatttgagtgtccccttcggttttcattttcagaatcttgtttggtcgtatttaatgtacgaatcagatggctacctagtttatgatacctcaatggtgggcctacatcataaaaccagctagaatccttgaatttggccgtgctgacttgctcacatcaataaatcttcttggactaagattatcagtgtccattctatattcagaacataattgcagtttttttggaaagacagcaaatatgcaagcagaagcctcgaatgccgtgttgtctatggattcaggaagtgaatctttgttgattgcttgtgtcgataaggtctgcccactctttaggatcatgacttagagagatggcctttgattgtacaacattgccgaggaccttaaaggttcacagcagtttcctcgttctggcatcatctcgatcatgctgaagcatttaaaagtctcaatgaaagctcctgaataaactgaacttaatccaggaaaaggctgctatcaagggcatagaactaaatcagtcaattttcttcttattatgttctctaataaatattgtcaacatttcagaaacttgtctgaggaatcctattcatataggttctaaccatgtcatgtctttgattacatagtattctgtttttgggtcaacattgacaattggagc

SEQ ID NO: 10115 - DNA, 7173 bp, Eucalyptus grandis
  Intron number 2 from transcript Egrandis_v1_0.016231m (loc us Egrandis_v1_0.016269m.g) derived from phytozome v7.0 (c hr-ID scaffold_11; pos 41526827 to 41533999 reverse strand )
caggtaaagaaaggtccaccttctttctgaccttatgttttctggcctacatagcaaatatgaaattgactccagatatgtctctctggagtcaattttgaacgcccttcattacatcaacgacacagtgagtccagataatattttctaagcgaccaatcgaatgtagaatgaacttaccacgataccctgagtacttgacaagaatcataagtgaaataacagagcaatgttgcggcatgaaaacacactgcattctatgcctagctcttggcggtcatctttactacgtctttagaagacataactccttttctggcctaacatgatggttgcagcttgtttccaatgacaagttcaaaagcgtgcagcaccgagtactcgctgggcgggacggaccgagggtttcagtcgcatgctttttcacctggagccggatgcaaaaaaccaaaccctttgggccaataaaggagcttctctctgaaaacaatccacccatatacaaagaaacctctctttcggaatacgtcacccattatacttcccatggcttgagtggcaattcagcacttcctcacttcaggataagtaactccaaatagagcagagttgtggcaaagcctgagtgagtgtgtcttgaccggctatatcatgtatctgagtttgtggcaggactttgtgacttcctttttcgatctgtgcaataaaatcttcctcatctaaaagaaatcaatgccaaagttgattcttctgatgcatagtggaatgtggctacgttcttcaaatgcatcgagttttagatgcaaaggaagattggtcgttatgaatctacaatattgaaaaaaactttcttcagtcaaatctttttgttactagctccaggaaatggaaactagcgtgtcaatcaatttcagccaaaattttgatcttggaataagtgatggaaccttatgaaaaggtgctgaacatttgcttaatcgttgtgcaagttgatcagtagaaattgatcgtcaacaatttacatcatatttttttctagcatcaataagcatgttggcttcaacttgtccgagtcagagcaattgcctagattagacaaattctacaagtccaaaaatttgattgcatgacaatttgacattgacattggaaaaagagtgcaaattgatgaaccgaatgtgcgctttttctttaagtactaccaccattcattggaaaatagttttggacataccttcaccattcgccttttccttcatgaatccatgattttctgtttgcatacaaaatgcgaagtatcgtccttcataccacacacagatttcatccccaaatccttctcctagcatatggcacacgtagcagaaggaaccgaggaccaaatgcacatctcgcagaatccgccctcaatgcaatggcatgtagcagcaaaacagattgaggcaagaaaagccgaaacatctgagcattggtaacatcatcactcacgtcactgccctgtcatgtaataatacagagtagtgagtgtggcgttcgtattgcataaggtgacatcaaatttatttgtttatctttctttgagttggggatcaactgatcttcatcgtcttctgcttgcaagttgcggcttttgatctcgaatgatcttaccaaactaatattacccgttgctctaggactctggtctccacaggcccctcacacgcagacgttgtgttctcattgctcaaagctaccgctgccgtgggcaacctaaagccagagtaaacgtctgcggggcctgttcatggataagagtgaagtctatgcggttggagtgattgttttcccaatgctgtgggggacgcagaatgtagatcactccaggcgtctggctactacatcatgcagatttcaggatttcatcgatgcatatatccacgaaaaaaaggttcttcgagtacgaggtggctaaactcgcaagaattgcctcttgcaccaacgagtatctctatgataggccatccgtggagtcagtgattcacgagctacgtaacgggcagcggctgtctcagaatgacaggccttatttgatacgtgttccaagagctgtttcgacggttgatggtgaaagctgggctgaagaagccaaatgtggccgatgtagtgacctaccggcttcgacatttttttttttgttttggtcctttgccgtagggctgtgctttcttgcgtatgttcaagcctgttgcggacgtattgctctagttcgtgcttgtacaagtgccttgcgaaaaattctcttcgggagtaggtacatttcgattttagatgttcgatatttctcgcgacgctctgcaattgtgtaggtgaaaatcgctgagtttcaacgcctgacactagccttgtcgccctggtattttaaatgtgaaagatcgaacgatagtagctagttaataaaagcgatttgtttttcattgctgatatatagtcaatcctcgaaaacagcattgcccttagtttattttgtgggccggggccatgttcttcagtattggattggatgtttcattaaactagaaactctaatccaggcacttgatcaccatgagacgatacgagtccctttcgatctgaccatatattggatggcaacccagcgcctactagctctccttgtttctgcagaatatgaggtcttgtttattaacatttctgttcctccatttttctgttctttttgtttctcaccagagaaaatagaaaatagatccatttggcaatatcagctaagctttctatttctcggacggattagtggctagcaaatagttttggaaccaaaaagagaaatagaaaaagcttacttttttgttcccggagcaaaaagagaattaagttcattttaaaaatacaaactcaatataacttaatgctcgtctttacacaattaacataaattccagtctccagacttgatacgagtctccatgatttggagcaaaaataataaaaaaataaagaatttagaaatttaggcaaaaatttaaaaattagattttgagtagttttactagattttagtgctagttctagtttataattagtttagtatgtaaaaatgtgaaaatatctggaagaaaattggaatcaaaattgaataagctttcagggatttactatattgatttttgaatgccattttcttttagagacaccccaagccctgtttgttcttctacttgttgttaaaacttatcaaatcatgttggctttggagtttgctgtaacaaatttaagttttactcgaaagaacttgtcaagttcggctcggatatgattcacttatacaaagtccgcttgtgacatgacacattacttgccatgccaaccttgaaggtcgatctccatataccatgaaactaatattgtgataaaatgcccaaaattaatgtttcatttgacttgagagctctccttttagtgtttgggcaatttggtcgctcacaccatcccttattggtcacaccctaaatcttcatgtatagagaaaatcatggagcctcatatacaaaatcaaatctattatgaaaataatatatatatatatatatatatatatatatatatatatatgtacatatgatacaatatcaagttagatacatgatcatagttctaaagtctacaaaaaagaataagtgcatctctagtgacttctacactaaacttgacaaatagcattctatcttaagtcataccaaacttgaactcccaaattccctcactgattccactctctttctatttgctactagttgtaaaacctaaaaaagaactaagatgaatgatctgagcaaattaccgcttattgagtagtataaatctcttttaagtagattgagtatcagttatgcacatttaaacaataccagaaacacatttatccaaattcagcatgtaaaatacattaaagattagttataccaatttaatacaactttatacatataatatatactcattcaatcaataatatcataacaaatgtcaatgatctagttcattggtcaatcatgtgctcaatatcaaactataactacacttaatgccctgggacaaggtctaccaagatgccctttggtatatgccttcacctatatcagtcgatggtttagcccaaataagatgcccagagaacattatacacactcaaaactcctttcaattgttttagggccaagggcatgaaaccattatcacactcttccaaccaatcataaaattatttcaaatttcatttctataaatcaagttcacaaatcaatatatagctgtatgtatataacctttcacattttcttccattaagaagaatacatttcatatagtattccaagaccatttcacaaataatctacccccaaattatttcaagagataccttactatgccatttccaataaccaaaaggataacagatgatacctctttcataacttgcaaaatatctaatttctatcatttttaagacattagtttgcaaatcagagaagggatgagcatgttcacttgaaaatgcgaaacacaacaacaaaagctacctcaagtggaaaaatttgaattcgtatcctttaagtgacaaatggatatcaaaattaagtagatagctaccttaattaagattcgacaaaagtaaagtaagcttatctactaaaagaactatttcaatgtgccaacaaaagctcgactaaagcagaatagctattgatgtctaatgtactgcggtaactcgtgcgtcaaatttaaaatggttcatttgaattcaatcaatgcctatttcaagtgggtctagagccattgaaaaactaacttaacataattaaaaggggcgagttatatggccaaggactagggaaaagtggtgttaagcacaataatttgaacatggttctagtataacaaacctcaaaatgtcacctcgatcaaaccataatcttgaattgacttatataaaatcttacacttccaagacgtcctaaagtttctttacaacatagtttcataccacaacgacctctagaatcaatccagcgacctaacatttcaactgagtggaaattacagcttaaccaagcatttttttttttcatttagataattaaagcttcgatttctatctgggcgcttcgaaacaaccttaatccgatgcatttaaatgtcccgacgagcttgaaccatacccctttccctctcgcctggttcgtttctcatttcagtttttccaatttttttcctcttaaactagctgcaacaattgtaaacaatgctgaattgttggcttcaaatcggtgggcgcaactcgtaagagaagagaattgggtctcctggacctgtctttcttttaagggcccacttgttaccatctttgacatcacgacagggactcttcaactaccgccagcctcgtcactggggaatctttgacagttagttcccttggccattggctgttgacttgaccatatttgtgcaatggcctctctagctaatcatcttcatatcactctcatggtaacagcctccccctgatcagggctcagattcatcaagatttcaacctttgtcactacaagacgatgccaaccttgtccagtcatgcacaattcatcacttgttgcgaccgggattatgacagagcgaaagaattgcaggaattcgatgagaccaaggccggagtcaaaggccttgtggactctggcgtgaccaaggtccccaggatcttcatccacccgcccgagaacttgcgtggtttgtcctccaactcgaatgggactggcctccaggtcccgatcatcgatctaagaggctgtcaggattttcggcggcgagatgtcattgatggtattcgcgaagcatcggagacatgggggttctttcagatgatcaatcacggggttccgctcgatgtgatggacagcatgttggagggtgtgaagaagttccatgagcaacaagtggaagcgaagaaagagctgtactccagagatgggacgaagagagtgaggtactattgcaatggagacttgttcctgtcaaaagcagcaacttggagagatagtgtcatatttgatttccaggatggtgtcctcgacccagaggctgttcctcctatttgcaggtacatgtatgacttatgaaagttaataattgaagttgctacgagagaaatgagaacaattttgggcatttcttttactcaggacaggttggggtccaataacatactctgtattttcagaaatctgaaaccaggtaaattagatcattcagtgtatgatgcatttccatacagatcaaagcttggttgtggaaaactcgttaataaccttcgttttagggagtgcaaaagttgttccccaagtccaacatgcatttttttttttcaaaagaaaagaacgcatataatgctataaaccctgacactcgaaactcgcacacggtgatttcatttactcgtttgcagggaggcagtttccaagttcgagaaacatatcgcggagctgaagacatctttagccgaactattatcagaggcactgggccttggttctgattatctcagtggcactgagtgtatgaaatcggagacagtgatgggccattactacccagcttgtcctgaaccggaattgactctcggcatagttaatcactcggactcatcgtttctgactcttctccttcaagaccaccatggtggcctccaagtcctccaagaaaaccactgggttgatgtggttcccgtgaagggagcacttctagccaacatcggagacttgatgcaggtaaagaaaggtccaccttctttctgaccttatgttttctggcctacatagcaaatatgaaattgacctccagatatgtctctctggagtcggttttgaacgcccttcattacatcaacgacacagtgagtccagataatattttctaagcgaccaatcgaatgtagaatgaacttaccacgataccctgagtacttgacaagaatcataagtgaaataacagagcaatgttgcggcatgaaaacacactgcattctatgcctagctcttggcgttcatctttactacgtctttagaagacataactccttttctggcctaacatgatggttgcagcttgtttcca

SEQ ID NO: 10116 - DNA, 1754 bp, Eucalyptus grandis
  Intron number 3 from transcript Egrandis_v1_0.005606m (loc us Egrandis_v1_0.005606m.g) derived from phytozome v7.0 (c hr-ID scaffold_9; pos 34433501 to 34435254 reverse strand)
aggtatgcaaaagaattctctctttggagttcttgctttgggaacagtttgtagattcttcttatgtgtatgaatttgtctaataatcagctaaatacaaatcccttgatagcaaaaagctggaagaggggaatctttggtttgttcttttggttataagcataattgaaactgcagaattctattagtatcgtttgaagtatgatattgaaattgcatttgcgcatagttgaaacaatttaggcatttaaacattggttgagtaaaaatcaaagtacacttaggcagcttttcttttattgatggatgtgtctttaatttacctgagatctggttgctgatgctgttctggtgagtttatgaccagcataaacagggattacaggacaagagttgctctaaaaagtgttagtacatttgtcatacttaccacaatactgaggctattgccacaatgctaacttcaaatcataagtggacaaatattcattcgtggatagattccgaaggagacaaaacaggtcaaaaatcaatttaaggagatagcaaggggagagagggagagagcatgtgcactaaaactagatatcgtgaataaacgatgggttgacctttgcctcgatttttttgactcacattcacttgaagaagtaccttcaatcccctactgagtgatttggtatcttgctcctatgaaacaatttgttgattcttggtgatgaatgataggttttggtagttaaccggcaagattcgcgtggattttaacttaactggcgttttttttttctttttgggtcaaaaggaatctatattgttccagaaatccttttcttcgttcatcttgaatgtgcttttctagtctttttctttgtgcttggcccaatgttatttgctacatatgttcttcaatgtataataagcttcgtctaaagatgcttttctggttccgaattgcgtactacttttacctattggctccattccatatgtcatattatctttttggttgaaagcatatatgttgctatatgcccttctccattcatcttgtctgtgctttttcagtccttttctttgtggttgggcttgtgatttttaattttctagttgactttactgttctaaaatgtagtgcctataggcttagtctgactatgccttttctggttttgacactgtactacctttaccttttggctctattgcaaagtctcatcttatttcttaatttgaagggtggtgctctgatcaatttttactgttgatacagtgatgttcgatcttgttgattctgattctgttctgtacaggatcatcgagaacattaattccagtgctgcaaattgcttgtatattatgaaaagaaaagaatgttctgaattatgaatcattgagtaaacagtgtaattacctaatatcgagaatcaaaatgaaaattccaagagatcgggaccattttatattctatgttgttgatcaatgttggctctcttagtgctctgtctttttaaatgtcaatattgttagctgttacactctaaaaggctttctttggtagcagattctttcttgggagttatttttgaaattttgtatgtggcattcactggatcataatgattaatttgattttgatttgcacgcttatagattctattaaggaaataaagaagggttttacaaagaattatgcattttcaaatgatggttgggactgattgagcatttccaatatcattcttagatacgta

SEQ ID NO: 10117 - DNA, 1779 bp, Eucalyptus grandis
  Intron number 4 from transcript Egrandis_v1_0.016789m (loc us Egrandis_v1_0.016789m.g) derived from phytozome v7.0 (c hr-ID scaffold_1; pos 8621090 to 8622868)
ttactacgacagggaaaagaaacagcatattgaaggtagattactatggtgagtgggtacttatttatattttttcatgggtctggtagtaggatttgtctatccaaagtcaatttttttgcttctgctaatgtgcgaagtgtttgttttcttgtgattgtatgatcttttcctgtgatgaaattttctcggtgtactcccatactgtatatggaactttaattgcatattgatggtaatgcattttcagtaatgtagtcaagcacggatttaccagctaacttgattctatctctttatatcttctccgtttaacaaaatatcagatatgacatgagggtttccagtggctactttttcatttcttttatttatttctgtctcctctcctaaatttaagcttgccttatcaatttgctgttatttcttgaggattttaggcattcataataggatgcaatagttgttttaaaaattccgagtattgtttttgcaccagagtaacagtgacactttgttctctttatctcctcataaatgtaaaaagtctgcagaacacaggatagaactttgttcgtttgctggcatagggtgatctgcacattgattatatttatgctgaagaggctgccctttttccttttattcttttatgttgcatttttatcgtgacatgcttgataagaggagaactcattttggcttctaataatcttatgatgctttttatgaagacaacttgtttttgctttagtaatacacacgaaatattggattgctgatttaatacgcctcttgaagatatgattttgcacatatgtaactacttttcttgttatttgttattctttaacttgtaatttcagcttacctagcaagagtagaattacatcatctttaattgtttacttttacacggactttttatgtctcttttttatttggttcagccttttttttggggggcccccgcctgccccctgggggggggggggggggggggggggggtgattggttttttttaattacttgaggctttcccatgtgagggttttctgatgtggaggacatggaccattagacacttatatctggtgtaaaattctggacccaagagttatggaacctgattgttattggtgacacttacattgtttatgaagattggcttttacatacatattttcaacttctgatgctaataattctaggattagtataattcttatatatgactttggacagagtgatgatgtaaaagctttaaataatgatgcctatgaatataatcttataggtagtcccccttgactcgtgaacttacataaatctatttctcatctctcagaattattgcatggagtagccctacatttttgtttctgtttttgtctctttgtgctggacacaaaatgccatccggatattatttcatatagtttggtgcatatgcacgttgctctggctgtttagtcgtttattttattgttgtctgaggctggttgatacaatttagaaattacttaaagagtctctgtaaaggattagggtgttgacatggtagttgagcgagataaatgataagaaagagccatgtggtcttggttaattgtgtgtatttgtcaagaattgtcagccaaacttttgacttgcaaggagttttaacttttttaatttgagtagatgtccttgtcgaatgtgataacaattttgatcctccatctgctgtcgcatatattatttttctttatcaaattttatcgttgcagatataagta

SEQ ID NO: 10118 - DNA, 6878 bp, Eucalyptus grandis
  Intron number 3 from transcript Egrandis_v1_0.016696m (loc us Egrandis_v1_0.010249m.g) derived from phytozome v7.0 (c hr-ID scaffold_6; pos 47028983 to 47035860)
caaagggaggtggtgctcttagtgcgtaagtgttattttagttaagtcagagacataccatttcattacccataatttccctcttcacagtcgccatcatttaagtggtttgctagtatttcagtggggtaatagagtggattattgtgcaaaaggtttgcaaacggttgcaatatgagtccctagagtagattgctgctagcgtgcagttgcatatatatgttgtgtgtctctgtgtgtgtttatttaaatggcagcagttatgatcgtattcttaagtgtagctgagcaatgaatatcacaggttatattttttcgttggattctaatcgttagatcttcatactttatgggttatgttaatatatgtcagtttaggtgaaagatcacataatgaaacctttacactttagtaattgaaagtgattattatttttatgggactgatggtgaaatactctacagaaaaaaaaagaaagaagaaaaattaggtaggaatccagcatggttaagttttaccggttgaagattacttaggcttatgatactttcataacatttggtgtgagtttatttgttttcatgtgcagcgttgccgcaacgaaaagtcctgtgatctttataggtactggagaacatatggatgagtttgaagtgtttgatgttaagcctttcgttagccggctattgggtaggtaatttcatttgggttctgcttttcaatgtgtcttaatgatatgtatgagggtgagttgcattatttagtggtttaatattttggtgaaaactattttccacataggtatggacgattggtctgggttaatggacaaaattcacaaagtggtgcctaaagatcaacagcctgagtatctacaaaagctttctgaagggaattctacatcgagaatcatgtatgaacagtttcagaacgttcttaaaatgggtccaattggccaggtttctatttcttccatcattggatatgatgctctaccttatcattgcatgcttttattttgagattcattcaaagagaatactcaagcatgattgagaatggacaagcatgtgccatggtttggtctcttgaatcaaggtattttccatgctactggggttcaattcagaattgatgctaaagggtcaagagaaagcaagtcatactgtaatatataaattaggtgtttattattttggcttgggactgcagtgaaggttttaaatttaaatccttgcctctgagcctgattaaacaaagttcaatttgttccagagctagacagttcaaatccaaagatcatgaatgagtctagaatcatgcagatagcaagggattcgggttgcctcgacagagaagtcatggaaatgttggaagaatataagaggctagccaagagtctgagcaaaatgaggggacttaagatcacgacaaggggtgatatgaatttgtggtctcgaaacatgaatgcgtaacgcatgagcagagttctcccacctcagatggtaaggcagattggtggtatgggtggtttacagagcttgatgaggcaaatgggttccgccaaggaaatgacgggtatgtttggaggtggccatttataatggctgatttgccatgtgcatcattcatttgtaactccaagcgaaattaagtggccacagtttggcttcggttagaattagacgagcgtcgtttcctcgagtgacaagccatacagctatgcttggacatgggagagtgagttctggtggaaaggctgatgatttgattcgcattctttatgtaactagtcaaaattctgcctggaataattagttacaggatttttgttttttgagttaggattaaggaatagcaggtgattttttattttttatttttaagtcggctgaaatgctaactgaagttttgtggcgtgttaccttcctttttcggttgaagttcttggttccatctgacgaatcttaccatggagtgtctggattggatgtgtaatgaagctgatcaactggtttctctcttttatggcttatcggcaccctttcccacgatcttgctacttgagcaggtttgctccgaaggtgcagtagaaccgtcacctgacattgctttgttgctagaaaggcggtaaataactagtccaatgatccgtctgttttgcagaaaatattctgatttcagttcgcttaggaaaacaagtcaatgaaaaatgttttcctatcaaaacttacataagaatcagaaaatattgatgtttagttacgaaaaccccaacaatggttcttaggtctgttcaagatcaagactttggcagccgagcctaggttcgtcaatgccggggtcgagaccttggtgcttagggtagggccttggcacccacgcgcaggtccattgaggttaggcttgaaccttgacgctcataccgaatgatttgacaccctagccttggtccataaaggttgcgctcgggttcctaaaacattaactcttggtcccgaccttgaagctcgagacaaaaatggccatgcgtgggtcattggttctcaggctcgggttttttataattatttttatttttttaaatattgggatttttaaatattttatattatttgcatttctttctttttctttctatttttttctcaactcgtcacaagcaagtttgagccttgcccaaagttggtgactgactatgatcgacggcaatgatgactcacaattggcaaccaattggcggtagtggcgatcgttgatggcaatgactagcaatcagatattgacgactaatcgttgattggcgatgatcggtagtagttgatgatgacaattggtagctgtcgacagtgacgattagttgaggaaaaaggaggaagaacaaagaaaaaagaaaaaaaaattaaagtaaaaaaatgaaaaattggaatttattggtaattttttttctaaaaaataccaaacgacataaagtattttccattttattttttggtttacagaaaaatacttgaaagtattctcattttccttggaagatgacttttcagaaaatattttttgagtatatttttggtgaaataaacgggtcctttgagtgtttatgatacatcaaaactgaagaagactgagacattcctagaggcaaaaagcacgcgaatgggggagttttctgcataactagcgtaactcgctattctgcaaacattgagagaggagccatcgaagcaatcccaattttatcaccacggagcagaacctctacttaaataaagaagacgaatggaatcgaattcatcttgatgtgccaagacaagggcggatccaatactaaccctggaagtgcagcaagtgccgtacgagaaaaatgcagtcttgtctgttgtgtagatgcataaaataatagtcccaaaaatgttctttttcggtttgtttttatccataactacgaagttatccatttttccagggtatcaatttaaggagaaaaaaaaaatgctaaaattgaaattcgagactaattgggtatgtgtccaattaggtgtaggtcgagcggttccttttaaaaataataggaaaaaaccatcaaaaattctaaattgtgcaaattataacacatttatctaattttttttttcaattttttagacaccgaaaacctcatatctgtatcaaattcatttactcaaaattacttaatctttataggacacatttacttcaaatttgaggtaaataaaaatcgcataaattaaatctgagatttttgatgttataaaaaaaaattttgagataaatataacacgctaatacaaatttagcgtcatatgagcataaaattcgagatttttattgtattacgaaaaaatttgtggcaaacgtgtcataatttagaatttttgatgtcttttctctaaataataaaacgttatctttttacccctcctcgtcctcttcctcttcttctagccctaagagagagagaatctccgatagatcagaacctctcaatcgccacttctctctggaattcctccagccctagagtcccccgatcgttcatcgcgatcggcgttcgcgtccgtctccctttcatccccctcgtgttcccgaagcagagcgagcgaagatggtgttggcacagttaggcgggaccatcacccgcgcgatacagcagatgagcaatgcgacgatcatcgacgagaaggtcctgaacgagtgcctcaacgagatcaaccgcgccctcctcaacgccgacgtccagttccagctcgtccgcaacatgcagaacaacatcaagcgcatcgtcaacatcgaggatctcgccgccggccacaacaagcgcaggatcatccagcaggtctgtgcgtgcgtgcgtgtttttgtttttgggaattcagtttttttttttttttttttttttttggggcctgaggtatcgatgagttacctgtgaattggcgtgggctttgatgaattttcgctgaattattgcatagaatttggtgaagtttatgtagagccttgtcttggattgaattcggaaaatattcaattacgatgcgcaggaaggtgcttcatgatgtggttattggtatgcctgtgttgacggtaggctgggagctcagtgttgttagagaattcgacatgttccgctgtgtgaatcagcaatcgcgattaagttttctttgatagaagttcgaatatataatttctttttccctttatgtgattggaatttgtcaattttgaggatgttttagattctggactccaatttgatgggctctcattttgaaaaagtgccttgatatgaagcgttgattaggaaacgccctgttttcctttctagatgtgcagttgattttgatttgctatatggagatcagatataatgtgttacttcgggtggcatctcgtgtggaagaactttagttcattaagacattactgcaactgtaaatgctagttcttatttttagtgttgatatgatcttctctttcagcatagctctatcccaaatacttgtttgtgttttggggatggatggaatttcctggagatgtgtatatcatgttattcgatctgtttggtcaaattttaaggacatatctgtcactggcactgcatgtcagaattttgtctcacatgcggctgaatgtgatcaagaagtactcatgtggttcacttgtggcggcttttgtttcaggccatatttaatgagctatgcaacatgttggatcctgggaagccagcctttactcctaagaaaggaaagacgagtatcattatgtttgttggtttacaaggtacttaaagatctcctttgacttgagttgctgttcatgaatttagttacttgggaaatggatattgttgtatccgtgcattctcttcaagtggttacaatttgtttggaggctttatacactgcttatgctttgatgtgtgaatagaatattcaagtatgcattattatgacaggatcgggtaagaccacgacatgtaccaagtatgcatactatcatcaaaagaaaggttggaaaccggctcttgtctgtgctgatacttttagagctggtgcctttgatcagttgaagcagaatgccactaaagctaaaattccattttacggaaggtactttcttttgtgcattgcattttgatctgctcctgtatgcatactcctagttcctcaaacaaaatgactaggactgacggatattgtaaaagtgaacttaaggtctccaagtgcacatgttttcatcatgcataaattcttcctcatgttgattagtttatccttcgtctattcacgagtgggctcacagaaacgaacatttaggactgttgtgtttcaatgcaatttcttggccatcaaatgatacgagttctgtgacagttacacagaatcggatcctgtgaaaattgctgttgaaggtgtggagacatttaagaaggaaaattgtgatctcataattgttgacacgagtgggcgtcacaagcaagaggctgctctttttgaagaaatgcgtcaagtttctgaagcaacggtagcatatgatccttttgcacatttacaagtggatctctgcttctttaagattttaacatgttacatgatatgctgcagaaaccagatctcattgtattcgttatggacagtagcattggtcaagctgcatttgatcaagcacaggcattcaagcaaagtgttcctgttggggctgttattgtgactaagatggatggtcatgcaaagggaggtggtgctcttagtgcgtaagtgttattttggtttagtcagagacataccatttcatttcccataatttccctcttgacaatcgccatcaatgaagtggttttctagtatttgaatggggtaatagagtggattaatgtgcaaaaggtttgcaaatggttgcaatatgagtctgtggagtagattgctgctagcttgcagttggttatatatgttctgtgtatatgtgcgtgtttctctaaatagtggcggctatgctcagcaatgaatatcactggttatattcttcgttggattctaatcattaaatcttcatactttttgggttatgtaatatatgtcagcttaggtaaaagatcacataatgaaacatttacacttgttgtaattgaaagtgattattatttttatgggactgacggtgaaatattctctacaagacaaaaaaaaaaaaaaaaatagttgggaaccccatgtggataatttttagctgttgaagatttcttaaacttatgatactttcgaacataaaaatgcttatatgcatctttctttggtgtgaatttacatgtgcagtgttgcagcaacgaaaagtcccgtgatctttatag

SEQ ID NO: 10119 - DNA, 2126 bp, Eucalyptus grandis
  Intron number 5 from transcript Egrandis_v1_0.007416m (loc us Egrandis_v1_0.006204m.g) derived from phytozome v7.0 (c hr-ID scaffold_3; pos 39050764 to 39052889 reverse strand)
tggctttctagcacattgataagaaaccgagataagtaaggatctggcactatagtgagtattctttttctagttcagctatgcttttagtctcacctttcaaatgctctgtctgggcttattttattagctttctggagtattattgattagtgtagtcaccatcaaccttctctcttactcagatccatgtgacagtgggaagtctgatatgttgtcatacattattgtggaattgagtgctaattataatgaagtgcatcttttcacttttgtttttcatttttttacatgcttcagagtcctacatgcacattaactttttgtatgctgaaagacttcttagggcttttagttcaagtcaaatgctagcttcttcaagttttttgggccaaaaaaatctgtaggaatttatttgcgtgacattctttgatcttttggggaatctcttagttatcatttgaactttatcatgttgttatatctttataatgccttatttttggagactgttgcagcataattttatggttactgtgttatagaatgacctatgtatttgcttacatgaacaacaagtggatgagtgaaatcagcaatgccttagtttgctttagagatcaaatgatcaaatcatgttctcaaagttagcaaatgcaagcttcagcatatagatgtgccttcagttttgtgcttgtggagggggatactattgagcaattttgtttaagtagcatcagagaagcagtgactgagaagaagctactgattctactaaaaaatgatatttatttcttaccataaatgaccattgcttgattagcctctaaaatctctccaaatgtagttgaacccttgacgtaatcatggattaaattcatgtcaaagatggaaagaactgcccacatttctagggattacttgtgtatgggggaagtgattgcgggcttagagctaacttgatgtgttttggtagctaaaatggctaatgttcattgatgcgaacaagcttcagggaacaatgactgcctattttcattaatttgagtcagcaactctgagcaaataaacttatccagtactgccgatgtttttcaaatccaagtctatatccatggtgcatttaagtggatcggcttcaccatacaagcaacagtctaccagctaaacaagaaattccctgcctcaactagcgattgaagtggagatgtgataaagaaaaaaaatgcatggacaattgaaacaggtctatgatactatgtcagaatgtctaagccaaaagcttaagctattagaggtgccggagcttaacacgcataaaaggcctagacaaactccatatacaagtgaagctggattctatatatctattgttttagtgagtagggacttgcagctcttcctattctagggctgtgaacccttgcttttttggggaaccctatggtggagctttcaagttccagctctgagttaattccttaagctcatgaaagaacttgagaaaaattctgtataatccttgctttctgcaatgcacttttacagtacttcttctgtaaactctgctaggcatctttctgccaagctgaaaagacagttgaaagaattgatccttcatgctatgtttgggaaattagggtaaatggagatgaagaaaattcggatcgaaagttttgaaaaattctaaatttttgtgagtagggagagggaagggaaaatttgaatcaatggacatttttctcatttcctccccaccttggttccaaacgcagcctcagggaaaatgttcaattcctaggtcataccagggcaggcatataagctgactttaacaattgaatctttttgtgcccttccagcgttgaactacttatggttctttcacatgaaagtgtgagtctggagagaaacagactcacactttatgtatagaaatccatgctctgttgacataaatcttttacatttctgcttttgttatcacgtgttgtctgtctttactgttagagaaaaatacttttacttggttcttatatgctgcatagaagctgttctgttgcatctaataatgccaactgaatttctcaggtactttggcgtactgaacgggatagaccctgcaa

SEQ ID NO: 10120 - DNA, 1699 bp, Eucalyptus grandis; identical to SEQ ID NO: 10024
  Intron number 5 from transcript Egrandis_v1_0.028522m (loc us Egrandis_v1_0.028522m.g) derived from phytozome v7.0 (c hr-ID scaffold_1; pos 10068875 to 10070573 reverse strand)

SEQ ID NO: 10121 - DNA, 4781 bp, Eucalyptus grandis
  Intron number 1 from transcript Egrandis_v1_0.031311m (loc us Egrandis_v1_0.029920m.g) derived from phytozome v7.0 (c hr-ID scaffold_8; pos 20790452 to 20795232)
ccgccggcggcgctctcgcggccaatcccgtgccggttcgcgctctctctctctccctctccctctctcgttttgtgtttctagtacttggtgcttgcgatcggtttggaatctcttgaagttgtttgtgcttcgtgattctttggtggaatgtatttgtaatctctcttgctggggctgtgcttgtgatgtgctacctcggatgggtttgagccgctggtgtttgttgggaagtcgagtctcttgttgcggttatgatcgtatgacattgcattccaggggattagtgagtctctctcgttcagcaatcggaaaaagttgcttcctttagttcactgagcgttgcaaatgagtatactaagtttctctttctataatttgctgggattgcaagcttttcactctgaaatattgtcagctttcatggatgagcgccaccccctccccccctcttttagagctgatttagtggctatatggagatggtctcctcctctggtaaatgttgtcttcagttgctgtgtcgggatggctttcgcagctgagggcaggcatattcatatgttgtggattggagcacaaatagaacaataagccacatttgattaatgtatactttgtgtcaaccctggaagctttttgcagcatgttttgatacagcaccagagcttatgccttttttttttccttggaagaggaacagaatcagttgaacacatgaaaacataagtagcagctatccccaagcggatcttgagaatgattgagctgcctagcttgcacggttttgctagaaatcagtaattggatgcttttgtccgggtccaggaattcaatcaaccatgtacataatatacttggattaggtgttccttttttttttttttctttttttcggttcacgtgatcaagatggaggatgttgtgtctgcatttcttttgtcatattatccctgagattcttcaaggtacacaattgttctgcttgtacaatctttggaaaaatagattgtgcgtgacatcttgttaccgagaaatctccttctgatttggtttgttatcttagagccccattgttcttacctttggctttgtcgggacccaatttttcgggttatgaaccacctagagtttagctaatggattgttaagcctaaacttaactcgggttctcccaagcccataccaattcgcgacttaggtttgaattcttaacatgcaaattgattttatttaggagtcgccactaatcagtttatggtaggtcgattagacacctaagtaaaataatgggagaattacgttactcctacgaaccagagactaagggtacggggacttgattacattagatttctctaatgccctttcggtaccattctttttattttcaaaaatgtttggcaattgaattgattttaaactaacttcctaacatgtgaggtgatcatacatgtgcgcataccaccaatttaacactcaagaaagcaattaaatattacaaaacatacctaggagcaatgaaagcatattcattgttaaatcagaattcacatcagcagccctagatatgatttctaattaacacgcaatttcaatttttgttttcattttatttaatgaaaatcatgacttatgcaatgcatctaagatgacatggcagcatgacctaaactatatgacatgaagaaatgcaataattaaatgccatctaaatgacctaattctaatgacatgcaatgcgatgcaaaattatttaacctaaaatgacatgcgagctatatgtcaagcgacatttattaaatgacataacctaatgacggcaatttctaattagaaatgaacctaacaataatcactaaaatgacgtgcatttcatggacttaattctatataacgtgcacatgatttttctattctaaaaatgcaatctattcctggaaattgcaactaatttatcctaagacaaattttatgaaattcgaaatttaaaaatgcaaaagtgatctagctagattaagattctatctaatttaaactagggattaagtcatattaaatcctaatttaaactaagacattatctaaatctaagatgcaatttatctaaaaagatgatctaaatttaaaatgaaacatgcaattcaaataaaaaaactaacaacctaaatgaatcactttcttttttctttttcttttttaaattcggaataaaatccctattctagatatgcaagataacaagaaatattccaaaacaaactgaatcctaattcaaatattttttagattttttagtggttttcaaaaaaacaatcaattaactaaatctaaacaatcaagatattcaatcaaataaaggattaaaataatcgaaaaaaataaccttgtctcacaggtcagattaacgattatcctaaccctaattatcacgacaaaaagatcaaaataactaaaaatctgatctgaattcttacggatcaaattaataattatattgattcaacacttaaaatactaccgacaaaccccataaattattataattaaaaaaaatgatccgagatcttacggatcaaattagtaattacaataattttagggaagaccctatggataatgcctacgaaatccatgaaataaagatcactcctaaacttagaagaaataaataaatttaggagaaataaataaaataaagtaaatagaaaaaagaaaaataaaactacctaatttccctttccttttctttttttgtttttcttttcctgctttcttcacccacggcttgtgttcgtgcggctggtcaccggctccagtgagggacgacggtgggcgtctaagtttcggcgaggatgtaggagcgtcgctaggaggaagggcgtcagacaccgggcgggggagcagctcggcagcagcgtcgggtcactggactatggtcgcggtggtcgaatccgactgcaggagcggcagagatcggcacaggggtgcagcggtgcagctgtgttgcgggcagagcgcaacgaacacaagggatgcgggcggacaggccggcggcacagcgggttgcagcaaagggcgaactgactcgatggagagttggcgcgggcgtccgatccggcagaaggggaactcgggactccggcacggtggcgagcggcacctaatagtcgcagacgagtggtagaacggggcaggaacgactccggcgtcgggcttcacggatgctgcagatcggtgatggcagaggcggtgggcgaagagcagaccagaagcagcgtcggggttgtcgagtggcgatggcaaggatgctcaggcggagctccggtgtacgggcaaaacgagcggcggccttgggcgcgggggctcgcagacgagcggcggtggctggcgagaaaggtgctgccgaagaagatgaacagtgcgctgttctctttttttccttttcttttgttttttctctttttggctgcacgtcccttctcacgtcctctccctctgctccctttcttttctcttttcttttctgaattttttctccagagaagccccctatctcctcgcacgcacggccttttataggggagggaattggattttcaaattcttcgtcgaatcaaccttcgcaaatctttttaacaaaattcatctcatattgataagaattcgagatcaagatgaaatttttttctaaatccaaatattttaaaaacaaatcgcaatatttttttactcatctgccctatccaaaaaagattcatatctcggaaaaaatttaaaatattatattcccacaaaataatttttaattattaaaaagcacgggcttgggccaacctgttcgcttcacgggcctgatccatctaatttgaatatatccgccaccggtccaataaaatgcaaaaaatgcaaataacaaaataaatgcaacttaaatctatatgctatgcaattaataaaattaacccctaatttcctatgcaataaataaataaattaaatcatcaaaatttaggtgtcaacaggcttattaattggagttgtatctacaaaccctctaggcatcagccaagttgggtttctattcctttggctgcaggaactcggtagaactactatagcaccatgcacagaggatcaatgcagaacttaaaaatgttgaaaaaaaaaattggaatgtagttttcaaaacacacatttacctattaaagaaagaaagttttcaaaagcacgcatcttctaaagaggcatcttggattacatatctttagctttcccataatgaccttcagagtttcatggaactagttcatttgtgctgttctgtggtaggagaaactatgaaaacaggagagatagataaatcttctggcttcctttagcttttgtaacatttgctaatcttctgtatcgtaattccattttcatctttgatggctactaatgtatgattaaatacactaccctgcctgtcaatctaccttgtgagttgtgacatgggaacagaagttccataagtagatgaacatagtgaatcccataatgttttgtatctggtcctctttctgctagacatgaatgttttagttcatgcaaagtacactacattttcggaattcattattgattctcatgtcttcaacaagtgcattttggaatcatactatccaataagacggcttacgtcatgtgtcatcccagaatttctgcggagtatttacatatttgttttcctgtttcaaccagccaaaaagtagcgtatacactgttggtgacttcat

SEQ ID NO: 10122 - DNA, 2882 bp, Eucalyptus grandis
  Intron number 2 from transcript Egrandis_v1_0.030704m (loc us Egrandis_v1_0.030716m.g) derived from phytozome v7.0 (c hr-ID scaffold_8; pos 41644815 to 41647696 reverse strand)
taccaggtcggccagggcaacaagatccgcaggtaatctacaacatcaatccaatcccacggttagccgggtaatctcgtttctctggattgctcgtttcttgttagggttagggattgttggtgatttggggatttgttttatcttcttttttggtctgggttttgctcaatctgttgagtttctcgcattttccccttttcgccttatctggtctaaagccgttgggaatgtgatttggtgatggagcgataaattagttttcaagatgtgggtttttgtaaggattgaaccgaaagggaaatgctagagtgagcttagaatgagcaagcattttccatttcagtgtcccttttttttttcttttttttttgtgaatataatgtggcagctgagaatttgtgacattgcttgcgatttcagttgactttgtccgcttgctctgtctcgtggggaattaatatggatttttaggtggaggattggcatatgatgctactgcttttatgttttacgaataagcacggtatgaagagaagttagatgaggattagttgcttgaaacattcgcaatgccgtgttacattcattggataacatggaaaggaagtgctctactttacaaatgggtggaagaagcataagggtatttggtagatgattaagcggttgagttgcaagatgttggagtggaccctgtgaaagtgacaatctgctggcaccagtcagggagaaaatgagggtcggcagttctttgatgattcgagatgcacacaaatgtaaactatccaaggcttcagaatttgatgaatttcattcttagtttctgaagataaaaatgcggagtgataaaaagggaattgggtcatccacttgcacgatgctcatctctgtctcctctttcctgagaagcgtatcgaagggatgtcaaaatgagatttttttataatcaaatgagactcatataatgggttggtaaagcaacgtatcaaattcaaatttatgactctccggattgctaaaagtgtgatgtccacaaagtctgatccttgttatcaactcagtttattcatgtggaattttgccttccagttaccattagacttttgggccattgccttccgcttttgttgcctctggcaaagattcactgaagctggtaatgatcctcacaagtggagtattctgactcctctcagtgattttgttgatggcataatggaaatgatgatttcacacctctgctttgtggagatggaaatttcatttagtcactactaaagtgataaatctggagttctgtcaaaagggaaaatctttgggtccattgtgcttttgtcaacgggagttgtactttcaatcttatcattttgcatgccttacttaaggtttgtaatagtcttcatcaataaatctaatgcaaaggtctcttccgacattatagttctatgcatgcttgtaactcgtcccaatattatgttcttggaaggctggcgtatgcaagtgaattttactagaatgtaaagtacttttgttagaaaagagattagtcccttgtaagtttgaaaataacaaatatatgatggatctgcagatttcacttatcttttgagcatggaacagcatctacttcaattcaagtcttgaacggtgctgttccaagagggcttggatcaggcatttccagctttcttttctgctagaagtctcttcctttattgccttgcagtggataggctaggttgcaatagagctgggtttatcttagcttcactataggcagttcaacttaatctttgctgtaaatagatgttattatgtaggcaaacttctctgtaagcatattgtgctcatcttatagagatcgagtgcttccgattttgaataatctgctacttgctttgggttactatagtgaggtatgatcaaactatgtctttgctgctgaatggcgcacgcatagttgatgcaaaattgcagtaacttcgacctaaataattttcagtttcgtttagtgggactagctatattaattgttagggagagaatcgtcgaagttgtctatgctgtctgctgatatgcaagaagaatggattagaagtgtataacttggtatattttagggtttcaaagagccatatagcatgttctgctgttcaaaagcataatgtttcaaagagcttttaaacattggcatattatttgtgttactttttgctttttatctctgtaaaacttgctgtttcggcctgctcttccttattgtgatcttatgtgaagggaaactcaggttcttttgaagaaaagtttgttccctccttatggccactgttgactcctagactgtttaaagcatcttttgatttcaatttgctctggcatacatttctgcagtttcacattgaatgtttatgtgctttctgggtctcactttggttaccaaatgatagagcaatgcatgatgcagactctggaacaaactgcaaattactcaagtacaaactttacgttgcaaactgtttatggttgtgaatataagaaagacataaaagtaatacatataacactatcgtctgctgtgatggctttcgctgaagtctgtgttatgcttttactcttgaaatgagatttgcgaaacgatcattactacttgaaaagtccacttacaggaagtatgtaagtgaactgcattattctgatctgaagatgatggatatggaggttgacttgtaggcatgacagacatctttggatccatttggaaaaagttatcatagatccagtttcgaaatccacatctatgtcttttaattcttgattgccttaaagaacattacattgacaagatgcatgcatctgcagggcactgaaggaagaaaaat

SEQ ID NO: 10123 - DNA, 2755 bp, Eucalyptus grandis
  Intron number 1 from transcript Egrandis_v1_0.034833m (loc us Egrandis_v1_0.034872m.g) derived from phytozome v7.0 (c hr-ID scaffold_4; pos 18969351 to 18972105 reverse strand)
ccgcgatttccctctgggtgatttcctcttcaaattcgctctttctactgcgttccgcattcgtttgcaccctgtagcgacatcgtgcgattgtgtattttgattgctgatgttgtttggagttttgtggaatcggtatcgtgtgtgcgcttgttgccgtgttgaatgcaggcattgcggacctgtagtccgtcattcgctccatgaatatcttgctttcatgtttgtcttgagcttataacaacagcgttcgagttttgattccttttcttgttgattttatcagtcacttgaaacctgacagatagaggaaagcagtctcgaaggttgactgaaggttgcgtttcaggctccgagtgaaccgtcgggtcattgcctttaccacgagcaggaacattttcctactctacgaacgagtatttgtttacttccaatgtaggcatttgactacactttgtcatttctttgtttggctctccattaaatgatcaaacttaccctgattggtgatgtattgtaaaaatgtacttatgtaaggtgcctagtggggatcagtgtacttatgttgtgccgtcaaaagattaaaaagagggcaaatcaaaaggatgattctgccttgttggaatcgggcatcatttttagtctataaacattttccgggtattattcttttgttggtcaatgtctatctcagtgaatgtaaattattagtctataggttctcggatgttatgttctgatggcagaaagttacctcccaattcgaaacagaagagatgcttgaagaccgatagctaatatggtagcatttcaagtgtatgtaaatgcctagataatttagtaactccatactcaagtttctcctggatttgtaaatctgaattcttaaatgtaagaaacgtataatagttctttgatgatgatggaatctgcacctggaaatgcttactagattatggtagggggaggatgacagataattgcttaacctgtccctttcatttttagaatcacttcatacttttaggactcttgagtattaggagtattcaagtaagacagaagttgaatcggaataagaataatcattaactaactttaaggaatctatatatactattattaaagaaaaagcttaaatgaacctaatgtagatgaaagccatcattatgaccttagatatggatactgataatggcacgaggggcttgggctggagtctggttgttaattgtcctcctactttcatgctagagattgattcttcggtccctttggtttagtgaacttttgtagatgcacagttccatagatgctatgcacaatgtggattccgcagaaaatttcagttccagttgtctatgaacagattaacagtgtccatggataggcacaaaattgactgaggaatcaattttcccccatcacctacctgaagaacttcctttgacagttctctatgtacatagagcaactttgacttccttggctgctattggcagctttcacaagttatttgacatgacgaagcctgtgaaaggaatactgtgaagtgcgtctgctttccatgatgcagaagatgcgcatgttctattgctttcttgttcccctctccttcccattcttaacaaagatgaaagagcaatgaaggaatagctaaataaaaattgacatgcaaagtttctgccggaattaaatgaagtactgtcctgggtcaccttagttgactcaccggcaacttggtgaagttcatattcatgctgttggtcaggatcgtgatcaccaaattggaaaacatttatatcacaacttacatgctcataagacacgagataatcttggagaactacaaactctactcactttttattctcacgcgctcagcaatagaaagttttgctttactactgttacttttcttcactgtgtagatcctgttattgtgattgctacagcctctgctggcagatgcattcagtaatacatgtttaaaagtgttgcggcaaattagtgtgcagtgccatctgcattggagatattcatagttcaacattcttgacaaatttcgagtttgtttataactcgctattattaatgattttagatgttgggcttctaagaatagttaaaataggatctcttcttatttacaaacacagaatagtgtgggtggacgagcacctattgatgacttatctaaaaattgatctccaaaattctgatatcactggtgtctctgcgaggcattactgtggagttgcgaacaataaagcaggagattcatcattaggagttggctacacaggcacccactgttcaattggtttttttttactgtatttatggaagttaaactgttcagtttgacatggataccgctatagtttaccaattgaaagttttcatgcatatccatgataggacataataatgttttttaactaggaattgtgtttttcaagtctgcatcattggtattcctgctttctcctctttgtagcctttgaaaatgcactggataatattatatccttaaggaaatagcttgcaaagtatgcttttcagaaagtaagtaatttctggaagccagtgtcatgactagtccaccaatttctctttataattgcggttttcctagttattctttatgtagccattttggagtgttcactctaagtttctctctttgactaaacgcctgttcttttgaaaatttgcagtttgtacgagtgagaggatctaaaggcatattgct

SEQ ID NO: 10124 - DNA, 2068 bp, Eucalyptus grandis
  Intron number 4 from transcript Egrandis_v1_0.029879m (loc us Egrandis_v1_0.029879m.g) derived from phytozome v7.0 (c hr-ID scaffold_84; pos 17413 to 19480 reverse strand)
ccctgagcctgacagcccactaaattgcgattcaggtatcatggaattttttttaagcaagatataacatctgtaactaaaaaatcattattctttcatcattacattaacctcaacctgaaagttcctcacctaaagtcttcgtaatgcctattatctaagtgaactagtgtgctgtttaatatttgttgcttgcacctcttgcaaggagtgcatactcgtgtgcttgcatgttcactgtttcgtgataaaatgtggcagtgttgcttccttaataatatctagttgaatgttgtttcagttacattaaaactatgcagagttgggaccaagagccaaaagttggtagagtcacctttctcggtataaaatctggatttggggatcactccaccttcccaccttgtgcataccataacaacaaggacaagaagttgtgccattgcacttcatcgagtaatattttctcccctcagccaaaaagagaaaagtgaaattccctctcaaacaggaaaagaacaaaactctgtggtgaagttcatatgagaacaatcatcttctgtcctccatgatattgacatagactagttatatcagtaccgaaaaggagtgccctccacatctcacagtgattctcgataggttgcttttagaaggaggttacagtgtccttaatcaaactgttgtggaaataacaagagcgagaccttttttttcgtttgacaattattaagagagagcatttgatttcattgggtcttccacattttgtttcctaatcccatctcaaacaatacttcatctcattctttatttctaatggtgattcagttggattggatacataggacagtagtgctgggacaagtgattatagttggatgtctttgcctcaattgagtattgacataaacacattctgttggtctgtacattacgcacgagattctggggattagatgaattaggcatgatataatgcttcaatttcaactcaaactcttatctattaggaaccttaagagcaatttgtcttagtcattcatgcaacaagcactcttggggtttgttgattacctcttggttggccaaaatattatatggcttaaatgagataatttcaactatgaagtgatggagaacggtaataaagaacaaatgcttgtacttgttcaatgtaacatctcaaaattattttttccttctgtcctggtcctgcttgcaatggtcgcagtgtattagaaaagagattatgtttttccgaagtaaaatccgttagatgaaaatgtggggcccctgggaaggactgcctgccatgaatccactgttgtgtcaggcggtcatgttcttctactgctgtccttaatatgactctttactcttgctcctccatgtgtggtgaggtgagcctttcttttccttttatttctctctaggcagctctcttgctcaggttgctgctgagctcttggaatcatctttgatgggaattaggcttcttgagagcatctgttcgtgtgtgtgacattctgtgagcttggaaatagatgtgcttattgcaagatagctgttcagtgttgtgtttgctttgtcagtggtggttccagatcagtttaatggatgctttgatgtgaatagagtactgagactctacctacgaaaaaaagaaaataatgattccatcatttagtgtgttgtgtgtatgcttgggcaagtagagcttttgaggtggtgtccttgatatactatccaaatgctgaagagcagagcggagtgcaactgcaagggaatctgagtgtataaatgtggttcaagagacaagcccttctcaggttatagaacaacacaagaaactagtaaaacgtagtgattgggttatgtattgcatgattttgatggtttggtcatgtcaatataatcttcgttgttacttaaataaatttctcattatgtcgaaggctcaacactaggaggatatcaaaagtatggggctagggttatgtatagcatgatttacttgcctttgtttgcaggaaacctactccgatcgggtgacgtgagaggatac

SEQ ID NO: 10125 - DNA, 2262 bp, Eucalyptus grandis
  Intron number 1 from transcript Egrandis_v1_0.030539m (loc us Egrandis_v1_0.030539m.g) derived from phytozome v7.0 (c hr-ID scaffold_10; pos 2153373 to 2155634 reverse strand)
ctataggattgggaattttttctgcaggagtgaaggtcggtgcttagctaatgagtcttttgagcgtcctgggaataaaaatcgtaacttgcttcgtgttcgagtccgagtctgagtcaatcgttccgtctcgtccctctcgtcttgtcgtcagtgatgtagaagaactctgctatgctcgttctgggctgtgttgtggttctgctttgtaactgctgtttctagtaactgtgaactcgaaaatgatgatgacgaaaattgctgcactacgaacccagaattttaacaagatgcagggatcagagcgtatgtagtaagggtgtagtttttatctagtttcttgcagatggtttgctgggcaatcgaaggatttcatgttggagggttaaattctttttgaagtcagctcctttgctgtagattgagttgcaggatttggaggctttagtttcaggcctctggatctttaggtctccagctcaagtgtgctggcagatttttctgatttctcagtatgagataaagagcttaagtacagtacgcaataggtgtatgcttaacccttgtacatcctacagtgatgagtcttgtgatccatttcttttatctatatgattaggtttttcttggatagtggaagctgtttggggagagctcttagtagattctgtgctcatcatgataactgacttggagtaatttgtggttggattttatctgtggatattctgattcttgagaggccctccttcatgtgattagctttccctatatgaaacgcccgatctctttaataggtgttatataatgtttagtcgtctgggggtagctttatcactatgtaggggtttctgctatgagtcaaaaatgcaagttacaaggtaccttggttaattaaaacaatgctttctcgcctaagtcctttagatcaaggatgaagtcaaaaccacataatagaaactaagaatctctagtcctcaatcctcatcatcggtatcttatgttaatactctctgatggaatcttcacttgcctcagtcctagatctgctatcagactgcattaaaattccagtctacaatcaaacggaatgaaagcaggaaattgattagctatagtggctgcaaacaaaaatcatgactacaattgtcctttactgctggggcagtttctaggaaaggaggagtggaaagtgaaaattgcagaatccatagcaaattaggatggacttggtgtggactgcctggtgtgagctatctggttcttcatgtgcttctcacattactcaagtggtctcgtgataacatccatgtactgaagcatcagtctcattttggtatgatagacaggccatcacttatgatgatagtatgactagcatcgcgcaagtttatgctcagaacactgaaggcattgtggagaatgtcattccaaatgataggattagcaggtcttatgtgaaaatatcatgaagcggggttgtgtacctagctttgtttttatttccatatctgactcttgaactaacctcaatatctcatcatccacaggtttgtagtggcatgcggtataagtttgggtaattatgaatgcatgggtcatccatgtgggaagtctttcttccgcttggtaattattctccttcatctatggttggcaagaccattataccttcacagtgcttgttcagatctcaccacttgagaaggatgtaggtcagcactgagaagtcccttcgtttagataaccaagtttttgacattcctgctcctgggcaatgcaatgaacataagcatatgtgcagcaggagaactctctctctctctctctctctctctctctctctctctctctctctctctctctctctctctctctctcaatgatgcagaagaagtaaacaaaatttggctgtgcctaggccatgacacaggcagaatatttgctcaaatgtgctctcgatataaagaacaagttttggtttattttatattggccatgagcaatttgacagatctttgggtttggtttgactgaacctttgtagtgaaggtccaatcaaaaagtagttaattcttgggaggtggtaggtcaatgttaatccatttttgcagattgagattgttgacatcaagattggtagttagggtcattttccctgttattcatctacactctgtatttaatgcacatgagatatttcttagtcaattctttgctgttgaaggtccagttgcctcgggtttgcaaattagggcgact

SEQ ID NO: 10126 - DNA, 716 bp, Eucalyptus grandis
  Intron number 2 from transcript Egrandis_v1_0.003568m (loc us Egrandis_v1_0.003568m.g) derived from phytozome v7.0 (c hr-ID scaffold_1; pos 34263997 to 34264712 reverse strand)
aagcagacaaaaataaactgtggatcactgataaggtaatgaatttttacacattctgtaaccacatcattattgaatatgggaatgggaaatggtcaaattttcaattaggcttcatctattatatggcaatgagttggacaataatcccaaaacttgaaaacgttccaactcatctttcaatggaaaatttcttgagcactttcggcttaatgatttctggttcttaaggatagtggtccctcttttatgttctcttggcagatactctgcatcaagtaggtcgactgactactaaaaatatttctcgagtggtgattttggatcattttctgaaactactaggatcaaagctgtgttcctttttttctcgcctttattctttacgatttaatcaaatggataagcagcttatcgaaagaacagttgatagctgtggagactcctttagcaagttctttggtgccacgaagccattgtcattacactcaaacatgcttaatacatgctttatgcatccattactttggtgccacggagccattgtcattacactcaaacatgcttaatacacgcttcatgcatccatcactaacattttcttgtattctttcccaaatttcacttttgcacaatatgttggttattaagctctcctctttccttcactcatgactaacaaaactttggcgaaccaggtatctaagtcttggacc

SEQ ID NO: 10127 - DNA, 652 bp, Eucalyptus grandis
  Intron number 2 from transcript Egrandis_v1_0.019637m (loc us Egrandis_v1_0.017283m.g) derived from phytozome v7.0 (c hr-ID scaffold_1; pos 33328749 to 33329400)
gacggcagagggttcagtccacttagaaggataaggttgttttttttatgtaatttgttatttgaaaagagttctctgtgattttggatgcttgactgacagaatcatgccaatgacccaaatgagtttcagcataagaagaaataaaccattagaatgattctcttgacctcaacttcttgagtatatttgttcacacggtgcacgcgaaatgtctggaaaacaggaagccctacaatcagcagttactacaactaaaagattaaaaaaaaaaaaaaacctttatttcaatttctgttttctcacttctaagttaatcatgtctttatgtaccatatttgtacttttttctgttttagtggaggagtttcctgtgaagttgcctttgttgcgatctgtgatggtctagatcatttgcttctccgttcaatgaatctttcctggaggataactttttctatgattagatgaaatttctaaaagtttggatgattttgctgccttagttattacattcaagaagcaattgatgtccccttgcacttcatattccacattctgcttatgatttgttactgattctgtgggtgttttttttgctttcctgcatttggttgcagttttctacttgctgacatattgtaatcctaac

SEQ ID NO: 10128 - DNA, 1446 bp, Eucalyptus grandis
  Intron number 15 from transcript Egrandis_v1_0.001306m (lo cus Egrandis_v1_0.001306m.g) derived from phytozome v7.0 ( chr-ID scaffold_4; pos 5291798 to 5293243 reverse strand)
aacaggtaatttgccttaccagtatctttctcttattcgaatgtcattatgatagaagtaacataaggcggagaaattggaggagggggttgctaggatttgaataattggcgaagttaaatgcattttattttggccaaaaattttaagtagtttacttaccgaagttccaggtgaattttatttaccccttgaaaattaaattctgtcatctcacctcatgaatattcgaattgcttctcttttctctgaatttcttatgctaactctttcacaagagataattatgtcctcccagcacattttctgattcaacaatgagcataactgtcaaatgcgttactgcatcgcgaacgacatgcttcttagagctgcaaaagtgcttcattgtgcaatttcttaaactcactacccaaaaagaaaaggagggcaaagagagggtaaagagtgctgtggagttcttgcattggtgcaaatttcggaaggcagtttgctaacaattgaaggattcacacaagaaaccttttttcagcttaagaagcatgttgttggcaccaaactgatgaatctgggtaaatatgatattcaagaagctggaaacaagccatacgagggaattgatgatctttagggcttaaacttattttattttagaggcttgggacaaacaaaggcctggactaacctttttacttcagctatgaacttttatggccttagctgtggtattgaacatacagttaagaacctgttgctcacagaattatcatttctgcactgataacaaactttatggaacttattttattacttctgctcgagaaaataaaagagtagttgtaggatgatattctcttggcatatgtgagactcttaggttaaactcttgaaatgtgagttgaacaattcctaagtactcttgacaaaagtaaatcaacatatggatttctgatcaaaagcaccagtaaaaattatggggtcagggacagtttttacttgggacatcttcttctgggtggggcttttgattggcttttgatgccaaataacaaaagtgaagccaaaagcaaaaattaagatgcaaaagtttctcagaataacccctctcaagcagttgcataatttttaagaagcaaatagacactgttagcttttgtctaaactagtttaagcctttacctaaatcagatctctattgactgaagtatatttagtcgccatcgactaaaatttagtcttacaagcaatcaaagaaacatagaactaagtcttaaccctgattccatgtagagtcctcgtttgggtaacagcatataagctacaagcagggggacttatggcactggaatcatcagatagccataatctctctctttccatgaaaaccttttgtattatctcgtctttgtggtgatacaaagatatacaattttcagggattgaaca

SEQ ID NO: 10129 - DNA, 1445 bp, Eucalyptus grandis
  Intron number 7 from transcript Egrandis_v1_0.015133m (loc us Egrandis_v1_0.015133m.g) derived from phytozome v7.0 (c hr-ID scaffold_1; pos 34712396 to 34713840)
ctgtacctcgaaacacattgattccccgtaccaaggttactttcagcccctcctatctcttttggggagagaaaattaaagaaatttttttcttttctcgtatccttctatctttttctgcttttggatgggcttggggtggcttttatttttatttaatacttagttaacatcttccatggcctaaaagcagaagtctcttcaataggcagtggcaggaaggtttcggcttagagtgacctgtgatgcaacaattatcacttgaagcatagaaatgtaaataaaagttgattgacttttatgctgtttcattctgtatgttgaaaactagttacagtcagtgatcgccagtacaccaaacattggttttgcgaaccagaaagctgatgacagggggaaccatcacaataagacaatgacctttaagaagctttagatttcatatccaacgttccgttactatttatgcattagcctgaaagatccatctagcaagccctttttcttagatctatattgtgtagtacatggctaaggaattttttttttgtggaaatgccacatttcatagtttcagtagcctatgttgtacactttttggggtattgatgggatttgtgatggcaagattgtatggcaagattgtcttcatgtatacttaaggtcggtagatagtgtttcctttggctgaaaaagttttgttctctagtatttgtatttttggacagctgaagaaagccgattgggtgtcttgcttatttcacctatttaaactatgctaggtttagagtggaaatacctccaaagactctgttcgtactttctaaactgctgtcgatcttccccacaatatggcccattgtttttaagagatgttcagtatgtgctagtgtcttcttagcattctcatttgcaattctggtctgctaaaggttgttgattaatgtttcatgcacttttagtgtgtttgcaagaaatcttattgctgaatttgtgtatacagggtagtagatctgtagcatttgatataactgccacgagcaaaattatatgattggcgtagatatatccaaaacaggaggagagaaaaaaggggagaggattttgtggaggctttatttgagatctctacttgagttagattgtaatctcaatgctaactactggatgataagtaggtttgatctaccaagttctcgtatatccgttgaatcatcaagttacattgtaatcataaaatacgttcaacaagcaaatgtgcctcattgaagtttgtcaatttgtggttggtaaactcttctggtctttctgtctgagtttcattaggatcactgctatattagtgtgctatgatcttttgatcactgatattatcaattatactcgaatagaatatcttcttaactatttctttctttcagggttttgtttcagcagtcagtcac

SEQ ID NO: 10130 - DNA, 3769 bp, Eucalyptus grandis
  Intron number 1 from transcript Egrandis_v1_0.006413m (loc us Egrandis_v1_0.006413m.g) derived from phytozome v7.0 (c hr-ID scaffold_3; pos 4056481 to 4060249)
gggtaccgcgccgaggaggtcctcggtcgcaactggtcagtctctctaaatctccctccttatttttctttatcgctctctctctctctctctctttctattcccttctgtcttctgtggttgtttgcattcgattggcagatgggggaggggcatttttttgttgttggagattaggtcattagctttgctgtgattcttcatgggttcttggggttgggttgcgggtaattgagcgagctggttctggtagtttcgatggagtgatgtggttcgagccttttttattttgttttaaaagctggaattttttagttatccctaatctggaatgagaccctgggaggttttatggggagagaagtagtggatggagctttttggatgtgtctgaggaggcttacttttgtgttcttatgttgatcccttcccgagatgtctaggtgaagcttcagtaatatgcggcagcaagcatgatactttcttgtctttgactactgtctaggtggtcgcttactgcaaagaagttacaagcacagactttttgatggaatttagcatttgtggatatgctgatgttttctggaaactatagtcatcttttatctgatgggatcgtttgtttatgactgttttgacagtttcatttctaattattttgtctttcttgcgaatcttgataataatgttgctatatgtcaaaattgatggaattcattcagatgcatttttgtcaaagacatcactgaaggagaattccacacccaaattttgagtggtagaaatgtaaagaacgaatggtgtgtggaaatttattgtggtggttcgtgcataactgattacgccttaacataacacatggcagattagtaagtgctttttattatacctatcaaccagattctttttcttggggggaggttcttttttggtttttttttttttggccgggagagaagcgggggggggttttcccaagtttctgtcaaacaagaagctgtctggttgatgagtaatggaattccaatacaatagtgactgagtgttgattgcactattctcaagattaaaattgcttgtttgcaagaaggatccgcatggatggaatttcaaagctggtgaaaagatgtggctttacatataaaaacatgcctatagatcttgattgaatcatttccatcagatatggcaatcagttaacacagcgtgctgtggtacctgtgtggatacttcattccagcatggtgtaagaatgaggtaggaaattttgatattatggagcatgcagtggtgattagggaagatgggcagggctgggagagggaaaattaagtccacccttatcccctcggttcttgaatgcgtatgttagcacttaaagaaggttgaactagaggcacaaatttttcatagatacgcagacagaatgtgtaccataagacctagctgaacatggtctgggggcctaagaaatatttgtttatggtggttggagatgaagtaaaaatggcaagtgaataatcaattgcggtttgaatgaaacgatcataaaggtttaggttcaagatatgtcacaaagttggtggattcatggagatgctcaaatacagaagtttactgagagtcataaatggggatagaatgctgcataatctcgcgatgaaatgttaaaagacagaagtgataccaatgatatgaaattgaatgctggatggtcacaattcagtgtgtgcttgaaatgagtgattgcgatgattagtctgtggaaaaaatgagggtaccaatgaaatgataaaaaatgtttaggctcaagatatgtcatgaagttggtgggtttatggggatatcatgcatgagaatagagtggatgctgaaatatagaagtttactgtgagtcacacgtggggatagaatgctgcataagctcgaggtgaaatgtaaaaggacagaagttatgccggtgatatgaaattgaatgttgggtggtcaggtttcagcatgtgcgtgaaatgagtagttacagtgatgattagtctgcagattttctggattaaagatgagataagactttttttttgaaagccagttggtattacccatttaaacttttcatggggtcccacaaattgctcctgtatggggttgcaatttcgtggacattctatgtcaaagggattgggtgactctgagtaagcaccagaaattttcagaaagtgccttgaacacacaaagattatggactaggaggatacctaactgtgtagggtgcaatagccaatccaagttggtggtattggagtttgtattctacttatcctgaattgtgtgtttacctgtctgttgatgtcattgtgaccaactacaatgtttgctactttgaccaaagtttaacaatcttggagaatagtaacaaagcttagtatgtgattcaaggcatatagagaatcatgcaagaaaattgtattattgagttcctagataatctggtactttgaagctttagcatgcatatactgtgttgatgaactattttagatgagaaattatgaaaggcatgtatgccatgtggttttgattttcctgtaatcagcgagaaaggtccagcccagtttcattggcactattagatagattgcagaagattactgagtaagctgctgttgttatggaaactgtgtagttgacaaggtatatagcttcagtggctaattggcaggatgcttgtcgtcctttctaaagttcatgcaatttcagtgcaaagtaatgagcactaggatacgttgcttaactatgtcatatgatatctttatttggattatctttgaaatggctgctgaagtggattagtcacttaatgataagtgaaataagggatatgtgaccctttgttctcggtgatggcagtgtacaaagtttttaatttcccatgtgagagggtggtgggtgcagtgttggatattgtttctttatatttttctgtagtaatttatgagggtaagttggtacatgtcttgatcagatgtttatgaatgtgttctaattaaagcatatcagtgttgtgaactgcttcaggagctatgcttttggtgccttctctaagtcaacctagatcttttgctgtgcaattcattcataaaaaattttggatgaattatcacttgtccagaatctaattggtaaatctgatttgttccgtctctgaaagcatgtggactataatctgaattcttgtgacacattgcggattagtggtcttaagtcctggattggtgctactgggtcggtcttttaggccaggattgttgagacagcagcgtgatttcaggagttatatgttcatgtttgtcttcttgtgaccagatagttggtttctttgcaattgttctttttgcttagcggcccatattgcaccacaacaatcacttggtgatattatgatagcttcaactgagtcgaaatctgtagccaccaggatgctgatttagtcatagaacattttatgctttctttgtggccattgtgttatcttcttttgggtcgtgtgtttctgaatctcctgttgtagtgtaccactattaggatttaccgtctgctctttttgtactgttgcaaatttagcaggtgtgtggcagtgcacgtgggggtaagaattttaccatgtttgtgagtgagttgctaactattgcagtctcttatttcttttaattatgcctaattccttggaacttgtgcagtcggttcttgcagtgtagaggcccatttgccaaga

SEQ ID NO: 10131 - DNA, 1589 bp, Eucalyptus grandis
  Intron number 3 from transcript Egrandis_v1_0.025963m (loc us Egrandis_v1_0.025963m.g) derived from phytozome v7.0 (c hr-ID scaffold_6; pos 39469009 to 39470597)
cccaggtgggttactttctattctgttaaagttactcttagcatgtttaattagtagggcatggatcctccacattaagaaggcgaattgccgccatcaatctacgctcttgaaatgcatgatatatcaacctgcttaaaaatcgaaggttgagatttacttagcaataaaaaatcctgaccatctctttatttttaagtgggttcatgcgccatccaagatgctcttcaaatgaagcagattctagcccttgtcacttttacacaaaatgatcatgttattactaagtatcttgagaagatatttttgcaattctttaagtttgaactttaactgagaattcttaccaaaaaaaaaaaaaaaaaaactttaactgagaatcctggcatttctccaaaggcaaatgctaggtatactaaaattgatctacaaatggtatactaggtgatattgtaaccatgggcactttgaacaacgggaacatactcaacatcagtaaaaatccccgcgcacttaatatatatgtataattttcaaaatgcagttgccatttacctataaattaatcttctaaaaatagtctcttttcttccaccgacgtgtgcacacggtattttctttgaaaagaatttccctagttgaaaagttcagtcgcttcagatccttttatcttagaaagattaaaagaatgagcactgttagatatacagaaattgatctataatattctaacatctatataatagcaatgtattcttaaggactgcctttgatagaactgtaaatgaatagaaaagccttatgcccattgcaagcattgtctatcttgtattcttcttaagaaaacacagccacatcatacagtgatcaatgttgaatgattatctttacttgaagatgataaatttacgttttggccttcatgtttgttgttaagtatgctcttagtagctatcagcattgtgaaaattgtattgcttttcttaaatttggcaaattgcttcctaaatcaacgggtttatattctttgatcaactaatgtcaggtttatagatttcgtatttttctcaaagaagactggtaatttttcttcttcatttccttcataaggaagcacttatatcataatttttgtgcacaatgatcgcataagtataatatcatgctcattgtaagttttgtactgttcttgagaaatatacatctcacgcttagcaactaatatacaaacaactccccatgaagcccatgccatggactatatacttaggatagcaattttgtatatttattattgtgtatctagcattaatatgtagctgattagcttccttctttccagagttgaatccaaattgcataacctgtgacatttcgcactgaaggatttttccacttttgttgttggttatcatttggatcatgctggcagacgtagttaaactgtcaatgcatccgggtcaaattgtttcttgctatctcctgatgttcatgacatagtgattaatgttctcttttcttttgatttttgcctttacgattcactcaacatagtattatcagcaagaatctgcaaagttgaggcagca

SEQ ID NO: 10132 - DNA, 2908 bp, Eucalyptus grandis
  Intron number 1 from transcript Egrandis_v1_0.022859m (loc us Egrandis_v1_0.022859m.g) derived from phytozome v7.0 (c hr-ID scaffold_3; pos 23424174 to 23427081 reverse strand)
ttcaagcacctcatactccttgctgcttctcctaggtaagtagagatgtatttggtaatgattctattctgaataataatttttaataagaaatgatttttatatttctattatcaagaacaatttctgagtaaaagaacgtgtttggtaactttctaaaatttttatttttagtatagatatatatttggtaaaattcttagattttttatttcttttaattttgttaattcttttattattatttttttaattatttttaattatttttaattatttttttcttttttctttttctattttctttttctctatggtcggttgttggccatcatggtggtggccggctaggtgatgttcgacgaggttcagcctcgcctaggcgacgcgacgctggcctcaccctagcctggcaaagcccagcttcatgctgactagggaggccaagcctcaccgcagctcgacgtcttcaggggtcaatgatgttccagcaaggttgccccccctcgtctggccaatcgttggcgccaatgaccaatcaaaaggaagaagaagaagaagaaaagaaagagaaaatagaagaaaaaaataagagagaaaatttgattctagaaattattcctaggaacaagaaacaatttttttttcttcttgtttctgttccaaactattcccgggaacaaaaatatagattcctaggaataaaagttttactaaacacgtttttattctttttacattccccaaaatagacaaaagaacataattttttgttccagcgaatagaaatgtattttaccaaacagaccctaactcaacatattcctcccacccaaaagagaaaggaagaagaaagtttaatttctcatgtagtttgttcatttgaatcagcacttttttttggggggggggggggggggggttggtttactacgttttggtctcttcaaggaaggtatcaatttcagtctcgcctctttgttcgatttggcaggcctcatcatatgtctcatcgatattgctagcaattattcttggtcaatgtgtttacccaatggtcaaaaaatgaaaaagaaaaagaaatcttttatatattctaatattaatgatattaaaaaaaaaaaaaaaacaagactttcccctcatgggtttgtccctttacttgtaaattccatagttgtagatgtttagttttccttgagtttgtttatggcgtgtgaataaggaagctatgttgttcaaaagcactttcttttcaccatgacaaagttctagtatggtttaccgcaaaaaatatggattaaggttccgtttctattacttaaaaaatgatcatttatattacttttaaaaataaataaacaaaagatgttttcataatctatgaagatgttcagaggtaaattattgtcagtgatgaaaatattttttactgactaattatttcaagcaatacaagctattattttaaagaatatatttttaaaaccgttcgtttttggctaaataaacgcattctaaacagaacataatcttagttaggatcataggaggggtattccatatattctcatctacgaagcttaaagataggttaaagagaagataattccatggcacctccactattaagaattttttgcaatatcgaaattttttgttgtccttcgtgctaacaggggagtgttgaagaaacacaatttggacatctgtcatagataaacgattgattcggctcgcatgaatgatggtttggaccgattaagtcaaaattaatggataaaattacaggaaagaaataaattttaagcttattggagtttagtcgtgagtaagtatttgagacatttatgtttactagaggacattaaaaagattttatacgatggtgtaccgtttgctcacaaatcaccttgactgttgaaaaaaaactcatgaattaagtacttattaattaattacataatcattttatgaaaatgattttcaaatcatttatttttctttttgcgaaacaagtgaagcttgaaatagaaatcataaaggctttttgtacttgattttccctatagcaaggattaaatacataaagttattgtttggagtatttaaagtgcatttagtaacatttctatttcagagaacaatttctttttaaaaattctccttttctatttatatttcttggaacagtttctaagtcaaagaacatatttggtaactatatagaatttatattctcgaaatagaaaaagaatagtaatacatttgatacgatcacaaattttctgtaatataaaatttcttttaatttttaataatcattttagacttttctttttttccttttttcttcgccagcggcaagaaataaaaagaaaagaaaaaaagaatcatttctaaaaattgttcttgttaagaagctactttttttttacttcatgtttttgtttcaaatctgttcctcgactacttttctattgtagggaataaaaaaattaatagaccttaacggatttatgttttttttcgggaataaaaaatagaaaaataaagaaatatgaacattaacaaataagcccttaatgttttagggcgcatcacgagtgagatgagtggacacagaagaatcgttcgatgattctcaatatttcatcgtctttattaaaatctatttattttgattttgtctttctcgtcctcttcgctctctcctcgctatttatggatggcagatgataaagcgattcgtagcttggacgcttggacagctgccgacggcactaatcctgtctaaaacttcaatcccgtttgtagcataaaggccaaaggtgatgttcttgcagtgtcttactttttcttgccttcattaggtacttaaacacggacggctacgagggcggattcg

SEQ ID NO: 10133 - DNA, 2911 bp, Eucalyptus grandis
  Intron number 2 from transcript Egrandis_v1_0.001858m (loc us Egrandis_v1_0.001858m.g) derived from phytozome v7.0 (c hr-ID scaffold_8; pos 67761972 to 67764882)
ttcgatccaccgaaagaggtgagtgagtaggattccctagtgcttaattcgtgcttctattttgaggaccgcggtttaggttgatagcggcaactttgggcaaagattggtattgtgtcaacagtttgatgaaaggcgtagttgaattgtatttgttgaaattttaggactttagtagatttgaattaaggaacttgaaggcaaatgagtagcagcttaggtactctggttggtttggctgctttccacctccgcttcctatgatcttgcagaaattggttgcaacttcattttgtagatatcttgaaaaatgccgactacatctttccaattgatgctcatatcgatttgacttttgatgcaatttccatatctgttattttcttccttccgagttcatctgaacgtaatatttctactgcatattactgtagaagttgacatgaccatcatttgagagggcattgtatcatttcttccagctacaaacaaattcattagagtaagtcatagttttattgggcctgactattattgaatgaggacatacccattgatatggtcatttgactcaagagggcggtcatgcaaatagcatacagtgttcatttgcaaactcctgagtccttctcagattggttttttcctttgctggagagtagatttgatatggaagattacaattcaaattcaggaacgtcacaacttgagctttgctattaactttcaccatgtaaaccatgtgatggccttattatatgcggcaattgtacaggtgtcaacacctgtaagagtcccaatccaaacggcccgggccatgacaataggtgtgataatgctgtgcagtgcttgctcatgcttaatttgataccacatcttaagagaccattctcattgaggacatttgttatccttttaaaatgacctgccttttgcagaggcatatatggacagaacggtaggataactgagcaatctctgcagcatccattcttttattttgccaccaaggtctatctgctgaattaccaacaatagcctactttcacatccctgcagagctatcgattgacattgttcaaacaaaagcaatattatcaaacagaactaaagttgattgagcttacctaaaaggagatactgtgattacatcctgcattataggtttagtttcactttcctctatttttgcaaatttctctttgaatctctaagttaatgaaattatgatatgttgaatttcttcccttataaccttctttcccaactctgtatccaaagcaaatattccctcatcctatgcaacaggggaaccaaaattgcaccaagcttagctctcctaatagatgaaaatcccgcagaataaggaggcagggtactcttctctgtgataccctgaagaacccaattactgtttcaccatcagattaaattgttgacccatgttgatcttgttttctcagcaatctgacagacaagtttagacagtgactaatcaaaagaagattaattacaatcacctagtcaaccaatctatttccctctggccaaagggaaaagacaatttatttccttgtgtctgcactatatgcacccccaccagtttgctgccatgagatgttacaagccatcgcttctttccacctctttctttttcacatagaagccaagcaggaaaattgagatttactctaaattaaggcacttctcttatcatatgtaagcctatacctactcacaataacatctttaaatttatttttcctttcaaaagcactaaatcatccacccaaagaaaattttccttcacaagcaaatatatatgatgatgcttgtagtggttcgttgcctgaagatatagagggagttgctggtagtggtaattgaggaggtgcatgctgacggtttgacaggctagcattcctacttgcgattgtgaaatcctgtttggcatttttgttaatttgtgcaactgtacagaaaaataacatttttgagaatggcaggttgtaagaaacaagaaaaataaagattgaggatgggaagtaaaatttcaaaaatacaaaaactctaagtttaataaaactggcagtggaggatgtttaaacgaaaatttcaatatattgcttagaagttacattcagtcatttttgcattctgattactctttgctaaccatctttaaatgaccagaattagatgtatacatggttagggacaaagcaaagagattttgattataaagaacatagatgcaaaaagagaagggacatgaactccagagttccttggtgtggactgacactcaagataaaagatataagagtggctatggctttgacctagctgttaaggttagatgtcatagacttttattagctggcctaaatgaggcaactgttgcaatgttttccaagaaaatatcagctgatccttctccagactggacagtgctaaatattggggttgctacttcctagggtttagtgatgaattatcattgttcaactgttagtgaaggcaggaagaaggtatccatcatgtcttcatcttagtttgtttgaatgtcttgcaatagacctgtttcgagttgattcttttcaagttaagtttactggttgcagtattaaggctctaatggtccaaattagggaggcatagttgccctcatacctttgagacaaaggaatttagcggcatgtcatgagaggctgaggaaacgagaagtacatattaaaaaattgaagtatagaaacaaccaggttaactgatgatcaatgtgtctgagttttttattacttctttttctatatgtagtgtgctttgtgccttgtatattccataacgacaaagactctttttgattattctttcagggttgagcttcactgaagcagagaggagactgaga

SEQ ID NO: 10134 - DNA, 1195 bp, Eucalyptus grandis
  Intron number 1 from transcript Egrandis_v1_0.007994m (loc us Egrandis_v1_0.007994m.g) derived from phytozome v7.0 (c hr-ID scaffold_9; pos 25851897 to 25853091 reverse strand)
gtcggagaagttgcccctacttctctatttgcctggtgaatccactctgatcaacattcttgcttgtggttgaatgatatgtaactgttcgaatttgttgcctctgtggttcgtagttgaagtgatctgacaggaatttgagagttgacctggacatacgttatggcgctgatcataagtcacagaaaagattctgttcaaacaaaccagcctatccctgtaaagggcttttacggggtggttggaacatagacacatttggttgtgaatttctggaatcaaagaattaatagatttgttctacccaaaatgggaatgggttagagttatgaacttataatttataatatgatgatcgagtcgattccatgatagcacattttcgataaggatgagcttggtcctaaagtagaattgaacgtgagaattgaacccgtagatattggtcaattccaaattttaggatatgaacttgttgtgataaataacttggaatctagaatttaaaataagtttttgtgtttttttgtttgttttatgtcttcgcttaatcctatgacatttcatggcattcaataataatgagttgagcttctatttccagcaatatccacaattgatatttttactttattaatatttcataatatttgtgtgtttaaatatgagtagtaatcaatagattgtaacagatgatgatcactaaatgtgatgattcactataatcatttaattgatagtgcaaatggaacttgaataaaccatgaaatcgatttcaaaacttgtgatagaatagtttctaagttgctaaatatgtgggataggtttcaagttccaaaaattagagaacatgttttaacgagtagattctagattttaattggacaaaacctagaatcgcccatccctactttttaatttataattgctctcttaactgcgagtaacgattgagattcaacagtatcagttttcttccgttataaagctgttgatgtgcagcttggagttggagcttttccgcttttacgttcagacgtcacttgaatctaatcacaagccgttttgttttctcctgaatacgtcatgtttctgcgaatcttatgcggtattgatcgaagccttagtgcctttccatatcccgatatcttctttctcaggaatcgacggcacaggagctgggcttacttcgcat

SEQ ID NO: 10135 - DNA, 1970 bp, Eucalyptus grandis
  Intron number 2 from transcript Egrandis_v1_0.039661m (loc us Egrandis_v1_0.039661m.g) derived from phytozome v7.0 (c hr-ID scaffold_8; pos 66686171 to 66688140 reverse strand)
ctttcttagttctaaacaaccttatcaaaaatgtaagcatgtgcttgtccaatgctatctaggttaatatcaccataactctcaaattggtatccacgacacatttgtaccaaattaatgtcagtcttacaaaaaagtcgcaaactagaaatagtatgacacatttaattccaaactagttttcgtcttaaagaatttccaaaccaataaccctcgtccaaactacactcccttaaaatgcatacttgccgactcacatattgcggtcatgatatattagatggaatgccattggaaggtggatttcagttgggggtattgatttggtttttttcattttactttgcgagacgaaaattgattttgggtaaaatgcttcattgaaaaatcggtttgggattttttaatagggggtgttgctaggctgacagtgccttttcaaccacaaacggccatggaagtaatattggcaaccggaagcataatatagacccgtagcagattttagaaagaatcttgacaaaaatttctcggattttggacaatattcttttttttaaatagacaatgaaattaacaaaaagataatatagtggatgcttgtgaactttttttaatagcttcgaataactatttaaatgaaaaactcaattatttcataatgtacttgcgacaatgttttcacatattattgatgcaaagaaagtcatatcaataacccacaagcgtatttcactaatttaatgagattccgaaatattatcgaacaagtgaaaaaaattttacactacagtgagtctcgttgtggcatttgttgaactaagacacaatgtatacttatatagttaagatatgttaaattgaaatttggctaacacggtgacaaagttgggctatacaaaatataaaaaaggaaagtgaggcgaaaaatttaatcaaacaaattcaatattctataaatttttacataaatttaattttggatatactaaatgatcatctctttgatttttgagttaacttggattgctttgactcaagttgaatttatcgatactttaagttgtacaaataaagattcacgtcttaattttggtaactgtgagcatcttgttaaatgatgaatataatttttgggaaatgcttaagtaacattattgctaagtaatggtggcatgtaggccacaagatgtaattgatagaaaatgcaagaaaaataatttccttcccttcattacagctagtgttatgctagcatcaattggtagttcacattttactattacttccaacaataacagtgactgtcatgctatcgtcatccataattttttcacgttttcaagtgtgaaaagtgttttacatagcgaccttatcaatagaaatgctaaatttatttgtcttataatcaaaatgtctgaactggtctttcgacatggaatgtaaaatatttcatgttgataatgctttcaatgaagctcttttcaattccctaagatttttctattttattttttaaatctaaagaatcccactggggttccttcaaaaatcttgtggccgggggagcaccgttgctgtccaagtagtgacggtgccgtcaccccatcattatttttttaatagtataaattctattatgtgagatatgcaatatttttggaaaattcaaagtttgttcatttggtcttaaattattaccattcgacatatggtgcatgggaaatcgtgtcgtagaaactggaggtggtaagagaactcatttgacgttgtcagtccgtgcataaacaatcaatagatgtagagtaacatgcaattattgatattaaaacaagaccgcctacttcaataggatagttgacgatcaatagtagcgtaccatgtaatgtttaacaaaaaagaaaaagaaaaaatgacacatttggctatccgtagggagaagaagagggggactttgattttgcttttgt

SEQ ID NO: 10136 - DNA, 1864 bp, Eucalyptus grandis
  Intron number 7 from transcript Egrandis_v1_0.001693m (loc us Egrandis_v1_0.001692m.g) derived from phytozome v7.0 (c hr-ID scaffold_6; pos 41236352 to 41238215 reverse strand)
aagtcgggggcaaaactaacaatctggtagtgcaggtaaccctttatacagttgacagtctctgcagttgcaattatattattaaattttacttttatttgtgtccatccaatttcaatgtaaattaaatgtggtcttgtcaaatttataatactgtggactatccaaagtcaccttatctttatcacatggttttctaaaagaaactgtttgactacaaactacaatacccagttcatactgccagtttggatctgccttcttttgccatctagcaattaatatcaaaagattgtcctatgtgatggttttgatggggtctacctgtttgttgtctccttttattgttctcatcttttaatgtggcttatttcctgttttttccagaatacaaaatttctaatttagtctttcattgttgtaatttcctaaagtatgtttacttataatttctctccctgtgaataatggacgagttttctttcaaatagcaattgaaatggcacttttctagtcttatagtgattttaggttcaacagttgataatcttgagtgaccacaactttgccatttaatgagtctagacacagagattctggttgcttgatattaaaatttgtgtaagcttttcttttgaaacatatttatcatacagaggatcaagcctaggaaatgccaatatatctgttgccctttttagaagctttgtacgtaatgccacatgagttgtggttctttcaggaaggtgcagcaaattactcttcagtgattttgtcattagaccaagccttgtttttgctcttaaagagtattggtggatatgagatttttgtgtggagtactgattcttcaattgacagtcttaaggactcgcttactttcggggatttgactggagtgaagactcgattccggcttcaattccctttttagcatttagcgcaattttctttaggtggccctttctagttgaaggaatagttcctctgatatgatcacatatatcaattgcattgcagcacaaaaaaccaagaatttggtcaaaagggtacttccctttttatttcttaatacttttaaaaaacattctcacatatttatcacgacaagacgcgaaattgatattctgagaattggaatatggatctcagttcgttctcttccattaaccgacttgttccatcccaacctcattccactttatcatttcaaacctcttgagtcattttcttcaatggtgatcactgatgggtagagttctgaggactatcaagtaattgatgcagcaggttggagcaattgacctctttgtcattctctttgttataatcaattatgaaaaaagaagtttgagaaaccactactaactgattgataaatttaagttgtttgtgagacatggtgtaacatttaaatactctagcacttcctctcgcatgtaggctgatctttggttgaatcaaagcgtgggaatgaattatactcagggagacatttgaggggtttagagaggtttgaactcaagatttcctgctctataccacgtagaaactgtgggatcactacctattgctctaaaagcatacgttgttaaatgtaggaattgtctttattcgaatactttacatagaggaaaaacttgttgcaataatgtcagcgggcagcacattctgagataggaattttaatgttgcacttccttgcgaactttctttcatcggacaaagtttaatacagttgtagtctcccctttatttggaccatacatgtgttatgtcatatctatttgttggctttatttctctccccacatgcagagatctttgcttgaactattaaagttttataggtagtgctactggt

SEQ ID NO: 10137 - DNA, 8541 bp, Eucalyptus grandis
  Intron number 16 from transcript Egrandis_v1_0.002132m (lo cus Egrandis_v1_0.002128m.g) derived from phytozome v7.0 ( chr-ID scaffold_3; pos 53815482 to 53824022)
tagagacacaagcgtgcaggcaaactttgcaggttgaatttttagtaacttcctcctttttattcggtctagttaagtggggattgttaaaaggggatattgttgctgagtgaatgattgtcttacctctagtaggtatgattgaatgatgttgtctgcaactacctttccagattctatgccattgaattgtatgcttgctactgatggctttagttcatgctctgttatcgtgttgttattttgaaatgactatgttttatttctctggttagtagaacaaaagctattatttcatctctctgccaaaatcttactgtggtgatgggagttgttttgttttttatgctagggtgtattggtgaacctattggcttgctggatataccttagtcaccttgcctaaataaagtagcattttcccaggtctaggtttaaggttcaatctagttgacagataacagtaggaaaaaagtttgtcatctaagcttgtcatctttttatctgctgtatctaagcatatgatgttcatgtatgtgtcaccatttacagatgctattttaatgacacaattagtttcaaggtgtatctcatctttcagagcattttatggtttgcatctatcttattgaaattgttactcattcaattgcacggccttttagttcaagttggcctttcttttctttgagattgtcacaattagtatttttattctctttgtttcctgcttctagtaacatgttgatcgttcccacatgaatctgaattttgataacaggggcatactaaggcaatcgattctgtgtgttgggattctactggcgatttagttgcgtctgtcagtgaggactctgttagagtttgggcagttgggtctggtagtgaatgggactgtgtacatgaattgagctgcaatggaaacaaggcccactcctgcgtgttccacccaacttatccttcacttttggtgattggctgctaccaggtaaggcgcacgtttgaattatttattttagcatttcatgtgaattctagctctgtacataggagaagtgagatataagtccatgtttagatgttcccaaattttgttaatttttaggattacataagaaattttgagcgagcttcttggggatgctaatcaggctcatgagtttctaaaatattaagtattgcctagtataaatcaggcgactttctcactatcctctgaagtagtgaaggtcgggtaattggcaacttcggaatcataacttctgaagcaggctgtataagagccatggaacagcaaaagctatgtgccttaaagtacgagtcatgttaataggctctttggacttctattgccccataagatcttggtttaattgtgctttggtctaagctaatcgaaaattctctgcagaccctggagctctggaatatggccgagaacaagacaatggctttgccagctcatgacggactaatttcagcattggcagtatcaaatgtgacgggcctggttgcttcagctagtcacgacaagacagtgaagctgtggaagtgatactttggcatctccaggtatttttcctaagcactcagattggaagactgaattcgctgttcccatcaaagtgcatgtatcttgtccttgtatcagttgcctcagtacgcccaggtggtgtcgtctcactgatactaatttagagcttatgatgagcgatgggatttaactttgtgacatttgttgctgttgtacatcaggtgatgacttcttttgtcaagttgaagctttctgcgaatgcttcagtgacatgtaatgtttggcctttccttagagaaggaaatgttctcagataggactctacatcgataattgccgtcttctctcgtttggtacttatgccatgtctcttgaacttcgatgtcatttagttttctggtcggattgaaattctaattgtcggtttcattctcatcaacttaaagggcgaaaagaaacagatttcgaggaacccccccactttttagctgttaagagcttgagatggaatgaaatatgttctggttagatccctaggaaacaagtggatccatcaactctaagaatggctgaaggtaaaggaaaaaggctgcgaggactgctaaaaaagtatccccctgctgtagcctttacttgggtattatttaccttttttgtatggattaatgccagcacacggatgatacggaatctgagcctaagatatagtacctcccttggtgattccatccactgggtgattattaaatggaggctttcatactagagttattgccttggaagtaaagcaagatttaccgtgcgaaaaatatagtggacatgtggagtggcaaaatctcttttctcgtaataactgtgtatatgttgcaatcaaggggttccactaaatcactgtagtaaacatgttttgcacgatgcgataaatgcactgtcggcatgattcgtattcgaatgtacgcggtggtgctatatattgtattgctggtgagtgaaaaagccagaagcagctgtaaatgtaacttgttttgagcgggattgaggggaatttgcaagtatgcgtggctcatctgaaatgctggtctcacggtgatatcaaattctccgctggttctatgctcttcatggggccagaacgcaccaattgcctgcgctcacatcggctttcgtcatatcatttacggcaaggcagatcctttgccgcattaggggcctcatgttgcaagttccgttctccctcctgcccggcgaagtgcataataccatcgtcggtctcctctacccgacgcgccgaccggaggttctcggatctttgcttatcgtgcctacccagcaggttatgcatgcgatgggctaaaggcagagtcccatcaaacatgatcagcctcgtctgacgattattgactgtagaaattcctacatctgaggagagttctagtccgatgatgtcgagttgatctgctgtgttcctctatcgtgacagaacatgcgtttgcgttgggcaacaaagggtttttcttttaaacaaaattcaatcgagagaacacgggatacaaaagccatgaacttttatctatctcaaaagttagaaacaaatatgtatatctatagataaattgatatcgttcttagatatgattataataactagatacaattcaaaatgaggttctatttttagtgccatacttattgttgattcagaaaatgaattgaaatgaaaagatatttcaaaattcgggaatcaaagttagaagtcctgagttcgaatgttttaaggtcacattcgtctcttcaattaaattttcatgcttagtaccaaacagaagactgatcaaactaagcgtgaaggtagtgttaggatatttaaataataagtcgtatattcatctaatagtttaagcttttacaatagttgacagtgcaccacaaaatcccacacttctctttagatagttttgttcggtctcgagatatagtaaaggtgaaaaactcacatttctcctctttttaagtataataacacttcaaaggagaagagaagtatgagggtttacagattcactataaactgttttaaaagtttaagcgattagatgagagcataacttattaattaaatattttaacactccttctcatgtttaatctgatcggttttctatttagtactaagtgtaaaaatttaattgaagagacaaatatagggtaagttaccaatgagatctgcctttggctaatctaacgaaaaggtatttaaaggggtagttaaaaagctgtaaggctagcttcccctttcccaatgggaaagaagccctttgtttctttcttatccaaaagcagagggccaagacaggagcaagaacccttggatccatcgagaaacaccgtgccatcccctgaatttggaggcgcaattattacatcttcatgcatcacccacttattccaaagattaatccttaaaagaaagagattgatttctatttaaaaaaattttaaaaaatgacttacgaaaaggaatgagtgaatgaataatttttttttcattatccatgaaaatatttacgcataatttgcttcggcggctgcgaaatctttggtaatttttatttgatcggaaaatttgtgataattcagacacaaaataaaggggcgagactatcagccgtggtggctctactgggtaggctcctacctttgaagggaaacgtcaagtgttcgaaactcttgcaattgcaaggaggttggtagatcattaggtgtattacgcgtggcgccctggtggtggattctgagctagcgtcacttggggtttacgtggcggctgtcaggcaaaaggttcgctctagtggtgggtcatgagctagcgtcacttgggtttacgtggcggctgtcagccaaaattcctccggccaaaaaaaaaaaaaaaaaacaaaggggcaagattttttttaagaaaagacgcacgaggcaattcaattcctgctcctgtgtgcctcgacctttctttgtacggggtttctctctccggaacattcgtggcacgcgtttcttggttcgttcctttttctcccagtttggacgctcacttccggagagatcgttcgtcattttacaccgtggagtgcccatttttttttccttgaattttcggttggaagtcttccatcgccttcgagtaaattggtcagtcaggtttagactttgtttttggctgatgataatctcttagcatgaattcagttatattgttcagtaatgatctggatcttcaactacaggcagatactgttggtcgctccatggatgttagcaaaggtgcctgagaactctacattaatggggaattttggtgacatgcccatctttaatcgttgttcttgaactagaattatgtggcgtgtgctattctatatgctttagattttctagggaaacgttgtcatataaattgcaacatatatatttgttcactttgttgttttctgctccaaatttagatctattgtgtgtatagcagggaaagaaatctgttagtctcatatatcttgtagacttcgataatctattgattcacatagatggtattgggattttcctttgtccttcagtctgaacgactattgccaattcatgcgctctggtgcgtcttgagcctttttttttttcctttctgaggatctgtaagatttcgtccaccatgagctcagagtttgattggtcgaaacagaagggaaccatacagaaaaaactactgaaagagtttcagaaggactaacctttgagcgacaacggagaaacgtaagtggtatgagcagaaaaaggaccaaaactcaataaactaagttacaacgaaggacaagactttcacgacaagcctttgaataatgcacagacaagataattttgtcatttctcgctatcactcctatctattaagaaggaaatgaacccaatgacaccagttaacaaaggatgataactagcctgcctttggaatcaagtgtaactttccttgaggtaaattttatcaaccgtaaaatcctgatgaatatttttagttagttaatggaagaactttgcctttagatgtccttcttcgttattaatttagactaccattctcaggtctttctaattgaggtttgatgcagaatcatttccctagtaggctgaatgatgaagtgtctttcacagtttcactcatagtgttcaaattgggtgctacagaattctcatttactgaagtgaatactattcgagcaagcgccagcaaggttacctgttgccacttctcatcagatgggaaagtacttgctactggtggacatgataagaaagtaagtacaggcagttatgtggacatgataatatgttgtcttatgccatagtctgataatgggatggttaaatttctggattatgcaggctgtactgtggtatgcagatactttaaagccgaaaacaactctggaggaacattctttaatgatcacggatgttcgatttagtccgaccatgtctcgcctggcaacatcttctttcgacaaaactgtcagagtctgggaggctgacaatgttggtgaacataatatctcatcgacactcacgttttttagatttttgaattcttttcgtattcaaagcttcttgcaacagccttctgatatactgaactacacgaggtgccagcccgactttaagtactgatgaaatttcaaaactttctgccactatgatacaagtgcttttgatgcaagtttgtttttcccggagcgaacaatctaatggaagttattgttttacataccccagaaagttacgtagaacatgacctacacttgtagctctaagcaagcagatgtaccggcatgagttaattgacaggactctgaatttatagttaagtgcatgatggtgaagggtgaagaagttggtaatctttcccttagagctgaccacagaaggttttggtcctttagaggaatggagcaggactttcaattaaagctggtcacccgttattactcagatacttagatattcctgtctttggcttgttgccacttgcaacatcaataaaaaatggctttgtggtcgattttagctttgtagccctaataggagttgccattgtttcaaaatctgaacattgaaagtttgggaacatatactatattgagtcgatattatgaatttatggcctaactgtccatgtgaatggttttgcaatctgactcttgttcaaaacctagagagttgcttcagtatgtaagttctctgaatttccacacttgcttacatgagatgatcgtctcctcttattacccttgaagctggaattctagaggctgctgatattgataaattctgccatgggtactctcccgtgataataatcaagtgaagatttggctacttccttcatagatcattttgaaagcattctcttcggagctcaatgaattgctgtttttggactgcagacttctgcggcatttattgtgtggcttttttatgaaatggtgtctgtgactatgaggattgtatttatccttcttggctcttatgcattattttggcagctcaatgtcgaggctccttcattttaccctgataatgatcatgttttaagagtttcctgtttcggtagttgttggtcaatgtggagggcaaattcgcatgtgaccttcctaagatttatttgactgtctctgttttgttcgcttgtgatagtacgcatttagcttcacttttattggctttatgtctaatgtccatgtgcatatggtatcatcaatggattatttgttcatttcaggctggttattctcttcggacttttatggggcattcttctgttgttgcgtctctggacttccacccaaataaagatgattttatctgctcatgcggtggggatggtgagataagatactggagcattaataacggcagctgtttgagggtattcagggtaaaaattaatatgaattgtcatgctaatcttgttgctccttgtggttttaatgagatggtgcatcaagtgcatctcggttctctaaaaatgtataacttatgttgctcgtgaatcagggtggcacagcccagttgagattccagccacgtcttggaatgtatcttgctgctgcggcagataatgtcttatctatattggatgtagagacacaagcgtgcaggcaaactttgcaggttgaatttttagtaacttcctcctttttattcggtctagttaagtggggattgttattgggtggaaaaaggggatattgttgctgagtgaatgattgtcttacctctagtaggtatgattgaatgatgttgtctgcaactacctttccagattctatgccattgaattgtatgcttgctactgatggctttagttcatgctctgttatcgtgttgaaatttgaaaggacaatatgttttatttctctgggcactagaagaaaagctattatttcatctctctgccaaaatcttactgtggtgatgggagttgttttgtttttcttgctagggtgtattggtgaacctattggcttgctggatatacctgagtcaacttgccttaataaagtagcattttcccaggtctaggtttaaggctcaatctagttgacaaataacagtagaaaaaagtttgtcatctaagcttgtcgtctttttatctgctgtatctaagcatatgatgtttatgtatgtgtcaccatttacggatgctattttaatgacacaattagtctcaaggtgtatctcatctttcagagcattttatggtttgcatctatcttattgaaattgttactcattcaattgcatggccttttagttcaagttggcctttcttttctttgagattgtcacaattagtatctttattctctttgtttcctgcttctagtaacatgttgatcgttcccacatgaatctgaattttgataacaggggcatactaaggcaatcgattctgtgtgttggga

SEQ ID NO: 10138 - DNA, 2278 bp, Eucalyptus grandis
  Intron number 1 from transcript Egrandis_v1_0.004138m (loc us Egrandis_v1_0.004138m.g) derived from phytozome v7.0 (c hr-ID scaffold_9; pos 21171637 to 21173914)
cgacgggttcgccgccggccacggttgcaagagaggtgagtctgattcgacccgacgaacacgcacgatgcatcattatcatatccattcacgctcttcacacatttgatttattcgattttctaaatcgataagaagctcgttttatttcgtcagaataatagatgtctatagataaaaaaaaaaaaatcgaaatgcacggtgaattttcttatgtgccgggaatgtgatgtggcatgacgcattagtgaatctcgataagaaatacccgccgtccttgattaagtattacatgagcctaatccatattaaattggattccgacctagccgaggcgattgatgaaatttctaagtaatccacgcggaaatttacttcataggagtaggttttagtgacgttttggtggtgctatcgagatttacaagcgatgttactcgggcgactgagtcattgtcccacgtgaaaacggctggcgttttgcttctttaaatatcaagcggtcatcaccacgtcattagtaaattactacaggaaatagtaaagaaaagtcacggtatgtacttgaactaataaccatcggtccataatattcaggccatgaaatgagcattcgtgtgaacatttctcatatcattatcatgtagctgttagaatcactttctttttcttagatttacctttcaaaagttcttctgcgggtcggcctaattttgctttttgacaaagagcgacgatagaaagtaaacattcgtgtgcgactgaaactcacgtggtaacaattcgaccaggaaaaagaaaaaacttacagaggaagcgcacgtgctttgatttggtcaaagtacggtcggtcgtaaaggctaaaacttgtagcaataaaagagtcgcagtaatagggaaatggaaagagggtttgtcagcaaaactctccctgcgaccggtcaaagatggtggatatgtgcgccccctgttataatttgattaaacaaatcatttggttgactctaatataggttatgaaaagagggttttcttgtttactaattcctggtaggatctttgcactcgaatccccctgttttgaagggagggttttgaggggttgtggagctccattaacatgagggaaggaagcggaagaagacggcagaacttttgacccggcagccccagggtcaacgcgtttctagttcaggttttctctttggtatggtgggaatgcagcagtttagatcatgataagataaggtgccgtgtgagatatttgaccatcgtgcgcatgtgggtaggcgtcgagtaaagtagtacagcttgctttttttcggcccctttgaacgatgggctggaaagattcaagtgctgagaataggaaaagaggcgtggaggactcttcttgtcgaagtcagagactttcgtgcctctcggctttccatttcggattggcatgaggaagctgctctctggttttagcgaatgtggacgggtttctggcggtccgggttgttacgtcctctctcgaggatgcgctttagtagtttttcgtgaataatgtcaactggttgtgccaaaattcgcctgagaatcaagagttgcagttactctctattgcaagaattgaaatgtatttatgagggtgcagtgccaatagcatcgtagtgtgacgcggcataacattaccccttaactaagagaaggaacatggaaatgaccaattctgattctgttgaaaatgagaacttttggggttgaacttaggttgtttgttcaggttaataccagcagatgctgcatttgctcctctgctgatgaataagagctacagaaacaactttcggcttgattttgtgctaaggaactcagcttatcgtttggtacctaaacagttaatccagtatcacgttgtatattgttaatgaagtaggttttctgaatggagcggaactgactgataactctagaaacatttgaatgcttgtccgatatgcagagtgctctgaggaactagtttctatgaatttacatttcttcatccttccaatctgaataggtgaaaaattttcagaccctagttggagtatattgtttgaacgccttgcaaaagatttatgtccaggatacttatgcatacgacagcaagaacgggaagacgtgcaagcatccctgatagcacgcacttttgaaggctttgatgccattcgttaaactctgatctggtgctgaaaaacgtctctgctaatccatttctgtacacgttgcttctctgcagtttcgagttgca

SEQ ID NO: 10139 - DNA, 674 bp, Eucalyptus grandis
  Intron number 2 from transcript Egrandis_v1_0.040702m (loc us Egrandis_v1_0.040702m.g) derived from phytozome v7.0 (c hr-ID scaffold_3; pos 78340400 to 78341073)
ctttttatttgccaaccaagtcgaatcttgtccatgtgttgattcaatgcacctgtaaaaaaggattaaaggagcatttccatctcagattgattccatcctcccaaatttgttgtatctgaacttgtcaaggaactcgataggaggaaaaatccctccatcgatagatgatatgaagtcgttgatgaccttagatttgtcgaataatggcttcatgaggtagatgccagagccaccagccataggttgtatctccctatttgtactaaatatgtcaggcaacaacttgcgtggccaaatgctaccaagactactaacttgataaggttgaaatatttctctaaaagacaaccaattcaccaaggtatgtcacttggcattttggatagctaagatttaaggattttggatctaagttataatttatagtccggaccaataccaaattggattggagatatccaatttttggaatttctgatgttgtcagaaacttatatcattgagattctacaaattgaattctgtcgttgttttatacctttggactaacaaatttcagtccaaacataccctgctgtgccaatgttacatttatgagattcttgcatctacaaagtcagcttaccgggccttttccttagtttctttctagagcttcgtccatcgtcaca

SEQ ID NO: 10140 - DNA, 1707 bp, Eucalyptus grandis
  Intron number 1 from transcript Egrandis_v1_0.034059m (loc us Egrandis_v1_0.034059m.g) derived from phytozome v7.0 (c hr-ID scaffold_10; pos 9350372 to 9352078)
ctcgcttcgggcccaggattccgtggaaattgtccgtacgcttgctcgctctgatgttcatctctatccttttccgtttcgccctgcagttaacttttttccttttttttatccccgttttccgcggattcatacatctgtagctttcgttccgttgatttttggtcgtgtccggtgaagtagctgcagatcgagagcgggcgtttctttttggtctctgctgtttggaactcgtgatttgagaacattaaattgtagattgacccacaaaaggcgctaaattgcagggctatcagctttggtgctgagttcatgtagttcctagtgaatggcgaatttgatagagtggggaaagaaaaaaagggtaattggaacaatgtggattagcgcgaagtagcgtcgtcgctgcagtatcggcttggtatgtttctttggattatttagagtggagcacgagtagtggctcgctagtcctgtgtagctggtcttttgtgaacttaagttgaattctgcaattcagcactgtggccaatcgggtaggtgttactggaatgatacttagtatcgcaaaatgtaattgtctcttcataaatcatgagaattgaaaaggaatttgcagtggtcttatgggcgagtttgataaaaaaactcagttttcttttggatatggaacctgcccaacaggttgaagtttcaaagctttaggtttcttgagattttttctttgctgctctttgttcttctacttggtgctctgctattgagtttttataagttaaaaagacttagattgatcactcgcaagaatggatgttaaaatcaggtccttgttagtattgatgagtgtctgaaggatgtcactgacatgatatcgtgtgagatcaaaaatcaaagaatgactttaaaggttcacctcatatctatcctagaattagaagaaaggtcagatattttataatgtcaattgtcaagtgattcaaatctggagactattatgtaaaatgatggtagggtcagtatgatcaggccactaccgagatattttcttctttaatcttaggattggaactatatagcaaaattaaaatcccacacaagttcaatattcttaatatcgaaacttagctttatattcgaaggttgtgatgagagtcatgaagcaactaaaaaaacagataataagcatctccaaggcaggtgtacaagcaactctagatgcatggacatgaatcctatctgctaccaattcccacaggagggcattttgacaattctaaaccactcacattgagaaatggctctaattgagggaagccctagaaacttaaactttcttcattgacctgattgtttccttgatgttgttgattaaagatgcctcgttcgttggttgtcctttaagcaggactatgtaacttttgtcaagctatatttcaaggttccgcatatgctacgtgtaatgattactgccttgtccatcacgttgtaaaagttcatcataaacatgaagatgctcttgctattgcatttgatactgcaaacttgaagttttgtgttgcttatgcaaaaattttgaaaccgaaggtccactttcctgtcttccagctctgtttatttgtagaaagccgatgcagatgcatgtgaatcattttaactggagtacgtctggcagctaagctcagaagcgagaaatctgtttgttggctc

SEQ ID NO: 10141 - DNA, 4043 bp, Eucalyptus grandis
  Intron number 3 from transcript Egrandis_v1_0.011474m (loc us Egrandis_v1_0.011474m.g) derived from phytozome v7.0 (c hr-ID scaffold_8; pos 42434085 to 42438127 reverse strand)
ctggtaaaatgttttcttctgtctgcactctaattatttttttttgcggattcgcactctatctagtccactttctgagcgtgttcaaatcttgaatctgcgtttcttgtattacagtcctggttagtgttttttcctattttgtggcgcggaccactcaaatcaatggaccaggcatgatgtgttgtgtgcagtgtactggtctccatgttgcttattctacgcagtttcatttgcgtgagatttctagatttcgatttggtttgcattcaagttttcaattgccttagcatattacaattcattgaatagaaaaggttgtgattctgagtgccttgtagtcatattgcagttgtaaaggcagcaaactgctctgactacacatatggacctcaagaatactttggttaattgacagcattagtcttagcagtattggcagaaattttgttctcttttgaaaaatcattttgaaggagtgttactttttccttcggtggatttgaagcatttccatcatgatgagctaggttgttttaccagaagcattaatttaatgttgtgaatattggtcttctttgtgaatcttgagcttgtgatgctagttaaagttattcatagagatgagcaagtaaagtaatagatattggaatcatcaattatggagtcttgagcttcaagtactgattttaaatggcatgccagtaatgaggtagcttctcaatactcgagatatgctatactattttcatgatggagatgaacaaatcagctcattcggaaaggtgtgcaaactatgaaagagtctatttgtgggaagtttctgctttgaaattacctaacttagttgacctgatggttggcattgctcacaaactgcctgtgttattaactgcttggggtgcaaaattgttctctagaagtacatgcagtaggatgtttattctaaaatttcggagtctggataacattgcattattcgtgaaaattggatttccatataattggtctgggtgactgagttaggcttgtgaaaagtactttgattgctcgagacacattcttttattaggtcattctgctgaattttctatgcaaaaattggaggatgagtttgatggctgccaaatgtttctattgtttcacagcttgatctctttctctcaaaatttgattctcaggatcatgctcctcttgatattttctcttagatttattctagagatgtgagatttatgtatatgaactgaattgcgggtgaactttggctattgcatatggtaccaatggttttttccccttctttgaccaatccaggtctctcacatttctgagcaaaagaagatatttaagatgacaattctgtgcaagtgttgcaacttccttctgttacgtcaattaggttcactttactccctttaattctaaagaacctatgatgcaggaattagatttacatgtcaccacttgcaatcgaatgtatatcctttttttttttttaatcagtagagttatttcttgttcaaaggttagagtggaacgggttatataaatgaagaagccagcatgagccttttcatcacatcttgtcatactaagagacatctgaactcttattgatcctaggaagcaaaacattagcaacaaactgaagggttttctaagggaccttactactaggagatatacttgataaatttattacatagcatcagtaaggttacaatcaagtgattctcatcatttactacatatacttctcaagctgatatgataactttcttgtccaccatacatgataaatcaagtttcttttctatttgtcttttaaggttgcccaattcaaccttttttatttgaaagacctctcctctgggtgtgtcggtgagtttctgcatatatctgccttgtagtaataagatctaaacctactatctggatttatacctgagcctcatacatacgaagaaacgtcacccacttggcatctttctcaacagtaagatgctctgaaggttaggtcaccctttcgaacttttccattcgaagtagtggcgaagtagtggcgtgtgttggcttgcatctcgatctatgcatctaaacagaggaaaggggaagtgagcatcctaatccgaggaaaggggaagtgagctcatacagctccaggaagctattcttttgatgaggagaaggctgggttcttctggattgacctctacttgggatttgcacctgcctgctttgcaagcagacgacacatagtctcagaacttgataagaaatgaaataggaagacattcaaaataagtttcagtccacttctttaggactgatcacgctgtctctgtggctacaaggatggcaatatctgacatgacttttttgcactacgcaacatgaagcaaaaatgcgaactgtagaaaatcccaaatatgactcaatatgatatgtttgaccccacattctgaaaccagttaacgtgttttcctcatgatttaaatatttggcacacggtatcaaatttatgatgatttatgttgacacttatctacaccaaatatgaataccgttgtacccccaacacaaattgctagccctacacgacggggaggctcagttgtaggaaaatgatgcatgcaattaaaccagacaatatttcaatttacctttcagtttactatgttatcagtagagttcattaagacaacttgcattgcagttcattttacttgtctttcaagtgtatttgtagatatgtagtattgggcacttgcttgcaggcactttcaaggttaggttgcagttcacaatttaaagttcaactggatgactatggtttgtatcgttatcggtgatctgtagggttttatattctgtgaagaggaggtatctatagcacaaaatgcaaatatatgttaaagttttttaaataagatattatctattagataaatctttagcaaatttgtctgctctgtatcttatcattcttattaagtactatgtaactatctgtgtgtgaacaatgttggtcaatttctacattgcaaggatttttatttttatttttgtgcttctgctgtctaactttgaaatgaatctattgtgttggaaatgagttgtggaaaacatagatgtaagagcttgttttagcaatttatcgattaattaacttccacagtgaattatctaaaaggttagctttaatggtttgagaagggagatatttgataatctataccttttggaatttatgttagaaggggggataagtaaagagaatttcagtatgaggcaccaaggggttgccaacccatttacaaataagagcccaaagccaaaaaaagagttcttattgattgctgaaaaatcggtgaattactcgggctctttgcagttatgcaaactgtattcttaaatggcttccaattttatttttccctaaatgtattccctggtcccagaaagtggcaagcgaggggctctaggttgaaaagtataaatagctggaccatatgctctgcttggtctgtgagcaacggtttggtgctattatgcagagggtctatcttgttcccaatatattggcatagagttgtatcatgtttctttgactatgtttgaatcttacatgatgtcaacggaaattgttctctgtgcagtttttcctaaacaaagtgaatgttgttattttatttcttatcagatctatatataaatcttgaactttatgcattctgtcaatgaagagaagatacgcaccagggaacttactttggtatttatgtggcgatgtatatgcgaatccttttagatatgagattcatgattccagcatattatatcttttaatatgaccccccatttgacatgcacagttctgcttggttgcctgctgtagagtagtatgatgtttccatttattaatatggtggtcctgtctttaattgctcatagtgtgtgacttttttctgattgatgtgtccagagagggcctgtattaaattttcctttctttgtggcagcaaatccacaagctagtc

SEQ ID NO: 10142 - DNA, 1822 bp, Eucalyptus grandis
  Intron number 2 from transcript Egrandis_v1_0.010378m (loc us Egrandis_v1_0.006097m.g) derived from phytozome v7.0 (c hr-ID scaffold_6; pos 39625127 to 39626948 reverse strand)
ctcgcacaatcaggcaagtactctgctgtttatatactggaagatggttctgtagaattcggtgatgagctatcatcgctcaaattgacctgcgtaactgaagattattgaatttcgtagatggaaaggggaaatgtgaattcggtgctttactgcctttaatttttgtttgggcatatgcttgaaatgttattgttgttgaagggtctagtggccatttcactgtggcggatgacggttgggaagccaactggtagaggttgagagtttgaatataatttcagaaaaaaaaggatgtgggcaattcatgcttgagagttcggcatgcgtggtgagtttccttttggttaacatttgggttggtggtctgtaatcagggcaatggaggttgctaaacaatgaaggggaatgtttagggttcggtcagcaatcttggtgctggagattgtggaatagcaccatttaagagaggcagcggatgatgtcggaattgtttacgatatcgatgtaatggttgtgggaaattactcgatggcagctaattacaatgaatcgcatccttatgattaatagccaattcacagaaattagtttgtttggtctgtttgcaatagcagctttttagcggcataatgcggcgttggcaggtttgaatagttgctgacaaacatttaagagagcttgattcgaagattcgtccaaccaaatagtagaaaaatgaaattctgtgcttgtgttaattttttgtcgtcttctacatataaactcgaaaaaaatccagcaactccctgtttttatttttcaatttgaggaagttatgctaatctatgaacagttatctgctgcaaataatttgtggctgtgacattttttctaacatactttgtgactgttctagagtgacagtgaatatatggccggtcagctgtcagcatttggatattgtttaagtgacaatccagaggaagcagatctctggctgataaatacgtaaagaacctatttccttgatcgtctttgcatgaaaagttttgttgttgctttgtattgtctgaatttgatgtgctaggaacatagttatcaactgaagatccaaagtgaaggtgtaaatttttggatttgaatttgagttcatcaccggtcaacttggtaatgtatgaaaacattttgaatgacatggatactttgaggcaagttcttttcttttatacttggttgtttagctttcaaagtaggaaaatgagtcctaagacttatgctctgtcatttctatcatgatagtccaaggttgtaggattttccttttgatttggacgttatgtgatgatgttagaatctgtaagatggtataaaactacttatcactcaagcccttgactaggtgtgctttgtacatcaagtaatttcttgatgtctaagttccttatttttgtcaaagcaaatgattcagcagcacatcttgatctgatgatggtttaaatagaacggagttatgatcctgaactttgataagtgtgaatttcagtgagaatcatcttgtttcaattcctattgagttccttttttttttttttggatcagaattttcctattaaattctgtgggttcttatttaggtcaacgtttatggggatatgagcttatcaactgatgtgcactagattacttctaacttctattttgtcgttgaaactatgttttcctcagaacaaatcgaccgacatctttggcagtctgaagaattttcatgtttgtccatctttttctggactttctgttggttggatttttataagaattatgctttgtctgtcttatccag

SEQ ID NO: 10143 - DNA, 1131 bp, Eucalyptus grandis
  Intron number 8 from transcript Egrandis_v1_0.014229m (loc us Egrandis_v1_0.014229m.g) derived from phytozome v7.0 (c hr-ID scaffold_1; pos 1395300 to 1396430 reverse strand)
gaagactccttggatagataacccgggtaacttcctttttttggctagaaattatcgccggcttggtccatttgtctctgaaatctaaatctggaagagacaggagaatgtcagcatgtgtcagataatcctaaacaaccacataaacattggatcctgctagtcatattgtggatattctttctacctttctataatatgtttgtcttatttatggatcctaatttgagaattgtgtgctgagcatagttctaaatcccgcccctatcacagtgatggtgctggttgcaggcattattggggctgttgcgcaccctaataattcaaacaaaaaaagaaaaagaaaagtatgatgaagaaggaggaagacaagaagacaagaagttcccactctagagagagagagagttacatagactgtcttcccaagaaacttgcaagcctcgtgtccgtctaattttaacacttacttttccactccacttctctcagttgacttaaaatatagaagaagatttttccttcaatttgaacttactttacgaataatcataaacccaagggtcaagttgtcagcccatctcatttgaagtcaaaattcaagaaaggaagcgttgattgtctcagattaaagaaagtcagttcaattaccatgtagaaaagttgaacatgctcaaagatttgtctagcctaattaatattcgacatataaagtttcaaatccatataattcaacttttggcattcttatatgctttgaaaaacactctgatattcctatatgtcacaaatatagtaatattaaagctacaaaagttaatttgattctatgataattgagtaaacattatgaaaattcatgctgctatgaccacagtcagatattggacggccactatgcctgcatccacgactatcgcagcatgactaaccacaatttaaaaccttggttctgagcatctcgtgttttgtgtcgacttctgagctattattttatgaatgaccaaataaatggatgcttctagtccgtgtagctttatcttttaaaatagaagatacaattaagccataccatttattatttattctatatatcgtgattctctgttgttactgctgcagagtttgaag

SEQ ID NO: 10144 - DNA, 2149 bp, Eucalyptus grandis
  Intron number 6 from transcript Egrandis_v1_0.023185m (loc us Egrandis_v1_0.019233m.g) derived from phytozome v7.0 (c hr-ID scaffold_2; pos 56692662 to 56694810)
ctggtgtaagcttttactcctgaaggattgaaaacttcatttctacatatataaattggtccacctagtgaaggtggcgtagttagtagctgctttggttcaaatttcatccattttcacacaatcatcttggacctttgaacatccagtgaccagattcttcgttgctgaacttttggcgagttttagcttgtttttaaaacttacttaaggctttcttaaggagagggagaaagttgtcgctcccacagctaactaacgaatttagtgtgtgcttgggttagctatggttttggcatttgactttggcccattgttgtcgagacaccttaccccttgtgaactgtgatcgagtatagtgttgcaaatttcagtgctccttgatagaatgtccaaccaaaaagcttaagacattcgatggagagagaccacatgtatattaggagcatataaattatacaaacaagtgatatgctttagcacatcctctcacttgtaaactaagtaagaacgacaagtggaattgaggaataggtcacatgtgagaaatatatcttgacgaaacctggctctaatatatgttagaaagtccaacccaaaagtataaatcactaggtgaaagaaggacacatgtacaaaaaaagcatataaatcctatagattaacgatatgagatacttcaattttcttaattttcagaatcttcggatcgccaaagttggctatctggagagattacaccacatttttgctctactgaaaggtaccaaaataaatcttgacctaaattagacttttggatttgtagaaatggtgagttttacaagtaccagtttacttgattagccatagccaaagttgcgtgtcactttcaaattcagagcaaatataagcaaagacactattacgtttgcataatgaataggcaatgattccaaccaatggtccagaacgtgctgctatccatattaacaacttgactaaacctacctctaacaatctctaacttgaagctgtgtgacatggccttttacttttgtgtcaaaagctttaagttgggcggccaaagtttccataaacacagtccatatgctgtggtttgggagcagtggaggtaatctggatatttctagaagctatggcttcattctggacctgagatttcatgagctcccagattaaaaaagggagggaaaaacctagagctatacttttctttccatgtgaactaaggatcctcctgcatgtccttcctcctccccccctcccttcttaaaaaaagaaaaagaaaaaagaagatcaacaaagcacaagaatttagtccttgaactgatgaggctgaatttgatacttcttgtctagatcactaaatccaggaaagatcttataatcaatctctagaggagggggaaattgctgaagtttaaatagcttttgagctgatcattgtgctgatggccaatgcttgcactgttcttttattttgtcctcccttactctcttttggaatgagttatggctgttaggacaactagtagtattacttacagtaaaatcatgcagggtgtgaacttaatgtggaatatgttagaggatgttgctacagtaagatgagatagagtctgtggcaactgaaaaaaatattgtgatgaatatatcttggtgcatcataaacttaaagaatggatttcatttatctgcaaataaaattttaccgattttttttgggccaatcatactttgttgagtttggtagtttagctcaccactaaataaactccagagagctttcggaacgcattagtttcatcaaagtaataacatcactttccgtgcaaaactatggcacataagaaaaaaatttacatgtcaatagcgttacaaagaaaggacaaacttaacggtttccagttccttcatgctgcaataacaacaacaacagaagcctgatctttttaagtggagcttgcctatgatcctgtatgctaattgagattatttaccatataacaatccctcatgctaaatgagataatttaccatatatatacttccccctgaatttgatgttttgagattgagtagatcagatgagagagttgttcttgatacaggtatctatattgaagagctttcccctccgtttctg

SEQ ID NO: 10145 - DNA, 583 bp, Eucalyptus grandis
  Intron number 1 from transcript Egrandis_v1_0.007751m (loc us Egrandis_v1_0.005810m.g) derived from phytozome v7.0 (c hr-ID scaffold_5; pos 23111857 to 23112439 reverse strand)
aagatcagggacttgcccttctacgagcgccagaggttcctctctctctctctctctctctctcagagagtctgtgtgtgggcggccgggtggctatggggtgatggcctgtgtcatgtattgattcagtggatttggagagggtgttggtagaattttctggtgatttattgtattccattagcaatttgtagcactgagtttatttgattgattgaattagaagatggtattagtagaattgtggtgatctgttctcttctctcagcaatttgtagcatccagttcagttagtttagctcactgctgagtggtaactgtaaacatggatccgtataaagtcaattttctgtttattaacgaagccagatctttgcgtgtcgtatgtttgagaaacttgagaaaatggaagtggcgcgatttcaattgttgtgtcttcattttggtaactttttcggacatggtaagaatttgtcacttctcgttcatgaatttttccagttaagagggattcgtgagatgtttgtatgttcatgctctgttgataggtacgacacctacttctacaaggtgttcaaagtgt

SEQ ID NO: 10146 - DNA, 722 bp, Eucalyptus grandis
  Intron number 2 from transcript Egrandis_v1_0.019575m (loc us Egrandis_v1_0.016450m.g) derived from phytozome v7.0 (c hr-ID scaffold_5; pos 11646077 to 11646798 reverse strand)
gcctaggtgatggggtttgcagactatggtttggcacctgtggccgagtacttcttgaggaattgagaagacgggtcattgagtgacctgatgttcatggttcaggacaggggcacgattgatttctggtaatgattccttttccctttaaaaatgaagaattagttggaccttgaaagttgcatcaaatttcagaccctaattttacatctccaccttcactattatttggataaagtactagagtaacgaatcttcttcacggtctcttcatgctatttgatatcttacaaggtcgagttatcccaagttcattcagactgaatgcagaagactcgtatataaatcatttttatagtggtagactgttgtatcgtatcctatgaaaaggtatttgccttttgtgcactacgttgagttactacattgtcgccatcattcttggtctttaaaccgcattaacgtactttcgatcttaatctttataagttctttgtttaggatttaaagattttttgtactaaaatatttcatattcataactgtgattttgatgcatcatttgtgaatcacactttatctccatcaatttgaatactgaaagtgtaattctcaaaagtaactttgtaggtaaaaggcgagcattttctttttcctgtttggggggtttttgttggtattgaagtttccataaaattctttgatcaggttccacttataag

SEQ ID NO: 10147 - DNA, 5516 bp, Eucalyptus grandis
  Intron number 2 from transcript Egrandis_v1_0.019190m (loc us Egrandis_v1_0.018107m.g) derived from phytozome v7.0 (c hr-ID scaffold_5; pos 2415259 to 2420774 reverse strand)
ttaagtctcatttacaggtaataaaagcacctcatttttatttttattttcaagatttctctttctctaattaatcgaaaagcaagaaaatgtagccagaaattctgtctctcttgcatcttgtgctttctctgagaaattgcatgacgttaagcagtaatccatttttttttctccatggtgttataagcatcaccacttgcattattcaaaagctgacgttgtaccggaggtctgtttagtgcattggtttcagattccaagattttcacagcttaagccctttgcacactcttttctctactagatctgatggtcctgcaaagaaactaatcatgaacagctttttactctcaagaatcaataacccaagtcaaaaaagaaagaaaaatatattaataggttgggggtggagagagagagagggagtgttaaattgctaaagggaggagagataaggctgaaactttatcttacgtacaaagcaaccaagtcttttacaaaagacaaaatacataacgtaaaacacaccataactaccaatgttctccataaaacacttgctccactaacacctaaaaactaggataactaacacatatgactccactaactctaataactaaaaaaccaaatcagcaacatgtgaaaaatgaaataactgttatattaacaatccctcccttaaactgatatttgctaacattcagtttaaagccttgactttttttcaccgtgcaaacacctagtaaccttctaagcttcacaaatgactccatcttgagggccttggtgaatatattagcaacttgattttcactcctgcagtagattagatcaattgttccatcattgctaagatctctcaagaaataaaacttcacatcaatgtgcttgcttcttccctgtaacaccggattcttggagagttttattgccgagttattgtcacaaaaaattttagtaggtcccggttgcttgaattgtagctcctcaagaattctccttagccaaatagcttgacaaacactagctgctgcagcaacaaattcagcttctgtacttgacaatgtgaccattggttgcttcttggatgaccacgaaatagcacctgttccaaacataaaagcataacccgaagtgctcctcctatcatcttgatctcctgcatagtcactatcagcaaatcccaacaaatcaaacttttcacccttcttgtaaaatagcccaaagtctctagttccttgcaagtaacgaaggattctcttggcagctaacaaatgcatttgtgtaggattctccatatatctaatgattaaactcacagaatacattatgtctggtcttgttgcagttaaatacatcaaattgcccacaatttgtttataaagtgtgctgtcaaccttcctcccttcatgatctttgtataactttaagccaaactcaattggagtgtttacaagattacaatccttcatctgaaacctgtccaaaatttctcccacatatttcttttgagaaataaagatcccatcatccgattgtaccacttctatgccaaggaagtaatgcatcatactaagatcaaacatttcaaacttatccatcatagatttcttgaattcttcaaacataccatcacaacttccagtaaatataagatcgtcaacatacaagcatacaataagcattttccctttatctccaatcttgacaaaaagcgtatgctcataaggacattttgaaaaatcaactttaagaaaataagtttcaatacgactataccaagcccgaggggcttgttttagcccataaagagctttcttcaatctataaactttatgctcattttcaatcttgacataactagggggttgctcaacaaatacatgttcctccaagtacccatgcaagaatgtcgatttgacatctagttggaaaataggccaagaattctgtaccgccaatgcaaccaccaatctgatcgtgtcatgtctcgcaactggagaaaaaacctctgtatagtcgatctcatattgctgcttatatcccttggctaccaaacgtgctttgtatttgtcaacttcaccattttctttcagttttgttttaaagacccacttcacaccaatggttttttgtccatccgaaagatcggataactcccaagtatcatttctttcgatggaattaattttatcatctatcgcttttcgccatttttcttctttgacagcactctcaaaagttgtagggtcatagtctgaaaataaggcaaagtgagttattgaatctccaattccagttacctcataatcttccatccaagcaggctttcttctaatgcggcgaagagattgggcttcttcttcattgacttcagtgcctgttggtgaaatttcagcagctgtagaagttgtatttgatgaattttagggcatataaggtgctaaaaattgctcatgttcagcatcattgtcataaagaacttgggtaggctgctgcctattccaatcccaagtgttctcttcataaaaaataacatccctgctagtcacaatcttctttgttagtggattaaataatttatatgctttggatgcttcacttacaccaagaaagacacatttttcagccttgtcatcaaatttcttcattttcacatccgggacatgggcatatgcgatgcatccaaaaattctgaagtgatctatagccggtcttctcccactccaagcctcttcaggtgtcatattctaaacagcaaaagttggacttctgttcaaaacatgaatactccaatttactgcttctggccataaagtctttggaactcttcctcttgccaataaacttctcaccatgttgagaattgttctatttttcctctcagatacaccattctgctgtggtgtatatgcagcagtaagctcttttcgaatgccatactctgcacaaaaaacttcaaattcttttgagcaatattcaccaccacgatctgttcgaagagtcttaatggtctttcctgcttcattttcaacacgagctttgaagcttttaaatgtgaggaaagcttctgatttttcctgtaaaaaataaacccaagtttttctggaaaaatcatcaatgaatgtaattaagtatcttgtacctccattagaagatgagtttataggaccgcaaatgtccgaatgcatcaactgcaaaacatcctttgctttccatgacttttcttttgaaaattgagaacgatgttgtttgctaacaacacattcttcacaaacttgggaaggaacagcaatatgaggaagacccgtcaccatgtttttctgttagagggtcttcaatccactaaaactcaagtgaccatagcgaaaatgccaaagccatgatggatctttctttccaaccatcaaacaagactgaatattttcaatctttaatggaaacaatctatttgaattcataggaacaactgcaatagcacctctaaccgaatcataaatttcacacacccctttgaatggtgattacataaccattttcttgtaattggccagcactcaataggttatttttcaagttaggaacatacaacacattagagatcgtttccacaaaaccattcttggttcttatcttaatatcacattttcccatcacattcacagtagaatgatccccaaaacttacagtggaatgaaaatcttcatttagataagaaaaagaagacttacttccactcacgtggttactacagcctgtatccacataccaaatatctgactcgcgctccttttcatcttaaacagccatcaacaacgtttctgctcttttttcttcaacaaagtttgaactctctaccttttctttattattaggcagcctagtataacattcggatgcataatgaccaaatttatgacatctaaaacactgtaccttggctttgttaggatcccgtcctctgcctttgccttgaaattggtcattattggctttgaaattcctgtcaacatctctatttccttgatctccccttcctctacctctacctctaccccttcctctgaaattgttggaatgagtattggtagaagccttcaacgcttgctcctctactgttgaacttctgttcatcttctgttcatggaccaataaggagttttgcaattcatcaagagataatgcatctatgtctttcgactcttcaattgagcagacaacataattaaactttgatgtcaaggaacgtagaatcttctccacaatggtaacatcgtccatcttctcgccatggaatcgcatcttgttgctgatctccattgttctggtacaataactagtgacagattctccatccttcatcgctagtgtctcaaaatctcttctcaaggcttgaagctgtgcacgcttcaccctaacagagccttgatatttcttcttcatggaatcccaattatccttggaagtttctttgcaaagaatagtctccaagatggaacgatcgatagtctgaaaaaaataattttttgccttcaagtccttcaactttcgagcttccaattatgctttctagggatctgtcaaagccatgcctactggtggctcttgaattccagatttgacaaccaaccaatactcttttgatcgtaaaaaattctccattaacatactccaatggtcctagtgaccatcaaagtgtggaattgctggttgaacaaaattgtcggtggccattggaaatattgctactgcaattctctcacgaaagcttttttttaactctcacgtttctctcaggctctgataccactgttaaattgctaaagggaggagagatgaggctgaaacttcatcttacgtacaaagcaaccaagtcttttacaaaagataaaatacataacgtaaaacacaccataactacccatgttctccataaagcacttgccccactaacacctaaaaactaggataaccaacacacatgactccactaactctaataactaaaaaaccaaatcagcaacatgtgaaaaatgaaataactgttatattaacagggagggagttgctgttatcgatttcagagaaaaaaaaaagtggagtcagccaagccgagagaagagcacaattatgctgagttttttcttttttcttttttgtttcttcagaaagttctgggaaggaaaaatagggaaagggaaaaggactaagtacagaacatcatcatttctcaatgatgtaggtttcagacaggggtttcttctcaagtggacacactcgcacaaccttcatgcggttttttatttgtatttctgcatgaattttaggatatggcagtaatgtttttgtatgtgcacatattttggaggcatatatatagttgaagcatcatgcacgcggagattaatcagtccctggtttaagcattacataaaacccaaataaaagactttctttttaggtcgattgccaaaaaaactcataaacaagtttactcgtggggtttgcag

SEQ ID NO: 10148 - DNA, 2714 bp, Eucalyptus grandis
  Intron number 1 from transcript Egrandis_v1_0.051435m (loc us Egrandis_v1_0.051435m.g) derived from phytozome v7.0 (c hr-ID scaffold_6; pos 33127837 to 33130550)
ctgatactatcaataaagccacttgtttggtgagttttcctaatttgaagaaatcattacatgaacttacatatgttagaagtaaatttgaactattaaatacgataaccatatatggatcccacatagatctcaccaaatggaatggtctatttatcttatcagatttaccatattccggtaatttttttctgcaaaacgataattttttaatgaggatagttattgaaaaagtcttaaatttgttgcacttgtttaatttagtcctcaaaaaccttttaatcatattaatttaatcttaaatattttcacattttgttaattagtttatccaactaattatagttagaaatcactgatgtggatgctagccgtcctgtatggatacttttctattctattctttttcttttttttctctttcctccactgatctctaaccttggcagtggtcgacaattactcgacctcgctagcttaaattcagcctcgcctgaggtctccccttactggcctatagtgagggcgacccatgttggcctctagtgagggtcagcctcacaagcatcgagggagggttggccttgcttaacgccggcaaggacaagtttgattggagctagtgaggtcagcccttgcccaaggacaacaagttggcttcttgctgatagtttcctttgaccgattgtgggccatcaccgaggccaatagaggaaaagggaaaaaaaaaaggagagaaaagtacaaaaaatcaataagaaaatttcgaagaaaaattaaaaattaataagtttgtctacattaataccgattgtgccatgtaggataactagtgcacacgtcaacgatttctaatcaaaattggtcagatggactacattagcaatttttaaaaatgtttaaaactaaattggccaaattaaaatgtttaggactgagttggcacaagtgcaataattttataacttttttggtaatttaagcatgcttatctaagctaattcaaattgacttgggcgctcgttgttttagcaatggaggttctctttgttggaaggagaaggcgggtttccaattcaaggaatcaggagccaccgtagctttttccttctttttgcatgtggcttttggtcattcagcaatgaaaattgccatataggccaagggtacaacataaagttacgaataaatgtttgaaatgttaatactaaatttatgaaattgatttactaaatgatgaaattgattatgattgggtatttgaagtttgaacaactggctcatcaatagatcagtagccagtttcataattagattcggcatccatagtattattctatcaacaatcataactttggcaactcaaatatattcatactgttactatctctattaatctaatctgaattacatttctaagctttcattttaagttcgtggaggattgaagatttttatcgtagcactgggaaaatcagaaaatgaaaaagccaaagacaaatatagcaaagaggagagagagaatgaaaaccttatgttttgctgcgagtatcgttttacgacgattttttcaattaatattagtgatttaagtttctcaaatcagtttgtcttgttctttcataaatttgtacttgcgagttggtattaagaagggttgttgattaaaaaaaacgatgtgataaatgaagtaagcgaattggttttcactaattattttataaaccttttactccatattgtagctggtctagttgttcattcgaccgaagggcattatcaaggaaaaatttatgtttaaaataattgagtgaaacacatttcttctattgacgaaagaaagaccaataggaaagaaaggaaataacggcaatataatgaggctgcgccgtttataatggaaagcgttgtttgtagacaaatcacacgttccaaagtgtaaatctcctaaacacgaaatattatgtgtaattaagtctacaggacgtaaccatacttatcctgcaaatcgaagccattcatcttatatgattttacagtggtcattattgtgtttgcacagtaattcgtttgtatttgttgacgtactaaacaatcacattaaaagaatcgtctatctaattagaggcatctttggaccggaagttcaaatggacgacaaagccaaaggaaattattttaaagtctcagacatctcaactacccactaactcccgtctaatctgacgtttttgagttgattattcctaaactttcaggaaaaattattctttagggcctgtctttcggtccaacgttaaaaatgccaacgttggatcaagaagataggtattatccaattcattgacgtcgattgcttttgtcgattacttttataagttatttatggaagtcattgtcgtttgtatttctgacaaagagccaaaagatgacaatatttaatattgccgtcaaagatcatttctagattcatgttaggtgtccaatgtgaataaaagaaatttatatatgattcaagttgtgaaaaagaaggtacgacttttacaggaaaaaaacgtcatccttactctaactaaattatgtttacatgtattagaaattgtcagttaagttgcatgagttgtatatttacttcaataatgacaagtataaagaaaaactatgtatatatattcgtaggcacttatatcgggaggcacagacaccacggcggt

SEQ ID NO: 10149 - DNA, 6345 bp, Eucalyptus grandis
  Intron number 9 from transcript Egrandis_v1_0.016137m (loc us Egrandis_v1_0.016137m.g) derived from phytozome v7.0 (c hr-ID scaffold_11; pos 44948846 to 44955190)
tattttgtcggtaaccacttgtctcaattaacatcaaagtttcgttcatcaatgcttaatcaatgttattaaactccctatttaaatcgtgagaccgtgcaatctcaggattcaaatatgttggaacaagtcagctcgttcagaaaacatagagaagtatgaactggctaaaaccgcacattcggttgttgaaatcactaaaatcgtgattttgtaggcaattctaatgatttcaggatttggacctttttttcaataatttgcttgcacagggaatgtccaagcccaaaaagtgaaaaatgatcaaaacggtgcacttcaggaaatgacaagaactcacaatttaaaagacaaatatctcttgcattctttttttttctttttaatcttattctgtttacctctctctctctctctctctctctctctctctctctctctgtgacatcatgttttctttttactacgtggctttcctgattatgcttgcacgagccagatgattaaacccctgttttccctttttataatcaaatgaagaaaatcaccatagtttaagatagaatgcgagacaaacatttgaacaaatttatgctgtgacatcgaagttacctaggtgggtatttgttgtggctttgtttctggttattgaaatggaagaaatggtaccgttcatttccaatttataacttgaaaatataggtctcggctcctgatggagtagatcatttttaggaaaatcgattagaatttcaacactccgccttgattaatttttgtgatactccgagtatattctatagtgtctcgaatttggcttgtggtagtgcttttgcatcaaggaggagtgttgaaagtatcttacaaagaaatgcctagaactatatagtctaatagtggatagttgaatctagaggtgttcaagtctcttaatgtctcttaaggagtagttagaatttggggtaaaaaaagagaagagtctaaaataatctccaacttgcatattttcactatgttggtggaatggatctataaatagagcttggattattcatgtaaaaagggtgcggggagtagagcttataaagccaaattcttatactccacaaattccttatgtaaaaccatttctataaactaatgagattatctcccattacctcaaaaacacgactattaccttgtccccttgtcctcttgtcattcctctgccaaacatatcctaaacacatacattcttgcacatcaaaccaaaaactaatggtggtagttaaaaccacgcttctgcaaactaatagcgttatcaaagctaggcaagtttggatggttgggcatttgtcctaaccatcctctactgaaaccaaagctagatcttggccttttaggttggtattaagtggtttgtcctaaccaccctttactaaaatcatccattcaaatcttccgacaccaaatccatggccaaagttgcctcatcctcctgtcccatttctattttgatgggaataattatgattattggagcattaaaaaggctactttcttgatagtccaagattatgggatatcgtggaaagaggttatgttgctttgcaagaaggtgcaagtgttcccataaagcaactagaaaaagatgcaagggcattatggttgtgtttggttcagttttggaaatgggccttgggaaaacgcaaatttctttggcctaaaaggctttggggaaatgcaaattgcatttggtaaaaaattctttgcaaagctattttagtgtaaacaatgtttggcaatttttatttttttttataaagagcttttggatgaaaaatattaaactcttagccgactctagtgaaggtaagggtagttttggaacaatgagaggtaaaataaaaaaactaaaaaatttatgatagtagttttgaaaaaaaagaaagtaagtttcagtatttggtcaaatgctgaaagtccaaaactagtctctattagcattgggctttcagttttcccaaaaccaacgcttaactgaaaactccttaagacaagcttgccaaacactccagcatttcctttaaggggttttggaggttgaaagctcctttaaaaagctgaactaaatgcacctatgtgttattcatcaagcactctgggaaataccatttccaggaaaaattggagggaagattgcgaagaaggtaggggaaatattacaagaagaattccaaggcttaattaaggtacgcgcgatttaacttcaaactctaagaaaagaatgagaattctaaaatgaaagtatatgagactgttcaagtatatattaaatcaaatgagagcttatagagatgagatcattgatcaaagggtagttaaaaaattattggtatcacttgctagaaaatacaatcatatcgttaccaaataaaaggaactaaggacttaacgatcctgtcgctaagtgggctctctagaagcacatgaaaaaagactaatggcacaagatgaaaatttagttgaaagtgtcttttagtctaaaataaacatacggtcttatgaatctaaaaatggtaggaagatttcatggaaaattaaaagaagaggagaaactactcaatagggaaaatgcttgccttgcaatttttgcaagaaagctaatcagttggggaaaaattgctgctttcgggataaactgcaatgctacttatgtaaaacatatggccacttagaaaaagattgtcgcttgaaaataaattatcaagtcaattacgttgaagaaaaagaaagtgaagataacatattctacacaggcgaagtagcaagtgatgagacaaattatatgtggtacattgatagcggatgtagcaagcatatgatgtgatgaatctatatttactgatattaatacatcggtgacaactgaagcaacattgggcaacgacacattaattgatgtgaaaggaaaaggcaccatctcctttgaaacgaataagggcccaaaatatatttataacgtatatctagtcccaaatcttgcccaaaatctacttagtgtgggctaaactatatgaaaaaatttatggaatcactgctaactattctaaaagcttaagttgttaggcgaatgcgtgatttaatatttaattatcctaatatttttccttatacttagtctggtctttttgcctagtgctaagcatgaacatatttaattggggggtaaatggagcatggaaatatttgaattcaagacttccaactctaatattatgaaagattttatgggattactgtcaactgttctaaaagcttaagctattaagtgaatgcataatttaatatttatttattctaacactatacaaaatgggtactctttatacttcaaaggagatgcatgtgccatttatgacaaatataaaacatattgttgcttctgttaatatggagcttgatttgatggaaatataccggtgatattgctatgaaagctcaaattgatgattcatgtctatggaattgaagatttggccattttaatttctccaacaaaaagatatgatgagagatttttcagccatttcagaaatttcagatgtttgtgaaggttctctttggaaaacaacaaaggcagttaattccatttggagacacaaggagagctaaaaagcctctagaactagtgcatacggatgtttgtggtccgatgaaggcctggacacctagccaaaataagtatctcatttcattcatcaatgtctacacaagaatcatgtgagtttactttcttcgagaaagatcggagattttctttattttcgggaaattcaagaaccatgtcgagaattaagagtggctgcagaaagtcttaaggagtgatagaggcacagaatacaacttaaagagagttctctaaattctgtgaagatgacattagctaacagttggctacactccagagcaaaatggagtggcagaaatgaaggatggaaccaaagatggtgaggtctatgctaaaggagaaagcatttcccaatttgttttaggcagaagcaatctacatggctgtatacatcttgaatggttatccaactaatgcagtccaaaataaaacttcagttaaagcatggagcagatggaagccttcagcaaagcatcttaaggggtgcagctgcatatgctttgtccatatccttgcttagaagaggagcaaactcgacaagaagactgaaaatggaatattccttggctacaacgattgatcaaaagacattgtgtctacaacccaagaacaaaaaagttgatgatcagctgagacttcgagtttgatgaatatgtcgcttggaattggaagaagaaaagatcgagctcaaatattgcaagactaaggatcaagtcgcaaaaatatttacaaaagcactactatggccaaatttaagaccctaccaaatatgcttgacatatcacaaaaattgatagaggagtgctgagactttaattaattttcctgaattaatctagactccacaagcttctagacattaattggtagttgtggattgtggtctagaagtctctaagtgctagttgaattgcgtggctgaaaagccatgaagttgttagagttattgatgaaagaagagtctgtgtaaagctatgtggaagaactttttggactatgccggtcaatgaaggttataaatagccaattcctctcctcttgagtacaaccaaaagaagaaaaactaagaggtctatgtacaaacctttatgatataaaacttcttgtcttcccttgctcctcattttgcttcccaccattctctattagaaatacaccaatagaggtcctttgtcccattgttgcttggttgttgagaatgcccacacacttgcacacacacatcacttctgcaaacctacatgggttcatcaatcttagatggaagtccaattttgaccgacttgtgcttaactaagtgtccatgcttgaaatgcaatctgttgcaaaagtgaattatgttcattgcaatgatgggtcagattgttgttctcccttagtccataatgctgggtaatggacccctatgcataaagttcataggaaggggaatatggcaactattgctgtcctctaggcttttgcattcttaatctttgagagtgattagtgattacatcatctgatacgagttcatgatgttcctctaatttgaagtttctgatcattgggtggttgccatatttattgctgcaccttataaagtagatcaggctgatcaccaaaattttggaggatttagtatctaggagtcagagcaaatccctatccacaaagggctaatcgcccaaaaattcatgaactttcacctgggtgacaaaagtttccccaacttttcaaaaaaacccaaataaactcaggaactattatccgagggacaaaaatccccaacattaagttgtttgtccatgcaaactactgatgtggcgcatggtgtggctaatggtgttgatgtgtgccaaaagacatgtcagcttgagccaaaacatgctgcacacctattagcaaaagccaaattaattgtgtctttgaattattgtttggcttttcttaattgggactaatctgcttcatgtgtgtttcaggaaatcacaccaactcttctctactaatttgttttataaagtgttatggttaggttagccacttcatatgccagatcagctagcttggacggaaaacttagtgctggctatttttagtcacttggggtaaaagttcatgagtttttgggtcagctcaaaagctcaggtctctttttgggattcgtccgtcaacaaaataaatacccaaatttctatccactgaaaagtggacttccaagtgcagaataggcttcagtagtcatttagtcttatgtctctacaaattattatataccctcagctcatattgtctttttttgttcaaataaatagagttcttttttccaattgaaaagattgtattttatctggggctcagaaaaatttgtcctctggcactagtttaattgatctgatatagcttaattaaagccattcactactgattgacatggtcatccttgtgtgcatgatttgcttcgttaccttaacatatctgatgttgttattagatggccaaaactgcatttctttggagaagcatcaccatgtttgcaggggctagttggaccaaggaaactgtttctttcacatgttgcttgcgttcaaattctctgtttttgaatttagcttcaagaaacagccatgttcttgatataattgggcactaatcatatcttggctatctttgggttccttcagccaaag

SEQ ID NO: 10150 - DNA, 3762 bp, Eucalyptus grandis
  Intron number 5 from transcript Egrandis_v1_0.048654m (loc us Egrandis_v1_0.048654m.g) derived from phytozome v7.0 (c hr-ID scaffold_3; pos 78040145 to 78043906)
caatttcccagaaaaacaaatagtcggcggttgtgctccgcaccgatgttagatatggggaaatgcttcagaatgattccgacttatgagtgaagatcttgctgcagtggattttcggtctatcttcgataagaagttggagtctctttgaaaggtaaatattgctactttttgctttctttgacttgaacatctgtacagctccatgatacgcaccacacggtccttttctcttttggtactgcagtcaaatttccgagcagtgtcctctccacctcgtgggcttggaacttctttcttggtaggcccgaccttgggggcttggacaggcaagtttgtgctttgaaatcttttgccagctttcgattttaatttctcaattctttcatttattttctattcttctagtgaagatgcataatggtaactggagcacagaatccaacataaaataaaactaacaacagaaaatttgatattagataattcaatttgccagtgctttgtgcatgaaatcatggaacattcttggcattttaatttcttcatttttcgctcgtttttgtcattcagaagacggtggggacagatttagtagcaatatactgggtgggttgggatggatcctcaatgtcagaatgataattgggcaaagactctacttggtggaggaggagagatggctggctcttttgtttgaatgggagatttgtagccttggaagtccggtggatgcacgttgaaaagataagctgatgggactcgagtgcaacacgtggcgtcgcacgctgctcgttcctttttgggctgaggcttaaaagattaacaggggagtcgcagctgcagtgttgcagagttttgactctcaatctgggtggtaacttaaaagtagtaagaacaaagcctttccggtacccatatcagtgttgcaacgagcgtcaaatgggtaatcattgtctcatatctgttttaatcaatacactgatcccgcatccgtattctgcaacttccatcaggcactgcatttttccatgaaacattgttgtgcattattatctgcagtgcttcgagctctcccttatgaaggttcattatgcgacagtcatattattttagcacttcgacaagccaaaataattcgtttgcgttttataaaaaggattctccaccgtgaaagcttattatactacttatggccatgtgataaggagaagaacccacatgcttttgttctatgatgatcgttttcattctctttcgtttttttctaattgtcttgtaaattgctattgagaatggtgatttgtgggtgattttcctgaggaagcctccaagatgtaaccgaaactagaatacttcatagggtcaacttgtcatcttaaacttatgctctaatgaggactattcatccagactatatatagaagtgaaaaaaacattttaatcatcttgtaggagagaggaaatgcatagtgcgttcggatatcctttagaatatgttgtttgatatggatttcaagtatggatatttacctgtgtcatgagaaatataggagcatcttgaatattaccgtatgtatgttgtgagagactttggctatgcagacgccttaaatatttccatgttcccttcaagcaacagcctttggctaccaagaacactatttgtgatgacagcctctggcctcgcaaacaaattttgagcttgaggttcttgagattggaacaggctactattggagggagttctccaaatactctatcaaaattaaggtggtttgattggcaaggatgcagccagatctaaactacttaatttgcatttggagaactagtcattcttgatctatctcgcagtttggtcacaggagattctcaactacggggacaaatcctgaaggtaaagtgtacattagcctgggagtattagaatagctagcgccacctgagccttttctctcctcttttcttgcagaaggcaagggaattgaaagttttgaagctcagtagcttgaaagtgctagtatgaacacctagaggggaggtgaatatgtgtagaaacagattctgcaaattgcagtgaaaatctttacttttaactctgaataataacagacttttgaaactgagtctaaagagcagcagactttgagcgagatcagactttggcagttaaatagaattacgaactaaataaaaagattcagggaagagaataagaacacaaggtttatagtggttcggcttagatcaagtctacgtccactctcccacgctaacagccttcttggctggattccactatgcaatcaacaagagattacaactttgagtgcaaatacttagtagtagatcacactatctcactaagtcactcttttagtatttctctcatgattacaaacgtttaaactcacaagaaacaagtgtatgattgaaggtcgctcagactttgaaattataaattctacgctctgtctcttacttgctcatcagtaattgatttccttaaatactcatccacttccaaactaaccgttggacattatctcaaggatcgtcttccaatctacctattggacagatctgtatctagaagatttagtagccgttaagtgacaaatgtagaatcccaaattgatttcgatcgcccatacaaacagaatcttggtttccataagtaaagtttctttgtatagaaagtttttgtcttcaaaatctaattgccaattaattagattgagtcaattaaatcaattttgatgtggaatccaaaccaaatcactagccattatatctttaaggcttgtattacgttttatcgaattgtttcgttctggatgtaaagtctaagagtaatagactttataattagactttacaatttgagtctgagcatattttgcttttgaacaaatttagttttaaggtttgaacataggctgaataagttcagcttcaacatagagtctgttttctagttcagcttcagcatagagtctatcttctggttcttcattcatgttcagtctggaatttgtcagagtaaacagacttatgatatagaatagactttgacactaaagtatggcaatcttcagactttgatacagaagtctagaaatattcagaatatactttggacatgtgttacgttcagtcttctggttgtcttcagactttgacaatatcctttacatgttttatcatctacatggtctattacttaaccattaaacacgttagtagcttttgatttattttgtcatcttcaaaacatcataagggatttccctaacatagctcactagcatacatctccagacctccatacttcaatgcatttaaagagattagtcctggaacgttgttccctattattataaattggttttttttttgtaagtattattattataaattggttgatccataggtaatctaaagaactaaatctccttaaatcttaggctctgcagattctccaaatacttgctagaagaactattatgtgaaagctttggaagaacttttgattgatggaacttccgtacatatgattcatttctaacaagcctctattgagtgacttaagattttgagtgcttgccagtgtgaaagtttgaatcatatatcagattttaatggtcacttgacttctcttttctatcttggattggatggtgctgctattgatagcctcccagattctattggatccttaaagaaacttcggagctacttttaggaaatcgtgagaat

SEQ ID NO: 10151 - DNA, 4951 bp, Eucalyptus grandis
  Intron number 2 from transcript Egrandis_v1_0.021247m (loc us Egrandis_v1_0.021247m.g) derived from phytozome v7.0 (c hr-ID scaffold_581; pos 6645 to 11595)
tagaagagtacttgttaaagctcataaaaacaacaatcaaaacagaaaaatttctgttttttaagagagagaaaagattaaaaaaaaaaaaaaacatagcataacacttcatacgtcttgtgcttaaagaaaaaaaactgtcgagtacaaccactaaatacaaagcagaaactgctcacgtacgtgcaacacatagctgcacacaaacgtgctattaacttcctagaaaatagcaaaaacactaaatgcataactaaatgaacttggctgttttttaataaaaaaaaatagagtaaaacagaggaaaacatgacagaaaacagtagctgaacaattccaacaaacttctccttggatcagttgctgctgcagattcctattttctctcttaacagctcaaatcttccagcctaaagtggttttgtgaacatatctgcaagctgatcttcagatctgcaatagatcaacttaactttgccactttgttgcacctcacgtagaaagaaaaattcgactttgaaatgcttggttttgccatgtaaaactagattatgagatattgctaaagcagcctgattatccacattaacttcaatgcaatcactagaattcaaccacagatccttcattatctttttcagccacaaagcttgatttgcagctgtagtagctgctataaacttagcctctgctgtggactgagctacaatcttttgctttttggaacaccaggagaaacaagcagaatcaaaactgaaacaatatccagacgtactcttcatgtcatctactgaaccagcccagtcgctatcagaaaatccttgcaaattaaacttttgacatttcttaaacttcacaccaaagaacaatgttcctttgagatatctcaaaaccctttttgctgcaatcaaatgtaactgactatgactactcataaacctggataaaacactcacagcaaatagaatatctggtctggttgctgtaagatacatgagacacccaatcagacttctatacatagaagcatctattgcatctgttccaccattcttttgcagcttctctttagcagccataagagtgcttacacttcgacaattttctatctgaaacttctttagaatttccttcatgtattttttttaacagatgaagatctcatatgaagcctgtttgacttccagacccaaaaaataagccatctttcccaagtctgacatctcaaaaactgcaaatagatcttgctgcaccttctctatcaattccatatcattccccgtcactaatagatcatctacataaagtgacagaattacaacactgtgattcaccttcttgacataaagagtgaactcacttaagctttttacaaagccaaaatcctgcaaatatcgatctatcttcccatactaagctcttggagcccgcttcagtccatatagagctttcttcaacctgtatacactctcttcttgctctttgatactgaagccttcaggttattcaacaaaaatctcctcctcaagctctccattcagaaatgtagacttgacatctaactgaaatatataccaccccttctctgctgcaatagctaacaataaccttattgtatcaagtcatgcaataggagcaaatgtttcagaatagtctactccccatatttgtgcatagcctttcaccaccagtctagctttgtgtttattgatagaatcatcaggattaagttttgttctaaacacccacttaaccccaatcacattcttatcagatggtctatcaacaagctcacatgtgtggtttttctggatcattgcaatctcctcttgcattgctgcaatccacctttgatcctccttagcttccacaaagttagatggttcgagcattgccacattgcttctttcatagatttcagcaagtgaccttgtgcctctcactggtaaatcattcacattgtcttccaatccatctataacttcatcaacctctacatctgttgcaggttgtttttcgaaatgttgctattctgcactctttctttccatccaattccactcatcttcctctagaaaaacaacatctctacttacagttaccttccctgtcatagggtgaaaaattctgtaagtttttgattggagattgtacccaatgaagattccaagctctgctttcttatccagcttgtccctcttaacctcaggaacatgggtgtaacacaaacacccaaaaaccttcaaatttttcacagaaggtttaacaccataccagacttcaaaaggtgttgacctctctaaggcctttgtgggcaatctgttcaacaggaacactgcagtattagctgtttcagctcagaacttcttaggtaacttcttctcctgcatcatacatctagccatctccataatgcttctatttttcctctcactgaccccattctgttgaggtgaatagggagcagtgaactgttgcacaattcctgcttactcacaattcaacttaaacttgtgaccagtatactcagaaccattatcagacctgagcattttaattttcttcccactctgattctcaattaaggctttaaacttcacaaacacattagcaacttcagacttggcttgcagaaaataaatccaactcattctagtcatatcatcagtgaaggtaatgaaatacttgctaccattgagagaagactcagacataggtccacatagatctgtgtggactaattgcagcttctcacatgctctctagcctcctcctttgaaaggaaatctggcttgcttgccaagaagacaagttctgcactgtggaaattcctccttcaaacttggcaagtcatttgccaagctatttctctgcataaacgacatgctcttcctgtgaacatgcccaagttttttatgccatagatctgcattttcttctttgcattttaaagccatttgttgcatctcttgtggcttgaacatgaaactcttgtccctcattgggattcttagtacttctttgctatctgcattattaataagacattccttccatttgaacttcattttatagcccttctcaactaattgaccaacacttaatagatttcggtcaatgtttggcacaaaaagaacatcactcatcagcttcacctccggatttccttcaatagccactgtacccttcccttgcacttcgatatactgtccgttgccaattctgactctggacctgactgacctgtctagactcctaaacagctttgaattgcaagtcatatgattggtacagccactatccaccagccatgcatcattcccaacagaagattcagaaaaagaagctacaaacaagtgttcttcctcagtttcattcaatgctacctgtgcttttcctgcttgctggtaatttttttctttgtagatggcttccatgtgacccaacttgtgacatcttctgcatctatcatcaggctttctccaacatctaaaaaactgatgattagttccaccacagtattgataaggctttttgttcatcttccatttgctagacccacaagaatttccttcttttgctacaaacttggagtcaccagcattttctctggactaaatccatttcttccctttgcctccatcatttgacttcactttagcttgcagcgcaccctctacaaactcttctcttctcatcagtcttctgtgctcctgtgcttacagagcatttaacaattctgcaagctttatatcagttaagtctcttgtattttccagagaagctatggtggcttcgaacttctctggaagagacaccgagatcttttgaacaagcctttcatccttcaagtcagtccctaaaactctgattttttcagctatcccaactagcctatcagagtactccttcactaactctgaatccttcatctgctgtctctcaaactccctcaagagattcagcaccttcatgcctcttatcttctcatctccctcgtattcatccttcaagaaatcccatattgcctttgcataatcatatctcatgatccttgtggagatagtaggtgaaacaacatcatataggcaagactttgccttggccttccttgtgattctctctttatggtactttatctgattcaaggtcggattgtctggaagtggaacaacctcataatcattctccacagcctcccataaatcatgaccctccaagaatgccgtcatcttcacagcccaagcctgataattttctccagtaaagactggagcagctattgcatagaatccactcgattctgcctccatcagctttttctttgcagattggaagcaattttcactcacttaccctcacttcacagtcccttaaaatcccacaaatgctctgataccaatgttaaagctcataaaaaacaacaatcaaaacagaaaaatttctgttttttgagagagagaaaagattaaaaaaaaaaaaaaacagagcgtagcacttcatacgtcttgtgcttaaagaaaaaaactattgagtacaaccactaaatacaaagcagaaactgctcacgtacgtgcaacacataactgtacacaaacgtgctattaacttcctagaaaatagcaaaaacactaaatgcataactaaatgaacttggctgttttttaataaaaaaaacagagtaaaacagaggaaaaacatgacagaaaacagcagctgaacaattctaacagtactctcatgtacagaatgatgttgaaagctgggaagatgatggtatggggtgtgtttgagttggctctttcaaaatggatttgttttaagtgggccatcttttgatagttgtaatatgatgcaatgcagagtctccatttgaatttcgtgccttggaggtagctttggaaccaattttgtagctttcttgcagcacgtactactgaattggagactg

SEQ ID NO: 10152 - DNA, 1130 bp, Eucalyptus grandis
  Intron number 8 from transcript Egrandis_v1_0.001054m (loc us Egrandis_v1_0.000776m.g) derived from phytozome v7.0 (c hr-ID scaffold_7; pos 50386581 to 50387710)
gagagtatttgcttcctgttggcgttgttttgaaggtgctgtaattctaaacttccaataagaatgtttttttttccctttctattatcttggttgtttgtgggatgttggaaatggatagctgatgctttgttacttctttgttggttcatgaaatttgtctctttgttgctagttcaattgacttatatatacagtggcaatatcatgtcatatgttgtttaatggtgaattgacctgtcaaactttgtcctagatctttcatcttgtttatgagtgttggcaccttctttggaaattctgcaatcttgatgcatctgaagaagaaagtggtacctgttgtacaatcgttgtgtgcatctcttgtatgtaggtattccaatgagtgcaatccctctgcattccagatgtcagaagcttttcctccttacctgctgcaagaagaagtatggtcatttgtatggaccttactacttagttgatagcctttcacttttaggttcttagttagatggcactcaggtgctcagcttgcttccttccttcatctatctaatttcatgaaaggatttttcatatacttccttctgtttactttatcgcctttcatttaattagagcaaatcttgttcaatgccttaacttctgtttgaattttgatggaagattattattgtctttttctcagttcctactgtttactttctagatcctgccaattacttataacagatcttatttagacacctcaaattctttttgaatagctgtatctgctatgaacttgtgatcacttgttgctggaaatttcccgtttcatgaatcattgaatcttggatcagagccaggaatggtttcttctgccatcaagtttttattcacccatttcacctcgaccttatttcatggttgtggaacaagggttggagactgtagtacaatgctgtagtggaggtcatttttatgctttagagtttgagaaggtgtatgcaaattaatgcttttgcttccactcttggctggcctgctatatttatttgtctgtcctttcctctatctttgctgtacttctcttcatgttgttgctaatggagatcttgactttcatcaacaggcacttattgacacca

SEQ ID NO: 10153 - DNA, 1179 bp, Eucalyptus grandis
  Intron number 14 from transcript Egrandis_v1_0.001007m (lo cus Egrandis_v1_0.001007m.g) derived from phytozome v7.0 ( chr-ID scaffold_6; pos 40211046 to 40212224 reverse strand )
gctgctcctgtctggaatattgacagacaaaagcagtaagtgaaaagctatctatttattaagagttctgacaatgttctctcttttgctcttttgtactctgggaattatagaggaagtcctcaaacctggtgccttctgtgggcatataactaaggggcaatacgtgtagacaaaaggttgattgtgttatttggatgtcatattcaatattctgtatatgtattacaggatgaatagtgttgatcaggaaactcgttcactttctggatttaatactgattcatataagaccattcatatcattatctagattttagtgactgctatggcaaagtccttacttcttttgatgtcacgattgtcctgggtagaagaatagtttcatccatcgcattcatcggcgcaagagcgttgtgaagcgatgcttttgcttccctggttttgtagattgtccttgtatgttttaagtagtgatactttggtgaaacagttcccgtgcatgctagatcattggttttatttatgcaagcctgttgctatagctttttccttggatgtaaaacttagtttaaattcatgtatcatgatgctattttagtgagatgtctccctgtctttagtttatcctccaatgtctcaaatcatttcttcagcctcctgactccattccccgacacaacctaaaagaaaaaagaatagcaaaaaaaaacaaagttgagtgacttaattgggattccccagttacatccatttctaggtttttacaatgaggaaaaatgggtggattcctgggtatccatgaagtgggatatgtgaattgcatagctactatgcgagggacacagattttgatggttccataagcaagggcgctggcagaagattgatgtacagatgctattaaacagctatgatagactagagatgttttttcttgttgtgcttttcattgctgaagccaactttgagatgaaaaaagaagatattgtcatgtctggatcatcttgatgcggactagggttggttattggatgtgcagcggttcagaacaaggatcatccctgtttatgattattatcatgtagaccatgtccataagcctgtcttttgtattactagcggctaaaatattgcctaggattgaaattctaaacttttgcgttgcaggccaggagg

SEQ ID NO: 10154 - DNA, 8032 bp, Eucalyptus grandis
  Intron number 5 from transcript Egrandis_v1_0.019352m (loc us Egrandis_v1_0.019166m.g) derived from phytozome v7.0 (c hr-ID scaffold_7; pos 38080870 to 38088901)
ctgagctaatcgctcagcttcttcctatcattcaggtccgttcaactagatatatctttcaaccaaaagaaaatctagatatattaattgtatatatcggttgatcagtcaatttaatcacacctttttcatttgcattttatgtgtcattcaggcaaacagcgttgatctctacataaacggccatgaccactgcttgcaacgcatcagcacttccgataggtagttgtttttttaatgagtgtgtgatgaaggatcgtgactagtcatcactgttgatctctcgatatcctagaaagaaataatgtcattaccctttttaatactttctttcttttcaagtgcagtcctattcagttcttgactagtggaggcggatccaaggcgtggaggggttacgtgagctggccaaatccagaagagctcaagttctactacgatggtcaaggatttatgactctgcaagtcacagaggcccatatcgacgtcgttttctacgacattgaaggccacgttcgtcaccattggagcgtttgatcgcccatttgtcaccatcatatgagcaaccgacacttgaaaagttatgattgatcatgtaatgccaaatttctactgagagactaatgtaagagtttgtcatgttgtataagtaggtacgtacgtatgcctagcctaatgcaagaattatatcaatgagactactacgtttggagttacaaatatatatattattgtcatttggtggcatttcattgttacgaatttgatcttagggcatatcaagaatgaatattaatgttaatcgagactaggactgaaacttcaacatgtcctttcaagaatgagagggacagggtattggatctacagatatagttttaaagacacgaattcagccacgattagattcaagtgggggccgatccatatggctgttgccttgtttaattgtctaaaagtacaattaattatcgtcacttagtgcaaaagtttggacgcgaatttgttttgttattatcattaaatatcccagtaattaatgattgatgtaacataattaacgtgtcacaacatacgagtatagtcattaagaatgataattcatttttcaacattgttgtcttataaaagctgtcactcgaccaagtagaaaacctttcgacaaacgctccaccaaggagctcatcttttgtcttcgtttttccttatgtatttcatcttcaagcactttccttttcatgtcaattttcaattccagtgatgtaattcgttttactgcttgtccatctcgatattctttaatgtcctcgcagtttacgactcaatcacattaaagatgattatcgctccatccaagcccatttcgatcacttggtgcttgattgtgaaattgcaaagcaattccaatccatcttcaccatatgaaattccgaaagaaaattatccaaagagttttaaacttattatccagcaatcaactcaatcataaactttttgacagtttaccaatatagttattccagctaaactttaaaaactgcaaaacttgtccgtgcaagcaacgctcatggaacttaggatgatcgacatccattttatcgattactagccaaaattggttagagggactaattgacaaattataaaaaaataaaaataaaaattttaggactagattgacatgatcgaaaattttatgactaaattgaccgccttatgatagacttaccattttttgggccattttccagaagtttcgattgcataggtgcacgtgtattttcgtcaatatctcttttggcacatccacaaatcgattttgcccgacataatgcaagtgtttttttcagttattatccctcgaaaatgaccgaaataaggaaaatgccatattttcgattacatcgatttgcatacgctgtgttaattggcagaagtataattcagaagtcaaaattaaggaaaaattcaaaaaaattccattccagcccctgtacgggtcgtcaaactcgaagtatccctggtcctcgttattatcccgaatcacttcttgaactcgagaaatgtgtaccaaattccaaaagtgctttacgttgatcgctcggtggacaaagtggctgcttgtgaaagatttattgtgaaatataaacgctcactaatgaccaaacttcagcttgaatatcactctccgcaaatagtaaccttttccaatttaattttcttttccgatgcctggaaacaaaatccctaaaatgggcaaagacaacgtacccaaatctaagtaagcaatttgaccaaaaacaagaaattccaggcaagcaatattgatatttacgtaaaggaaaaataacacaaagaatctctaaattttgcctaatgtgcgctaccgtctctaacttcatgatagtgataacaataagcatacgtgatgatcaatagtgagcatttatcattgttaatctctcgataaaacaatagtgagtacgttgaaacccgtaagcccttacctggttaccagcaacaggtgtttgggctgaaagttcaaaagataaaagaggctctcgcgcattcttaaatgaacacttcagctttgtgtttgggctcaaaatcttaggatccaaagcacaaatgctgcatttgataggctggatacaagtccggctcggataaggttttctcatctttagtgtttgggaataagtccggatctaagtccaaaaccaagaccggcgctgcctcagcacccataaccacatctaaccacagcattgctagccaacacacaagggccaccaccatgacagcaaatcctcgtcacctccacgctcgaccaccaccaagacctctacatttcaccacccattgccattgacaccacagctcctggctagcaatccacctctgattccacttggtaggccgacacctttgtttaagtttttgctagaactttagtaatacatttctgaattattattctacttttttatacagatactcttatgtgacgaatttgctcccgaaagtcagtcacgtgttgtcgagtggtcgagctctaagcacaattcgatcaaagtcaattctagggccacattgcaactgatttctaaaattcacaggtcaaaaatcgacacatggagtatttgcattaaaccttaaaatttagcaggcaatatgtaattaatagtgcatagcaagtcaaccatataagaaaaaatgagatttttttttaagaaatagaactaaccatcatcaaatttctttttttctttttcaatcttccatacatgtgagggatatggactgttgggccaaggtttcctatcgattctcagcggaacacatggatgacctgacaccatattcttcatctctctctctctctctctctctctctctctctctctctcttctttttttgtgtggattttatcagttgaacaattgtaatgcggttatagtcttagctgttcttcgagtactttccaatttttttatgcacattcaaacattttggcagcgacaaatgtaatactgtgctttgtattttgattgtcgattcagataagcaatggacagtcgacgtagtatttcagcggatatgcctatctatacggtcgcagcgtctctctcaccacatctgcggacaactctctcaatggtcgctgaagccacatggtcagaaagcacttttctattgttccagaacgacaataaaatagaaatcgaaactaaaaaaaaaagggggaaaagaaaggagagagattcttttctaattgccactagaggcgtgggaaaagagatattacttggcactctcaatttttgacctttggtctcgatatcttgaattagctgaaagatgaggccaggattggctccggataattcgttcattgcagactttatacctaaggaatctatttgactaaagcacacaagtttctgaggttgcacaagttgaatgttcgtttcgaaatgatcccgaagtattatttagcactcgcgtccaaactttgttgttgaataaacacagtggcatgacttaacaatagaggaataagaataagatgctggatgataaaaaaaagtacccaaattccaatcacggaagctgtgatgtatgtagcatgtaaaggtgagttaccctaaagactagagacttaagttgttgtggggacaaattcgtgacctaccaaacattattttctttagggttgtaataatttctattgacctaacttatattttctcaataataaaaattcaatcaggacagaagttttgcagaatcacgaagacagcgaggctacaaaagaaaagctgcccacaacggacaggataattcaatggcgacccttcaaatattttaatacttaaacagtcacccttccaataatagaagtagcctaacttctgcccgcttaaagcttttctcaaagccgctttcgcttcacagaggaccacagtgcaacgtttcaagccaatggcatggatctagtattctcttatgatccctcgcattagcacaagcctggatttgcagaaagattacaaagagcataaagcgagttaagatagagaaagacttccttttttttcatctctcctcttttcttcaacaaatacgtttcttgatgatttcccttcaagtcgaaggccgtgacctcatggcatctagagaggcctcatctatggccggtgaggtctagtgaccggttggaggaagatgaagaaaaaaagaaaaaaaaatagataaattaaaaaattattaaaatattatgaaaatttgatcacgtcagagccgaacatactttctaagccgaccgacatccatgtcaggaatatatagcaaaaatacatcaaatgaatgaattgatattcggtgaaaatgtttagaactaaattgacatcaataaaaaattatgactaaatcagtcttaatacaatagggttaagacttttctaaatgtcaagaaattcaaattgataactctatatagtgtgtcttattaacatatatcttttctttgcattcatatttccaatatacgacattcccttggtgaaaagtcgtgcacgttatccactctcctaatgcccggcgataaacaaattcatttttttccaagtaactggtgagggcaataccctaagcgggtacatagattaacaaatatatttatttttcttcacgcaactagtgagggcgataacctaagtgggtccacacccgcacaataatcattaatcgcccccattcccaaaatgacccccacgtttctcatggaccggccattgtcgatttgtgggttattaggcttaaatgcccatagataccctcgaatctcgatcccacgggctaatatcggaagacacaatcaaaccatctccccctactttaataatatcccccaacctctttgtccactgctgcatttcgctttcccaaaggcatataaaaggagttgcttgcctttaagcttttcgtgtaaaggaaaactccattccattctctgtttctctctttaccttcactctctctttctctttcttcttcttcttcctcattttactcaatagagaacacacgccatggctgtcgtgtggaacgggctcctggttcttgggttagtcctagggttttgtctggtctcttctctgggtgagctcgaactgtttgcggagtcgccgaaaggggatgggtctctcgcgttcttggtcgtcggagactggggaagacgaggcaactacaaccaaactgaagttgctcaccaggtcacgctcctgtctttctctcttcctcctcttttctgactttttctgtggctttgtcgtgtcatctagccctctttgaacaagatcataaccagcgtccacgtaaaacacctgattagtctttttattattttatttatacaaatgccaccgttaatcaccagaagattaaccccgagtggatcgtcacaagaaactgctttctgcctaccgccacaagaagataaggaacgttttgagttcagacctccgtgttgctaaaacctgttcggaaaccgtagatttatgtggttttcctattacatgatttttttttcttggttaacacgaataaaaatcatatattaggaaaacagacatcatttatatctgccgtgtaaaatgtctgagtcatcatcaacttgatcaaaagctttggttctcaactttatcttgtctgttgtttcgccaacggattaagaccttagtagggattagctaatatgggccaattttccactgggcagagagatgctttttccctctgaacaattcccgtccaatcagggtcgaacacgtggcacgtctatgcactagaatcctgttctcgagagggtattattctcttattgattccatttgctctttccttcatgttggcgtgtggcgacctcccccaccaatgactataggacaaatctatttatgtgaacccggtccagataagcctatctgcgcaaataacactccctctttgagtttactacaaaggaatatttttcactcaaggtcgcctctggtaaaaaaaaaaattaaaaataccaagatataattaactataataaaaccagagttcaacttaattaactatattagggatgtctcttttaaatgggtccaagacgggacacttacggcatattatttatcttcttgtatgatctggccaccgactctttttgctttaaatgatgtctaacctgctccgcgtgggcattaaaaagtcatcattcttttccggcagtatattctttgaattataatgagcttatcgatatcttatctttttgtttatataatatctatagatgggaataattggagagaagctcgacatcgacttcgttgtctccacgggcgacaacttctacgaagatgggctcacgggcgtggacgatccggctttccaagagtccttcgtcaacatctacacgcatcccggcttgcagaagcagtggtacagcggtaactatccccccgaaaaccctacaaaacaagcgggggaaaaatcatagcgtagatatgaaatatcgaaaaagaaatatggaaatggggtcttctcctttttgacgatttctttcgtgggttgtttttccagtcttggggaatcatgactacaggggcgatgtggaggcacagttgagcccaatcctgaggaaaatggacagcagatggctttgcttgcgatccttcatcgtcaatgccggtaaagcaacacgatagggaccaacccctttatatgcccctagacttttaggacgatgtcggataaaaagacgttcatgatcaaaatagatgtgcttatattaatttaatacgttttaactttactattgtgtttccgatttttcgacagagattgtggagctgttcttcgtggacacgactccttttgtggacaagtacttcacgaagccgaagggagatgtctatgactggagtggcgtgttgcccagaaaacgttacctctccaatctgctcagggtaataacctactctcgcttgctcatgaagcattcttgaaaaacgtgcgtttgaacatcataagtgtgtaagttcttttttgacactgtggtggaccctagcccgtgtccttgtttggagctctccctctccctcataagactgcaaactcactaagattttgactattaagctatttttgattactacgaatcagactgagcatcttaatttgcatctcacttgtgaaacgaagagctgatcacttagattgcggtgacaggatgtggatttggctctgagagagtcgagagcgaaatggaagatcgtagtaggtcaccacaccatcaaaagtgctggacaccataagaacaccgatgagctcggggctcagtttcttcctatcattcaggtcctttcaactagatttataaaaaatatatgacagttaatcagcctagttaattcactttctcatttatatttaatgtgatcattcaggcaaacaacgttgatctctacataaacggcc

SEQ ID NO: 10155 - DNA, 1117 bp, Eucalyptus grandis
  Intron number 2 from transcript Egrandis_v1_0.027006m (loc us Egrandis_v1_0.027006m.g) derived from phytozome v7.0 (c hr-ID scaffold_4; pos 12826498 to 12827614)
cggcacgccgcaagcgaatcgagcagcgaaagaaggtatatgcaccttgtcaactttgctctctcctcgcctcctaggtttgaatgtgttggttttgaattttttttttattcgtttgacgctttatggaattgaaattggttcgtcctttgttagttggaatcaaatgcaacggatgatttttgaggtgtggatcctaagagtgatttttttgtttgtagttcattcgtctgtatcaattcaatgttttgctgaataagagttacttaatcgtaattatgtgaaggtgttgatcatggatttgccttcatgtatggcacttacatggcagttttgcatgttctgggggaaagaatcttctaagccatatgaatcatcttttttgtgttacctttgtttttcatgagcgaggcgtatcacgtcaagtaggctttggaaaaaagatgagcaaggtggatttcaaatcctgaccaaaagagtgtattcatgttctgattttgtggattgagtttgtaaaactgaagtcatgaccagcatttctttaattcattttaggactttcacagtatgtcattctgttttatccctattttgggaatagagtccctttgtatgcccctaacaagagaagagaccaaatttgaaactgatgccacaacagaatttttatgtcctctaactctaagtgacagttctaaacttttaagagatcagacttgttgcttttcaatctactccaaatcgcattgcttagcttttctcttccctgttacttgggtggatgccttatgagtgaatagaaattacagaataaagtagccagcttgctctttcttgatctgagtctgttgccttttagccaaaaaaaagaaaagaagaagaagaggaaacaacacttgtatgttagtatgttgttgcagcttttgtatatcacctcccttcatttctcttcacattcttataccttttaatttcaatcttgatattcttcacgtctgatttagatatttgtttggagggcattgcattggactgatttttgttgtattagcaactttgttaaattgaaccttgcaatttgtgttccagagaaagctagaaagagagcttgcatatt

SEQ ID NO: 10156 - DNA, 322 bp, Eucalyptus grandis
  Intron number 6 from transcript Egrandis_v1_0.003544m (loc us Egrandis_v1_0.003490m.g) derived from phytozome v7.0 (c hr-ID scaffold_11; pos 41320180 to 41320501)
ctgaaggaacttttcagtcgatcaaggtatgttgataccctttgtaaacctctgattaaaaggaactggactgtctaaaaattcactacaataattaggctcttaaatatcactattctgtagattttgggttatgtatatggggtgattcgatggatgaggacttcttggctagacccaaagttttatatgcttcattttctttgccttcttttgtaaggagatccattttgacatcaaaatgacccttcaacttagtaatggcattgtttggtaatgtactttaatcttccaattcattgacaggctctcagccagagtg

SEQ ID NO: 10157 - DNA, 1658 bp, Eucalyptus grandis
  Intron number 5 from transcript Egrandis_v1_0.012715m (loc us Egrandis_v1_0.011292m.g) derived from phytozome v7.0 (c hr-ID scaffold_5; pos 35679728 to 35681385)
aaggaaatctgtgacactggtgcttgatctcggtaagaagcttatgtcataatttgcacaccacccccccacccccttcctttcctccctcctctctggtttaagtaaataaactttagaattatctgtgtgtatggataggtagactgagaggacaatctgtcgagaacaatttttgtagcctagggggaaacttttgatcctgcacactcttctctcctctttgtttcttatcccctttatatttcgttcttccgttttctccttaataaagaaaggcgtcagaatccaaagtcaatgacttgatgaaggtactgtggcacctgctaatgttctgtcacttttaatgtcaatttctgaactgattagtcagtcaaacaatacttactaaaagaatgcagtattcatctggggttgcatatcctctactaattatcccctttctcttgttagttttgttgtcttattaaaagcccatgacagggtttatcctatcagaaataagtacaattttgtacgagacttaggaattcttgcaatttgagcacaaattttaagtacaataaaaaggatcatatgagtgtaataggtaagcatgagtttgtagctgtcttgttcttttttgttgccgccataactgtttaatgtgtggtaagagaagtttcagaactctaatgactggcacctgtgaatgtgaatggcacctgtttgtcaaactattctttttctaaaagattttggattttttccctggaaaataaacaggtaaacctttttttctcgaacacttagggatgcttttcactatttcacttgcaattatggagcacatccattgtcactaacgagtgctgacatcaatatctgattacaaaggagttaaaagagggagggagggaaaggaggggcatcactgctgcttgacacaatcagagggtgtgccaggactgtggtaagtgggagggagggagggagggagggaggggcatcactacagcttgacacaatcagagggtgtgtcaggactgcggtaagtggctggccagggcctggtgctgcctggggctggtgatgcattgtcttgggtgacccccctctcaatgactctggggaactgcatttgcataaaatgtcaatcttctacagagccagccatttgacagttttaaatgtcagtaatagccagtgatagaaagatcaaatgaagtgaggtagatttcgtgattgcacccaaaaaagaaaagaagagcgagaagataaaagtgcaccaatgacacaagcttgctgacaaggtcttaacccattttaagcaaattagtgtctgtttaatagaattaaccaaaaatccaaaaagctccgtaggattgacagagaaatattcatggttagcttgttgcatgtgattacaggcataaaaaagccggtgttttctgataattctgcgtccttcatactctcttcttgtctattccatgtttaatctatcaagaaaatgctttgaagtgcatctgccggtgaaattgattgctttggttagattctgttatttgcttagcaatgatacagattcatgaacagcatctaatcatgaagtgccattgcactcggtcgtggttgttgcagaaacactcgttcattctacattggagccctgtgat

SEQ ID NO: 10158 - DNA, 1688 bp, Eucalyptus grandis
  Intron number 1 from transcript Egrandis_v1_0.011173m (loc us Egrandis_v1_0.011173m.g) derived from phytozome v7.0 (c hr-ID scaffold_1; pos 8413741 to 8415428 reverse strand)
acgaaggaccatcttaggactcactgggaaggtttgtgcttatttaatgatcattaatcattaattacacttgaaatttgtgtcttttgtgattctgcgatgctttctgaacttatcgttgggtctaataaaacacacataactctcgcaatacgggtcgacgatggtttggaaattgcccccctttttaggtcatctcttgcgtcacttcgacaataccaaggctgcgtcgctctcgctgggtcagttggtggataaacgatgggacaccaattaaaaaaggagaaataattggatgaatcccattgaccagggcggcagctactggcattggaaaattataagggtattaacccaaatcataaaaatgaacaatccttcagtgaaagaagcacgtggagaccactgacgaatgaagacaacgactgcgcgcaattggacccttttggcctaagcaatagcatagaaaaggaacccacatccgtgtcttctaatttaaaaattagatgaaagcccactatattttcacattttaaataacaaattattgagttgatgaaaatagtttcaagagaattaattgatcaacaatgtgaaaatggtgaaagttgtatattgaaaaagtaaaagttgctcattctcacgatccacaacgttattttactcctccacctttagtagttttccatttgtttttatacaaacttcatttcctctcttgtactcactaaggtgcttgagctgaattctgtgagggatacattataataacttcgaacgttgttggtaaattttgttaatcgacttatgtcaaatctaaagtataaaaaaaaagtataaccatacaaagttcaacactttaaccatcactcaagaaagaacttgaaccaaaatattgtatatgacagggagttaatggacactgtaccctagagagagactgcaaatatttttctaaacatcaccactgaattgatattcctttaaaacagaattttttttatcaccatgcttattaaagtagtcgaattttagaggattcttgtaataaagcagctaatctataaccttctccgatttgtacatacacaaaaaaagaaccaataattaatgaaaagtgaacaaaaatcatgaggttcatggacacgttaaaggtctgtctttcccttttcaataatcttagcattaacgagtgtgtttaaagctaatcgaggggtatcaaaagctttttgcattttaggacgtgtctcaattggagaaatgcgcataattaactattgggcaggagcctctttcaactaggagcgattttcgactaatcatcaggctaaaagactaaaactgagcgtgcactaattttattttgttctcgcacctttgtctcatccatcgtaaacagttgtcccattcattaaatttttttttttttttaatacaggtgaaaatggttgctaggttaaaactaacccggcaagttaatcatcatacatgttcaatggaacttgatatcgacgcaattcttgaatctaattcgtctacatagaagcatagaggattcttaagattggcatctctcagcatatgcttgagcaattaaatgttaactcatcaaaatctacaataattgcaatatataaatatgtgtgggtgaaggcaaagatcagctggaggcctactccaccctgaag

SEQ ID NO: 10159 - DNA, 895 bp, Eucalyptus grandis
  Intron number 10 from transcript Egrandis_v1_0.005649m (lo cus Egrandis_v1_0.005649m.g) derived from phytozome v7.0 ( chr-ID scaffold_8; pos 19663806 to 19664700)
ctgtcttcagcctgtggtcatatagtcctttgcaggtacagagtacttccatagtttttttatgcttgcgaaaatgctacatctttttctcttattctgctgaatgcattatgacttgctgaagatgaagctatgatgtagatgaggtggaactggattggagcatctacctttctgtttccttgatttgttttgtgctcttagtgtttgcttttgcattaagagttccaaaattctctctatgatttggcgtttagttctaaaagagagtatgtttttaagtctcaacaaaaacaaaagaaatcaattttattgattgagcctcctacatgctgatgctcacaattttgatagccataccaacattcttaagaccaaagagttgggccagaaaaggaaaaccgggggggggtggtcaccggcgaccgaagccccggtgaacagaagccgtgttcttcatgtggaaatcaggacagggggccactggcaatttgaattgaaaaagaaatggttttaatgcaattttttttctttctctttatcattcaggaaagacgaagaaagtttcaggatggcatatattctctaaaatttctcttagactcgaacccatagctgatgattattttttgaggaatccttcatcagtggtggttgtgaatgactgatttatttatttttttcaatcttttcgaccttagttccataggagcaagtcagaattttgctgtttttatttctttatatattcattgcttatagagtattttcagattcctgtttttcctttcaaatagctggttttagtagattttgctaattcgtctgacatgagatagtttttaacatttggggtgcagttgttggcgtatcatctcacggttctaagaggata

SEQ ID NO: 10160 - DNA, 551 bp, Eucalyptus grandis; identical to SEQ ID NO: 9719
  Intron number 32 from transcript Egrandis_v1_0.000242m (lo cus Egrandis_v1_0.000231m.g) derived from phytozome v7.0 ( chr-ID scaffold_5; pos 67363085 to 67363635 reverse strand )

SEQ ID NO: 10161 - DNA, 3004 bp, Eucalyptus grandis
  Intron number 6 from transcript Egrandis_v1_0.003009m (loc us Egrandis_v1_0.003009m.g) derived from phytozome v7.0 (c hr-ID scaffold_4; pos 2829622 to 2832625)
aattacattcaagtaagtaacctaccatattaatcataattattctggctatttgcatagaccgctctgttggggtcagatgcaatgtacccctgctgtttcaaactttgcaaatatcctgcctttattttgttcaccttagacttatcatcgaggttgtgtcactctcttcattttgcggcaagtggcactgatgtgctttatatttcataaaatgcatagagccatggtcatttcctttcaaataaagtaaatatttctttatgtgaatgttctttttgttggatatatagatagtgaggtattctgattgtgatgtgttcttttgtattggtaataatgaggatgaggttgagatttgtgtggacccatgtaaagagattgggataaacaattcaatgagatctaacacattgaatcgtgactgtatctgctattctgatatccaaatcttcagattaaattgcaagggtggatcttttttgtttcaagtttgtttgaacgcctcaagaatctgttgatgttgccaatttcactttcttgttcctaggatattgtagaggaataagtcgatatgccgttcctgcacaaagaaagtggattaacagtgatactttctgctgggctcaaatctctactctttctccccctgcattgaacccatggtttgcatggtattcaagcttcccctaaacaaaaccctgcaattgcattagacatgtcctgcaattgctttttcatttgcattttaggtatggattattttgatcatttgagcttctttttacattattagcttcattaacgaggttaaattacttgatctccttttgttttggcaaaattgtaggttcaacctttcttatgtgaaatcactctaaatatgtcgatccaccaaattgatgaagtctgatgacaatgtctatagcatgtatttctttcattcctagtagagtaaaaggaaatgttgtaagacacaccgatctgctttagccttttctggtaaatctctagtgatgcgattgatgttttcaagcctgccttttatttttcttggtttaaacaagtactttttttccataaatcaccaagtatgtccttgcaaaactcccaagctttcgtgtcaaaaaatcacaggagatctcaatcatagcaaaactcattacatagtggatttttttagctaaccagagttccataacttttattggagcagttgcttctgggcttctcaagcctaagcaacaaacagcaaaagccagtccatatcttttttgtacttgaagtgcttttaaattagtagagacaaatcgctttgatacttcctgtagaaccacattccattgctccactagcgacagaggtgatggtcattgtaagcaattctaatagcgaggacagctattgatgtatattcctgggaatttcagtataccttggactgcctcaaacatttcatctcatctcattctctctctctctctctctctctctgatgcaagctcttttttttggtcaaactctctgatgcatgttaggcagtcagacttgacatttccaattttgtcattgagtatgctgctggccttttcttaccccaagttccggttaatatatgcaaacaacgttgaatattggtttttcttgagttttttgctgactgtcatcatgttatttcaaatatgtctgggatgatgtcatatctccatggtggcatgtgaattgatgagaactttgggtcttttacaagtaatttattagggttaaactggaggacttgtttgggaagctctagatgacaattgtaaagtataattttctaattggccaagtatttatccgcaaaattgaccagttcagtagaacctttattccatttagtagatatagtggaataattgtcctttaatagcaatattttttatgagaatgcttcataaaattgcttgaattttgttctcattgttgtcctcttttcctttatgaaaagtatcagcactggttgctggttaggtttaaaattttcaatcctactggttgaattattttttactattttatgcaaccttccatgatgtaaaagcaattctgacaaccttgtcgcaaaagcaagctgtttatatgaataatttaccctaataatacttatcttctcttgtatttgtaatttgggatgttaatatactatacattaccattttatgggtgcaaaagacttctgtaggtctcaaaaccttctaattctattctacattaggctaagctaggcctgtctttctaattgtttctccacagttctatcgacaagtgtgtgttaaatatgtatgttaggctgagagttaaattggtctcaatgtttgtttgtttccttttactggaatttgaagttgctcatctaaccctttgcattgatggattgattgaatggttaaggaagaaatatatatggatggattaagtgaatgacatagatttgattccctatctgctagggcgggttgtcaacttgggtcttggcttgtcttgtttggttcatgcggtattttatgggctctggttttacctacttaggtgggctttgtcactattatgggccaaaaaaaaaaaaaaaaacctttatagctcatcatcgtttggatggttcatttattcttgccattgctggtcaaatttgtggtgttgagatagattttttttttactatactatgtttacttccattgtggttgcatcctaaagcaacagtcttcagttgtgaattgcttcatggcatagtctagaagcgctgagatgaataaagatggttttatttgaggccattgaagtgacaattttattcccgacacttttgtctgtgcaaatagaaattctcttgagatgcagttttttttttttttttttaactagcagtggagtaagctgttataggaataatatgtcagaaataatatccttacacggtcatgcaggatcatttgggacttgttaggcaattaatcgacct

SEQ ID NO: 10162 - DNA, 2615 bp, Eucalyptus grandis
  Intron number 1 from transcript Egrandis_v1_0.011999m (loc us Egrandis_v1_0.011999m.g) derived from phytozome v7.0 (c hr-ID scaffold_5; pos 40953330 to 40955944 reverse strand)
agctttctgagaagcaaatcaacacattcatcctggtacgaccatgacctatttctagttccataaggattgctatgcccaatcaaatgcgtagtggatagattacaggtgtgtcgatatgtctctgcatgcattaactgaattttttaattttctgcaatggaaagaaaaacttaagtggagggtcacaaacgctttgtttctatgtatgtcctgagataaaagattaaaagcagttatgttagtatatgtgacgacccggtctcaagagagcgggagtgaccgccaaggccaaagaaggcccggacatggtgtagctccaactctaggatgacgtgggggcaagaatggattggatcccacattggccggatgtaatgaggcaaaatgccttatatatgatggcacatgtcataattcataatgaggtattttctggagaaagtctagaagaacaaaattgtgtgagctttgaccccaagcggataatatctttacaaacaggccttgagcttaacagtatagcaataaaaaaatagtgaatttcactaagctaccataataaataaagaagctagtgaagagagagagatatagagagtaattagtatatattttatttgtgtcggcaaaagatagttaatgtaaatgttttcaaaacgagatcaccgaccatttgttgggaggagcaagtttcctccgaccaaagactttgagaaacacgtggcccctagaatgaaatgaagattatctgccatatgtggtgctctcctcgatactttgacaaattatggccgttgacaatatcattttcgtaaatctatagccgggatctgatgaaatattaggggagtaccgtgtggagtaaagaatccatatctcatccgcaggggaatatgatgtataatacatcatagaatgatgacataactaatagtaattgacaatgttcggcctgattgcagaaacatgaaaactaatcttttctaaataacaaataaacaatttagtatcatatatacttatttgtcgcctgaaaactttattatttaatagctctttattcaataacgtgtggtcatccttagttttataaaccaatttttatatgtataaaagataatatctaaacattttatcatcaaatcccctaaattattctacggtaatgttaatatttcattttttcttggtcaccaaaagttctaagttatgtcgactatgatattaatataaaagattttgttttatgagcgctctcaaacttgcacgtgacagaaatacaataatatattggatgtaggataagaatacgccataaatagataacggatgcgcagtggtggaggctctgtggagcgcattatctgcgcttggcctgattaaattattttctaactatgcttctcacacgtgggacgagggtcaacaaattcggcttccatttgaatggaaactgttgcatgatgcatgactaattaggcaaaacgacgacgggtaatggtagagtctacgatcattcattataaaattacacttttgctgttattggtaacacgtaaaaaagaagttcaggacattggtgttacagtagacaacgtttaggatttttgttgatagacaaaaagtatatctatatcactactacaagttttgaatattgatgaaacaaaaaataagtttaaggtattggtgtcaaagtgaatatggtatttgtgtcataatgagcaaagtttaggggtatttgttgtaaatagggagttttttttctcatgctaataattcaagtttggatgttttagtgacatgaaaaaagttgaagatattgaaaccatgatgggcaaaatttaggtctttagtcgtattttccccgttcatatctttacttgaaataaggtagtcttccatcaatataaccatttagctttatggcttgggttcttagctttgtgaaatattagttgagaattcaacagaaccttcacgagaatatgcaagtttctaagtatgtgattgcgcaaataaataggcgttaatgaaattattcaataaagaattgtggtaaattggtaggctacttggtataacttccccacagtagctacgtctataaagagggtgttgtaacttttatacggggatgggaaaactccttacaatcgcagcacatccaaagcttcgacagtttatatcagcttttacgaaggaagctcacattagctttaaggaagcagcccacctaggtttgagctgcggtagtttcgagataatgtattgccaaacacataaaaataccttacttcaaaacacggatcgactctctctgctgatgtatcctaaccatttattttcgatttcgtgcattttctattgaatagaataaatcatatctagtcttaatttacgtgaccaccggatgatgtttctttgtccagtctataaatggtggtgatgaagaaaaggcttaaaaaaactgctctcgatgggactttgtaatttgagaatgcagaaatctttgccttactgtagaagaacttatggatatggctccatttcatgaaattttgccatccttactctcacaaactcgcttcttgacatcacaggaaatattc

SEQ ID NO: 10163 - DNA, 2146 bp, Eucalyptus grandis
  Intron number 1 from transcript Egrandis_v1_0.007377m (loc us Egrandis_v1_0.007377m.g) derived from phytozome v7.0 (c hr-ID scaffold_4; pos 27445076 to 27447221 reverse strand)
cgtcaccggcaccgtcgcccgcgacgtcggacctggtcagcatgatcgcttgattttgatttttgtttggtcggttgccggttggatttgattttgattgccttggttttgtctcgagagtctcgattcgtgtgggcgttcgagagtgattggatatgtatttgtcattttcttcgtgcgttatctcgtgaggtcagattttttcaccctcggataatccgatgacggtgtcgtttctttgttgaattcatgtctgaaagtatatagactgagcctggtagaagcctaggacttggcgaaatcgtgaaaagagcagagcttttaagtctcatacgctgcacctcgcagagaattagaccaagatagcttaagaagctgaaatgaaaaagacttcctcttgctcagccaaacaataaagaattaagaattcgaagaataaaggaattgctgagctctcgtgtcattcgagaaagaagtccaaattttgaccggaggagggtataggaggcatctgtactcttgctaagagctccccaaacagcacagataagagatgatacagatttagacattctgtactggttcaaaaccgaaagctggtttaacagagaagccgggcaaaactcttgtgctttgggatgcaaggtcggaatctgacttgctgttgtttgctggctttttgttgacagtatcatgtgatactcagcactcggcatagaggaaacagcactcatagtgggcctccaagtggcaaaatcacggaagtgcagattggaaacaaactaccacataaagcagcttgaatagcaactgaatcctctgatatagactccatttccagtctgattcaaaagcaaggacagatactattgagcttacagcatctctgggtggggcgatttggaaataagggaaataatgcagttaattactcatgcattgtgtttggcatggttgattaggagagaagagagaggaaattatattatatgcagaccatcctattttgcaggatatcagaactcgctaaacatgaacttccggagggaaactcctaattctttcttctctccactaaagaaactcaacaggattatctgtaaatcacccctttaaattccttctcttctctctgaattccttcaaccaaagacaatgttagtgacaaggcaaaataatacatgactctagaaggaaattcaagtagtataagcgcagaaagctgccaattctcaaacctcatgtgagtatttccactattctaaatcagatgctttgggaaagttctggttttcaaaaaatttctccaaggataggaaggatcaccattcaccaggtatacttacattccgaaagctccttccttttaccatgtaaatcctgatccaagcaatccactgtgaccaagattgagcaaatagaagcccagcacagcagataatacttgcttttttccgatcaagtattcacttcaaaaccattccccctcttccataggaggacgaaccacttcttctgatactttagtactaagaacattaatagcaacggtcaacccttccaatgaagagtcatacaagctcaaatatgggcatgttctttggtaaaatgaaaatgctgcaccagtaattcatgatacaaaagacaactgcaattatgagttggatgctaccagcaagagagagttaggaagaagtttgagattgacactcacttagcaaccttccaatcaatggcttgcaatccctttcaggtaatatttgagtaattaaggtacagctagatagcatactgtgaacttgccagttctgaacttgcttaaaataaaatatttacatacagaaaaaaaattaattaactatcaattgtttattaatcagtaaaccattcataggtgcaggcacagctgccattgtttcaaagtgtgtacatatcaaggatgttgtgtatccatgaagttggatttattctatctacttatgacattgcttcctttgaaataacttgaggatgttgtcctatgttatctggattttatcttgtctagtgtacttacagtacatgaatttctgttccatgcggctcacttattatcgtgcttattgatgcaggtgttaccattagctttgtgttagctggcgcatct

SEQ ID NO: 10164 - DNA, 3076 bp, Eucalyptus grandis
  Intron number 15 from transcript Egrandis_v1_0.001599m (lo cus Egrandis_v1_0.001599m.g) derived from phytozome v7.0 ( chr-ID scaffold_11; pos 1432825 to 1435900)
ttgcccaatcctggagattgggatcccaactacaggttagtttataaagattttgacagatcagttgaatctgcataagccagtctgttggatgaaatacagtgctactccttgcatgccatagcatagtcatcctcttgtaatatagttgaaactaaaaataaacaaatacaggggcaattgattctagtaatttcaacttttggggatatatttttcccttggtttattttggagagaataagggttcatgcatgtctactggtagagtaggtgtgtatatgaaatggctcttttggtttgcttatttgtagtttccatacttaattgaatttttttatgttgatgattggactgattatccatctatttggcaatcagcttagactttagagagagaatattctagtctagtgtttgctggaaattgagcccttgaaaccctagtagactaccaattctcagttgtgttatttttaggtataagctgtcaggaaataagccttttagcatatctttttaacacttgccctctagtaagccaggccttgcatttgaaacaaaataaacagacaatcggaagtgtcaattatagaaataaataggcaggcgtttggttcaccagaataactatgtattcttaatttatttttatagaatagaactattattcaattgaaaaaaatccaacagatacagctcttctaggaatagctatttccatgaaatcaagcacaatcgttgcttgctgcctttagaaatagtaattccaagaaattgtcacagcaattatcatagaaactattatttattctgaaagtctataaaatcatggaatattagattattgattacattttaaattatttattaaaaagtaaataatcacgctttattctaaattagttgcatttagtatcataggatcattatgtgtatttaatttatagtatagctagaattacctcaaatttagttgtgaacaacatattatatttttaatgtcttttataacttgttataatctatatttatgtataaaatttatcataactttaatttaatgtgtgatattatatagtgagaagcttttgatggctatacttgattattattgtaatatccgtatatgatgttaatgtttatgaataaatatttgcattgataactaacttataggatcttgattattatgaaataatgatatttgtatcgtaaaaaaccaattattataatttatgatacaaaacatttgcagcatagacatatgtaaatacataaatatatttatacatagatagatatatatgtatacaaattgtagttaattttttttttttaggtaaagaattgtagttaaattttaaatcgtagatttatacataattaaaaagatttatttcaaattcagttagtttcataataaaaaatttttgacaatgaagtcgttttgttttttattcattattattatggtgtgtgcattggaagctctaaaacttgtcataaaagtgaagttaagtcctaaaacttgttataaaaatgcagtttagtcctaaaactttcaaaaaattgcaatttaaatcttaaaacttgtcacaaaagtgcaattgaaccctaaaactctcataaagtgcaatgaagtcgtaaaacttgttataaaagtgcaatcaagaattgtcaaattggtccaatcaagtccttccattaattgcaatttttgaaaactttaggacttgattacactttaataacaagttttaggacttgataacactttttgaaagttttaggagttggtggcgtttttttgaaagttttatgattcaattgtacttttatgataagttttaggactttcaatgcacttatcccttattattataataagataaataggcatcgtgccgctagcaaagataattgaggttttattgtcgtatggattaaacttattgaatggatatgggggtactttgatgtcctatctctctctctgtctctctctctgtctctctctctctctctcacacacacacacatatttttggggataaataggggatgatatgattttcacatggtattctcaatttatgggaaggcaaagaagacagtccttaggacagtgattccattctgcaacccaaaaactaagaaatgtctattatattgctgttgttacgctatttagtttcatgctattctattcctgttgtatataatcctgcaaagaaaacgaactattatgatgacttcctaacaattaaaggagtttctggatccccattctttggtatcatgttagatatagaaaatgatctaaattagcatctttcttaatgaacttaaaagataaatcttgcttctctgctttacaagcttgaaatgggagaaaaagaaaataatatatgatgtaggtattagatatgagtaattattcatatggctaggaggaggatgtaatgtcaaaagttggactctaggaaagcaagggtgagaagggagaatgaattggaggatttttcagttatttggatctcattaaaagaccttagacttaatgaattctggttgtaaatccatgagtgaaacgatataatggcaattaatatttttggtcttgacacgtgatagacataaaatcatagctatctaagatgtatgcgtaagtctccaggtagcttggcctctgcgttcatgcccatgttataaaaaagtaatttcgtcatgatttctgggtcacgacctaaacaaatgaccagtttcatagaataaaaacagcaagccttttcttggcaaaaatccaaattaactggaattttggtttatttgaatttttctttatctgtgcactagttattccagtttgttagtgacagagctattgatgatttaagtagattatcctctttggtctattctgtacaaagtcgtagattagagctcttagtgtctgctcaaggcttttgagttgcttaacattccttcagtgggaaatcttttcccattgcacatatggatacacgactgcatttcttaagtttcatttgatttgctatctctgaccacagtg

SEQ ID NO: 10165 - DNA, 4365 bp, Eucalyptus grandis
  Intron number 1 from transcript Egrandis_v1_0.048928m (loc us Egrandis_v1_0.048928m.g) derived from phytozome v7.0 (c hr-ID scaffold_8; pos 49702973 to 49707337 reverse strand)
tcaagcggctcgagcaggaatccagattcctagaggtcggtttcgatttcctcgtttccgatgttttttaatcttgggctttcgctgattgagtgtgaaacgaggaccttgagctcttttgactttctcatctgactaataatgatcgttgaacatgttcttgctctgatttctttgcatccttcctttgagcattcggattgatttgggcgagcgaactgcgggactttgatgattctgcagagatgagtagcttaagcatcctccctagtggtagtctttttttttcttgaagcaaatgagacgtttttggcctaaaaactcctgttttggggactggggacttcagacttcttaacaaattccacttgttgattggcgttgaaaggcaatgagaagaagctgagaggtagattaaaaaggggaagctaaagacagaagtgaggaagcagcattccttcctaaaaatttttgtcttcttgcttttacatgttagctttttactagtattgaactattggcactaaagcgaagagccccacagctaaaactaggattttatgcagaaaattcaggacataccgttatgggctctgagtggactcttgggaaagttaaggtctcatatgatcccttgaatgtggtggtgatagagcaatcaaaggccaaataataacccactaataaaattaatgatgcaaaagtgttgacacttgaaaagggtgctattgtgttatgaagcttctacttccatgtcaatgagggcatgtttacttcagtatgatcttctcactcctatgataaacgtcttaacactaccaatttgtgcttgcgcacatgcccacgcctcttcacaattttcaattgcatgtatccatgaagttgaggatctgtggaagaatatatttgctatttttcttcctctagatgacttttctcatgtatatagtatttgaggaaaataacttatcatagatttagggcaggcatgtagaatgttgatttttcactcctgcagaatgcctactatcttcatctggtttttgcatccaagtcttttctacctggaatacagcatagtgaaccctttcttttctgcctctttctttaaaccaaatttgcactgttttttgtaggagtgagtagaggggaagagaaaggattttaaaagtgatgatcaatcatgtttttggatggaaggataaagatggagggagaagaaaggaaagaattaggaggaattaggggagctagtattattgtagttttataaaatccttgtagtctgtccaaatatggaggggtttggagactttcttcttttccggatacacattgttttatctcaagttataaaaccatgacaagatatttaggtcatttccttctttagcatccaaataatactttaactcattctctccattatctgaatcccttcaatttcctcctaatcaatcattgaaactgcattttatcttgatagatcgaagtaattgagattctgctaagagtcagttttgagttgctgcactaggagtctttgattgtgctgatgtttctttctgtatttcgtagtcctccttaggtccatacttgagttgtcttaggttgtgaagacgattcctcttctttctgtctaaatgatttaaggatgatagttaaggaatttctctataaagatttttaacctttgtgagataggtgctcgacttatgccatggcaacattggagattgtttattcttcagtccctatagctttgcatattgtgtttgctaaagggatgatgagagtgtcttgtgcatcctttggtgtttcttgcattctggatatgtgcatcgatgtgcatgtgttttgagcagagacgtgcatcgatctgtttgccttgaattttatttctggtgctgttacatcttttataactttgagtgtgacattgcctccatcattggtgtgagtttaatcttgctttatcaagcctagctaaaattgctccagctgagttagtagtgtcaagcccttcaagatcttctagttgatgtggcaatatctcccacaatgacttggcatttctggtgcttcttcaattaggttctgtttcgggccaaataattcacagactaatttgcaccctgaatcatgcgattctcattccacattggtccctgtctgttttagcacccaaataagaacattttagattgattagtctatttgtatgttggttcactgttatttggacaaagaataaattgtttggatttggacaatgaaggagtacatgcatctgatagatctgtagatattgacttcgatctgagaaatgttgatagaatccatagatttagactttgaatctagataatttaccagtagaatctgcagatgtctacttcaatccaagatattaccaacagaatctgtagatattttagataccttaccaatttccttgctcaaggtttcaaaatctgccaaatgagcggtcaaaatatagcttggctcctcttatgctatttaattgtatatcctgtcatcaacttgtattgcaagatcacatttatctctgattgagttatgtgagaatcgatgagaatggaaaggaggaggtctggaaattcatcaaatgatgaagagcaagcaacatttggtagaagatgcttcaaaaggaaagctctggaaatcctgcaaatggctgggcgcgtcagttaacaaagtagtagtggcgaggggaagtgtgaaagatggggaccctgtacatctaagataggagtaaaatataattcgatgcaagtattatatgacgggaaaaggttatctgcataaagaagaagagtaaatctgttagatactttcaacttttgaaacttgcatatgttttgcatgtattttccttttttgaaagaattgatgtactttgtctggaccaatgagtatagaatttaacaaaataaaggtactatgagtgagctgtggaaaccaaaagaatgaggaagtaaaaggaggaagagttcttgcagaatggttagaggtcagtaaggaatgtacttgcatccaaaaccaatgtatgatggtaggtggggaccatccaagggcgctaggcaactcactctaggaaatggacaaataattttgtgatttcaggtgccttcttattgagggacactctctagggaacagccaaatgacctgttctaggaaatggtctgtgtgcttgttagccaggctggaaattttaatcttgttctcttccatgataattaaataacattgtagcattgttaacaatgttttgttagtttgttaaaaacagagaccagttgtagcttcagtcatttcactaacaaagacttgccaaactagtgaggagaggatgagtcttattcaatcccgaactacgtatactcaagtgagaatggttgtttaagctgtctatattgtgttgaaagtgattacaagaatatggagatcagatgcatgaagggaactgctttaaggaattcaggtggtggaaacacatatatgatgatgcatatttttatgcagagcagttctagattcatttctgtttcttgagattgtatatccaatggatgaagagattttgttggatttattgacacattattagattcgaactcctggtgtgcatgaggtgtgcatgagatttcttgcattgtgtttcatggtcgaatgtcttgtttgtacttcttttttgcgtctgtatttcctcacttcttatatttttagggtctctctttacaagtcaagaataatattatgcatgcatacctattgttcattttttcagaaaagctttatggtcacactagcctaccctttgatgggtacactgatcagtctgtttggagtggcttttacctttttgtattttggtttcaaatcttgtggcagatatactttgcattttgaaatcttgtagtgcaagcactttggcatgtagatttgcatgtatttttttcatattcttttttagaatttgataatagtttgaatatagcgtttctcaagtcaaaacggacagatactaccttatctaaaggaaagggtgctacataatttgtaggtggatgaagagatgttaatctaaagttcaattacaaacaagaaaggcgtattttactgtagaccagagagatctttgaggcagcaacattcgtcataatcttgattttcaaagaatcaccaatgcttatctctgacaatgtcattttaattaagtgaatatgctgaaatcatagcttcgcatcctgttgttgtaacagagctcccattcctgccactagttttactaattttactactttcttttggcaggaagagttagaacaacttgaaaag

SEQ ID NO: 10166 - DNA, 8202 bp, Eucalyptus grandis
  Intron number 17 from transcript Egrandis_v1_0.002123m (lo cus Egrandis_v1_0.002128m.g) derived from phytozome v7.0 ( chr-ID scaffold_3; pos 53816435 to 53824636)
cttatccttcacttttggtgattggctgctaccaggtaaggcgcacgtttgaattatttattttagcatttcatgtgaattctagctctgtacataggagaagtgagatataagtccatgtttagatgttcccaaattttgttaatttttaggattacataagaaattttgagcgagcttcttggggatgctaatcaggctcatgagtttctaaaatattaagtattgcctagtataaatcaggcgactttctcactatcctctgaagtagtgaaggtcgggtaattggcaacttcggaatcataacttctgaagcaggctgtataagagccatggaacagcaaaagctatgtgccttaaagtacgagtcatgttaataggctctttggacttctattgccccataagatcttggtttaattgtgctttggtctaagctaatcgaaaattctctgcagaccctggagctctggaatatggccgagaacaagacaatggctttgccagctcatgacggactaatttcagcattggcagtatcaaatgtgacgggcctggttgcttcagctagtcacgacaagacagtgaagctgtggaagtgatactttggcatctccaggtatttttcctaagcactcagattggaagactgaattcgctgttcccatcaaagtgcatgtatcttgtccttgtatcagttgcctcagtacgcccaggtggtgtcgtctcactgatactaatttagagcttatgatgagcgatgggatttaactttgtgacatttgttgctgttgtacatcaggtgatgacttcttttgtcaagttgaagctttctgcgaatgcttcagtgacatgtaatgtttggcctttccttagagaaggaaatgttctcagataggactctacatcgataattgccgtcttctctcgtttggtacttatgccatgtctcttgaacttcgatgtcatttagttttctggtcggattgaaattctaattgtcggtttcattctcatcaacttaaagggcgaaaagaaacagatttcgaggaacccccccactttttagctgttaagagcttgagatggaatgaaatatgttctggttagatccctaggaaacaagtggatccatcaactctaagaatggctgaaggtaaaggaaaaaggctgcgaggactgctaaaaaagtatccccctgctgtagcctttacttgggtattatttaccttttttgtatggattaatgccagcacacggatgatacggaatctgagcctaagatatagtacctcccttggtgattccatccactgggtgattattaaatggaggctttcatactagagttattgccttggaagtaaagcaagatttaccgtgcgaaaaatatagtggacatgtggagtggcaaaatctcttttctcgtaataactgtgtatatgttgcaatcaaggggttccactaaatcactgtagtaaacatgttttgcacgatgcgataaatgcactgtcggcatgattcgtattcgaatgtacgcggtggtgctatatattgtattgctggtgagtgaaaaagccagaagcagctgtaaatgtaacttgttttgagcgggattgaggggaatttgcaagtatgcgtggctcatctgaaatgctggtctcacggtgatatcaaattctccgctggttctatgctcttcatggggccagaacgcaccaattgcctgcgctcacatcggctttcgtcatatcatttacggcaaggcagatcctttgccgcattaggggcctcatgttgcaagttccgttctccctcctgcccggcgaagtgcataataccatcgtcggtctcctctacccgacgcgccgaccggaggttctcggatctttgcttatcgtgcctacccagcaggttatgcatgcgatgggctaaaggcagagtcccatcaaacatgatcagcctcgtctgacgattattgactgtagaaattcctacatctgaggagagttctagtccgatgatgtcgagttgatctgctgtgttcctctatcgtgacagaacatgcgtttgcgttgggcaacaaagggtttttcttttaaacaaaattcaatcgagagaacacgggatacaaaagccatgaacttttatctatctcaaaagttagaaacaaatatgtatatctatagataaattgatatcgttcttagatatgattataataactagatacaattcaaaatgaggttctatttttagtgccatacttattgttgattcagaaaatgaattgaaatgaaaagatatttcaaaattcgggaatcaaagttagaagtcctgagttcgaatgttttaaggtcacattcgtctcttcaattaaattttcatgcttagtaccaaacagaagactgatcaaactaagcgtgaaggtagtgttaggatatttaaataataagtcgtatattcatctaatagtttaagcttttacaatagttgacagtgcaccacaaaatcccacacttctctttagatagttttgttcggtctcgagatatagtaaaggtgaaaaactcacatttctcctctttttaagtataataacacttcaaaggagaagagaagtatgagggtttacagattcactataaactgttttaaaagtttaagcgattagatgagagcataacttattaattaaatattttaacactccttctcatgtttaatctgatcggttttctatttagtactaagtgtaaaaatttaattgaagagacaaatatagggtaagttaccaatgagatctgcctttggctaatctaacgaaaaggtatttaaaggggtagttaaaaagctgtaaggctagcttcccctttcccaatgggaaagaagccctttgtttctttcttatccaaaagcagagggccaagacaggagcaagaacccttggatccatcgagaaacaccgtgccatcccctgaatttggaggcgcaattattacatcttcatgcatcacccacttattccaaagattaatccttaaaagaaagagattgatttctatttaaaaaaattttaaaaaatgacttacgaaaaggaatgagtgaatgaataatttttttttcattatccatgaaaatatttacgcataatttgcttcggcggctgcgaaatctttggtaatttttatttgatcggaaaatttgtgataattcagacacaaaataaaggggcgagactatcagccgtggtggctctactgggtaggctcctacctttgaagggaaacgtcaagtgttcgaaactcttgcaattgcaaggaggttggtagatcattaggtgtattacgcgtggcgccctggtggtggattctgagctagcgtcacttggggtttacgtggcggctgtcaggcaaaaggttcgctctagtggtgggtcatgagctagcgtcacttgggtttacgtggcggctgtcagccaaaattcctccggccaaaaaaaaaaaaaaaaaacaaaggggcaagattttttttaagaaaagacgcacgaggcaattcaattcctgctcctgtgtgcctcgacctttctttgtacggggtttctctctccggaacattcgtggcacgcgtttcttggttcgttcctttttctcccagtttggacgctcacttccggagagatcgttcgtcattttacaccgtggagtgcccatttttttttccttgaattttcggttggaagtcttccatcgccttcgagtaaattggtcagtcaggtttagactttgtttttggctgatgataatctcttagcatgaattcagttatattgttcagtaatgatctggatcttcaactacaggcagatactgttggtcgctccatggatgttagcaaaggtgcctgagaactctacattaatggggaattttggtgacatgcccatctttaatcgttgttcttgaactagaattatgtggcgtgtgctattctatatgctttagattttctagggaaacgttgtcatataaattgcaacatatatatttgttcactttgttgttttctgctccaaatttagatctattgtgtgtatagcagggaaagaaatctgttagtctcatatatcttgtagacttcgataatctattgattcacatagatggtattgggattttcctttgtccttcagtctgaacgactattgccaattcatgcgctctggtgcgtcttgagcctttttttttttcctttctgaggatctgtaagatttcgtccaccatgagctcagagtttgattggtcgaaacagaagggaaccatacagaaaaaactactgaaagagtttcagaaggactaacctttgagcgacaacggagaaacgtaagtggtatgagcagaaaaaggaccaaaactcaataaactaagttacaacgaaggacaagactttcacgacaagcctttgaataatgcacagacaagataattttgtcatttctcgctatcactcctatctattaagaaggaaatgaacccaatgacaccagttaacaaaggatgataactagcctgcctttggaatcaagtgtaactttccttgaggtaaattttatcaaccgtaaaatcctgatgaatatttttagttagttaatggaagaactttgcctttagatgtccttcttcgttattaatttagactaccattctcaggtctttctaattgaggtttgatgcagaatcatttccctagtaggctgaatgatgaagtgtctttcacagtttcactcatagtgttcaaattgggtgctacagaattctcatttactgaagtgaatactattcgagcaagcgccagcaaggttacctgttgccacttctcatcagatgggaaagtacttgctactggtggacatgataagaaagtaagtacaggcagttatgtggacatgataatatgttgtcttatgccatagtctgataatgggatggttaaatttctggattatgcaggctgtactgtggtatgcagatactttaaagccgaaaacaactctggaggaacattctttaatgatcacggatgttcgatttagtccgaccatgtctcgcctggcaacatcttctttcgacaaaactgtcagagtctgggaggctgacaatgttggtgaacataatatctcatcgacactcacgttttttagatttttgaattcttttcgtattcaaagcttcttgcaacagccttctgatatactgaactacacgaggtgccagcccgactttaagtactgatgaaatttcaaaactttctgccactatgatacaagtgcttttgatgcaagtttgtttttcccggagcgaacaatctaatggaagttattgttttacataccccagaaagttacgtagaacatgacctacacttgtagctctaagcaagcagatgtaccggcatgagttaattgacaggactctgaatttatagttaagtgcatgatggtgaagggtgaagaagttggtaatctttcccttagagctgaccacagaaggttttggtcctttagaggaatggagcaggactttcaattaaagctggtcacccgttattactcagatacttagatattcctgtctttggcttgttgccacttgcaacatcaataaaaaatggctttgtggtcgattttagctttgtagccctaataggagttgccattgtttcaaaatctgaacattgaaagtttgggaacatatactatattgagtcgatattatgaatttatggcctaactgtccatgtgaatggttttgcaatctgactcttgttcaaaacctagagagttgcttcagtatgtaagttctctgaatttccacacttgcttacatgagatgatcgtctcctcttattacccttgaagctggaattctagaggctgctgatattgataaattctgccatgggtactctcccgtgataataatcaagtgaagatttggctacttccttcatagatcattttgaaagcattctcttcggagctcaatgaattgctgtttttggactgcagacttctgcggcatttattgtgtggcttttttatgaaatggtgtctgtgactatgaggattgtatttatccttcttggctcttatgcattattttggcagctcaatgtcgaggctccttcattttaccctgataatgatcatgttttaagagtttcctgtttcggtagttgttggtcaatgtggagggcaaattcgcatgtgaccttcctaagatttatttgactgtctctgttttgttcgcttgtgatagtacgcatttagcttcacttttattggctttatgtctaatgtccatgtgcatatggtatcatcaatggattatttgttcatttcaggctggttattctcttcggacttttatggggcattcttctgttgttgcgtctctggacttccacccaaataaagatgattttatctgctcatgcggtggggatggtgagataagatactggagcattaataacggcagctgtttgagggtattcagggtaaaaattaatatgaattgtcatgctaatcttgttgctccttgtggttttaatgagatggtgcatcaagtgcatctcggttctctaaaaatgtataacttatgttgctcgtgaatcagggtggcacagcccagttgagattccagccacgtcttggaatgtatcttgctgctgcggcagataatgtcttatctatattggatgtagagacacaagcgtgcaggcaaactttgcaggttgaatttttagtaacttcctcctttttattcggtctagttaagtggggattgttattgggtggaaaaaggggatattgttgctgagtgaatgattgtcttacctctagtaggtatgattgaatgatgttgtctgcaactacctttccagattctatgccattgaattgtatgcttgctactgatggctttagttcatgctctgttatcgtgttgaaatttgaaaggacaatatgttttatttctctgggcactagaagaaaagctattatttcatctctctgccaaaatcttactgtggtgatgggagttgttttgtttttcttgctagggtgtattggtgaacctattggcttgctggatatacctgagtcaacttgccttaataaagtagcattttcccaggtctaggtttaaggctcaatctagttgacaaataacagtagaaaaaagtttgtcatctaagcttgtcgtctttttatctgctgtatctaagcatatgatgtttatgtatgtgtcaccatttacggatgctattttaatgacacaattagtctcaaggtgtatctcatctttcagagcattttatggtttgcatctatcttattgaaattgttactcattcaattgcatggccttttagttcaagttggcctttcttttctttgagattgtcacaattagtatctttattctctttgtttcctgcttctagtaacatgttgatcgttcccacatgaatctgaattttgataacaggggcatactaaggcaatcgattctgtgtgttgggattctactggcgatttagttgcgtctgtcagtgaggactctgttagagtttgggcagttgggtctggtagtgaatgggactgtgtacatgaattgagctgcaatggaaacaaggcccactcctgcgtgttccacccaacttatccttcacttttggtgattggctgccaccaggtaaggcgcacgtttgaattatttattttagcattttcaggtgaattctatctctgtacataggagaagtgagagataagtccatgtttagatgttcccaaattttgtgaatttttaggattgcataagaaatttcgagcaagcttcttgggatgctaatcaggctcatgagtttctaaaaatattaagtatttcctagtacaaatcaggcgtctttctcactatcctctgaagtagcgaaggtcaggtaattggcaacttcagaatcatggcttctgaagcaggctctacaagagccatggaacagcaaaagctatgtgccttatagtatgagtcacgtgaataggctctttggtcttctatagccccataagatcttggtttaatggtgctttggtctaagctaattgaaaattctctgcagaccctggagctttggaat

SEQ ID NO: 10167 - DNA, 6344 bp, Eucalyptus grandis
  Intron number 2 from transcript Egrandis_v1_0.008084m (loc us Egrandis_v1_0.008084m.g) derived from phytozome v7.0 (c hr-ID scaffold_9; pos 28360449 to 28366792)
ccaagaagaacccgtcttttgcaataaacaaggaggtgatctctctgttcaacttgttatagataaagccaaatatttgtttttaggggcttttttttgtcttttctattagatttccttttaggttaaaagtggtacctatatattagcgatggcaaaaccctagccgtcaagacgctgaaaaaggaaatagagaggcaaaaaaaatagagaagaaaaaagtgagttttttcttgatgagtgttctcaatctctttgtgctctgatcttgagagaagatcgtcgttgtattccaactttttcaaagtctagtggattcgcagagtgcctctgcacggagacgtagcccaagtttgggtgaacttcgataacaaattttctggcgtgttcatctgattctgctcttttattattatattttgtctggtgaattgtttgcgagtattatttttctagaatcgatgtgcgatttcgtaacaactggtatcggagcctaggttggctaatcgagaacatcgagggtttttcggtgacgtttgattgaaagcaaacaggatggcagaagataaaatcaaaatcgataagttcaatggagaggatttcggatggtggaaactacaaatagaggattatctttatcaaaaagatctctatgcaccacttgagagttggaaacccgagatggcggaagtagatccgacagcagaagccggatggaaaattcttgatcgaaaggcgttaggtgcgattcgtctagggttgacgaaaaagacagggtatcacatcgcgaaagcaaaaactgcaaaagaagccatggatattctaacgaatatttttgagaagtcatccacatcaaatcaggtatttttgctgaagaaactggttaatatgaagttatcagatagaggttctgtggcagagcatattaatagtttcacgcaggtcacgggtcaattggaatctgcaagcataaatttagatatgaagcttcaagctttattatttttatgttctcttccagaaagctacaataccgcagtgtagggaatttcaagcaccatgaaggatgatttaactcttgatgatgctgtgagtagtatcatggatgaagagatgcgaagaaaagtctcaagtggagataatttttctgcatctacatcttcaacggcacttgcagtggagaactgtggaagaagtaaaagtagaagaaattttagcggtcgtggcagatcacaatcaaggggtaagcgacaggttgcaagagatgagtgttggttttgtcacaaaaccggacaccggaggtttcagtgtgaagcctacaaaaagaagcagcaagatgagaatcaaggtgctaatgtagttagcgataaatctttgctagataacttgtgtttgtctgcagggtttgacatgacaacagataaatggtttattgattctggcgcttcttttcattgcacctcgcaaagagacatatttgatgattatgctagtggagattttggacaagtgattgtgggaaatggccacatgtgtccaattgttgggaaaagaactgtgacagtgagcatctcaggtggaggacgtctagttttgcgtgaaactaggcatattccggaattaaagaaaaatctgatttcaactagtaaacttgaccaagaagatttggtaataacctttggctgcggagagtggaagataacctcaggggtaagagtagtagcaaagggaaagtgtacgggtacactttaccttctctaaggagacaatatcagtgatatggttgcaactacaatgactacaggtaatttatctactctttggtattatcatttaggacatcttggtgaaaaatgtgtaaagcagttacactcgagaaaattacttccgggtttacaaaaagttgagttagatttttgtgagagttgcatttatggaaaatagaaggctgttagttttcaattgaatgggcgacaaaataaaggccagaagctagagttggttcatactgatgtatggggacctgctcaagaactctcttatggtggtaagagatattttgtcacattcactgatgatgcaacaagaaagacttgggtctatgctcttaaagaaaaatcagaagtatttgggatgttcagaatgtggaagaccatggtagaaaaataaacgggttatcagattaaagctttgaaatctgataatggtggtgaatacacaagtaaagaatttgcaaattatctgagccgagaaggcatacatgggctaaagactgttcctagaacttctcaagagaacggtgtagctgaaagaatgaacataactattctagaacgtgtgagatgcatgagactacacgcaggtctcccgctacacttatgggccgctacagttgatgcagctatttatcttatcaacagaagtccatctagtgcgttggatggagaaataccacaagagcggtggtcaggtaaacagattaattattcacatctaaaggtgtttggttgtattgcatatgctttaattgacagggatgatagaaaaaagcttgatgctaagtcccagaagtgcgtctttattggatacggtggcgacgagtatggctacaaactttgggattatgagaataacaaagtcatccgcagtcgcaatgtggtattccatgaagaaaagatgtacaagaattgtcagacagagacagagcatgagaaggtagtacaaccagagtatgttgaattcaacataatgcccgtgaagatgtttccaatagatcaaagttcacctgaaatagaggttcaagatgagcctattatcagtaaagaggtagttcaagaagaacgcagtgattcagagcaaacgaatgaccctgaagtacctgtcttgagaaggtctacacatgtgagaaagccaaaggtaatttttgatccatcagctaatactgttttgagccatgtcttatatacagattcgggggaaccggagacttatgatgaggcaaaggcagacacgtctcacttgcagtgggagtgtgctatgaaagacgagatgagctcgttacttcagaacaaaacttgggagttgaccaagttgcccacaggtaaaaaaactttattaaacaaatgggtgtacagggttaaaaatgaagcagatggtagtattagatacaaggcgagacttgtagtcaagggcttttctaaaaaaaaagggatcgactactccaagatattttcacctgtagtgaaaatgacattaattagagttctgctaagtatagttgcagtggaggatcttcatcttgagtagttagacgtaaaaacagcgtttttacatggtgacttagatgaagaattatacatggcacaacctaagggttttgaagtcaaaggtaaggagcacatggtatgtcgcttgaaaaaaaacttgtatggcttgaaacaagctccgcggcaatggtacttaaaatttgatagtttcatgcaataaaaaggatttgcacactgtgagtctgatcactgtgtttattttcgcaaatatgatgatggtgacattgtgtatctatctttatatgtggatgacatgcttgtggctagttccaatatgaagagaatcgtagaagtgaagaagatgttatcatcacagtttgctatgaaagacttgggagaggccaagaatattttaagcatgaaaatcatcagagacagggaaaataagaaattatggttgtcgcaggaagactatgtgaacaaggtgttaaagagatttaaaatagacaaggcaaaaccggttgcaaatcctctagtgagtcacttcaaactttccaaggatatgtgtccaagcactcaggctttgaaagatgagatggcggtagttccatatgcatcagcagtagggagtttgatgtatgccatggtgagcacgagaccagacattgcacaagcagtgagagttgtgagtcgatatatgcagaacccaggcagagagcattgaaatgcagctaaatggatattgagatatctagtaggtacttccaattactcactttgttatggtggtacatctctagagttgcagggttatgtagatgcagatcattcgggtgatcgagatagtggtaagagtaccactggatatgtctttacagttgcaggtacaacagtgagttgggtatctcaactacaaaagatagtggctttattgacgacagaggcaaaatataaagcgattacagaagcctccaaggaaatcatgtggttacaagattatatggaggagttacatcgaaaacaaccaatcagtacactgtggagtgatagtcaaagtgcagtgcacttagcaaagaatgcagcttatcacttaaggactagacatatcaagaagcgttatcactttatcaggtcagcattgaaagataatgaattaaaactacacaagattgatggctcaaagaatccagctgacatgttgaccaaggtagtagacagagagaagcatattttctgtactactaccattggtattactccatgttgattgatgaggagtatcgcagaggcacaagtttttcaactactattttttgaagaagatggatgcaaagttgcttggtgctttgatatatttgtcttcaagtgggagattgttatagataaagccaaatatttgtttttaggggcttttttgtcttttctattagatttccttttaggttaaaagtggtacctatatattagcgatggcaaaaccctagccgtcaagacgctgaaaaaggaaatagagaggcaagaaaaagagagaagaaaaaagtgagtttttttcttgatgagtgttctcaatctctttgtgccctgatcttgagagaagatcgtcgttgtattccaactttttcgaagtttagtggattcgcagagtgcctctgcgcggagacgtagcccaagtttgggtgaacttcgataacaaattttctggcgtgttcatctgattctgctcttttattactatattatgtctagtgaattgtttgcgagcattatttttctggaattgacgtgcgatttcgtaacacaactctctccaagataagctctatgacctgagaactaaggtaaacatccttttatctatcgtttcttttcgagtaatttatgagctggagttgctaattttgaaagtcaacgagctttgcttagtctctcagatttagaaatttggtcttgtcgaagtggggttgctgcaatacatacacgtgctctgataattgcttcgccgatgatcgttttgagctgtcttcttcgcataaagttaactttatttgagtgaaaagtggatcgccccctttcttgcttctttcagagcgtggcttgcatcttttggcaaaatgggtgatgatgagcagtcggtcaagttgtctgaacagtacctctggcatcaatggcctgtcgccttttccaatctttttcagttgagttgaccttaatcccattcggagccgataagagaaaaaaggatcaaaatgtttccagttaatcttaagcatgccactagtgtcaattgtcaatgtctgaatcttgagtctggtgtgaaaaagttcgttcgacatcttttctgactgaccacaatatttgctgagagcacttctagtttgagggaccccgtccaagtagaaattccaaatcggacttttgatgtaaattaggaaagtcttgagtggacttttggtagacgaacatatgaagcaacgatgaatctggtttggagttagactacgtttgaatagatctcctaatttgagtatgctaaaaggggttggctgctttggatcaaaatattatgtatataagagatggttttggttttttgcctgacttttggctgtgacaatcaattgtgcggcttgcaagtgaattatttcaccagaaaaataacagtgttttgaaaccaattaattttgtgggaaaatctgtgaattcctttgtgagattgatagattgtattgtgaggaattgtgaggtctaaattctatgtcaattattgagtgtactagtagttgggaaatagtgacaatctttgagtgacttgagtgtgattgtaattttggtgcataattttgtttatattattataaatgcctgttttccgcaataatatgaaaagggaaatgttgtgattatgtctgcaaaactgacttcgggacgcatgctgcaagttggaaatctgactggcccccacagacttgtgtttgtcgatgctcatccagttttgttgcaggtagtgaatcccgcgagtctattccacacattataactagagattgtttgggtggatccattgcctctcttttcaca

SEQ ID NO: 10168 - DNA, 917 bp, Eucalyptus grandis
  Intron number 3 from transcript Egrandis_v1_0.028496m (loc us Egrandis_v1_0.028496m.g) derived from phytozome v7.0 (c hr-ID scaffold_8; pos 28081127 to 28082043)
aactggtacagataactttaagcatgtagaatttgccatgatttgggttctatgacaatggtgtacaacggattgtgtggtctttccactttcaagaaacaagactgttttatgttacttacttactaggttggacatagatagtcctatttgggcatgcttttatcagcagtacgagatatttgatggcctaaagggctatcatatatggtgtaacctttggaccttctaaaatcaaccaatcgactgcatacaggagttccacagttatgtcctttctgtagttaaatttggaatccttggaatttcttaatagatggatatgcttgttcttgctatcgtatggttagtgcattcacatattttctctggaggagatccaataatgctaaattggatgatttgtctagaggataatgatgtcacccatgtcagtttgaagtttgaacatacagcaattctaaatgtgtcatttattttttcttattttaggaaaaatactaagtttagccactgcaattctccttttgatttatttatgcatgttgattcgaaaggcaaacctggacggtggacttaccaagaatatgatcttccagtgcatatggcagtgcttggttgttataaggctgttggacgattatttgtttatttatttaagttcatagagtactattgggaatcaagaattctcggagctgttttcccatcacaaacatgctctccttttattgaaaaattggtggccctctttacttcagctgtaatgtagtttatgtagatacttttcttaacagcctctggtgtgacttccagaaggagcgcccatgtgtgcacagagacatgcgtttgacattcttacatctgtttttgttgctacagtgtgaccagaaactactttgacaacctcgtgagag

SEQ ID NO: 10169 - DNA, 2275 bp, Eucalyptus grandis
  Intron number 5 from transcript Egrandis_v1_0.007245m (loc us Egrandis_v1_0.007065m.g) derived from phytozome v7.0 (c hr-ID scaffold_10; pos 9055271 to 9057545 reverse strand)
tttgtgtaagatatctctactgagggctgttgttttttggttgttttcaccgaaggcagtgtcccgaagagacaaactgaaattgtttgaacaattcttttctaactattttatcagtacaatgaccaattctagttgccttggttgagatggataaaaggaaactgatgtagctattaggttaatcaagtactcagctctgagatcttgtttttccatctaattcgtgttcaattagcagtacctattatatattatccctcggcgtgtgctttttgcttgatgatggaatcttggtgggataaagggaaattgcttgcaaagcttgtagtattcacactgtagggtataagcatcttagttgagtaggtatgatgcctggctgatttcgcaaagcaaaggagcaattgtgacattgggaaagacatacaaaaaagcaagtactttgtagcacaattacctttttgagtctggtgtgactataatatgctcaggcaaaatggaaatgctgtggttcggtatagggatgaatgaaaagaaggaagaacagggaagaaaaaacaggatgctattgtagttctgcgtgatttggaagagtgtaaatggaaagaataaaaactggacgcaaagttccaaaatatggagttaatgtcattctgtcggataagcaaagaatgcaaagtatgcttcaaattacacatatgtgctcgatgtgacactaaaatggttagaggattgaattgttaaagtaatacttctcttatcaagtatgcttcaattacacgtgctcgatgtgacactaaaatggtttgaggatcgaattgttaaagtaatacttctcatatcaatttctggtttactttttttcttcttttcccttcatgtcttttccttaaagttcattccttcactttctctctctctctctctctctctctctcttttccccccttaaagcatcttgtgaaggctagtaatgatggaacttgcacagttaaatgtcactttgcttgaacattcagtgcagtcatactaatgccttgagtaatgtatggttgctggggaggaaaaaaagactagaaagtacatctgagaaggtggtattctcttgattgacgataatatctcaatatcttgtataagtgcttgtatatagaatgatgagcttgaaatgctgttagagttggcgttgggtttattccctcaaagaaggaccttgaatgtatggatctagcatacatggtcggtgtttggttgagtacaatgcgaaactaagatcgacatggtgggctccatttgaagagaattttgctctttgaaattgtgattgtcctgtggcattggggttcctagaaccagaagaaaaaaaagaaaaaaagaaaaaaaaaaggaaaaaaagaaatggagtttattctttgagataaaagaattgtgaaagagccatattagattaatggtttccttgatgagagtcatgagactatcctaagtaatggaggataaatgtgtttatttattgagcctttgcatgcttataagaagctaaccttgaaccaggattatagcaagaaaagaggaggaaaaacaaagtatgcgacataataaacttacagatgtgcttttcaattattatggccagcacttgttagtaaatggccctttgatcatctgctcaagattaaggtaacattacctttgttgaagaagatagaggatttaaaacttttccctaggcattttttattcaagctcatccttcctgttcatgggatttcataaactggccatctgttccacatgtgttgtttaaagcacgcgacaggttccttcctcccacataggctatttaagatagtttacaagcaatgttagccctgaggggattagaagactagatacccctctcattgttggtccagagaagagttctgtttgaagaggaaatggtaacttgcttcatctgttgcctgagatgtcattgctggctttattgaagccatgggtctgctttgatctcttctggcttgaagagtgaattgagataaattgcttcctatagtaggaacaataatttgcttgactgagggctttttccaaaatttatattgactcactttgtggttattcagtaaattaaactcaaaaacagttctctgtgcttatttgtacatgatgatattctctttaattggagttctgttgaaatggatgtgttcttagccggatttgtaaattcacaggtacccggaaataattcaaataaggaaccaacgtt

SEQ ID NO: 10170 - DNA, 8491 bp, Eucalyptus grandis
  Intron number 1 from transcript Egrandis_v1_0.036939m (loc us Egrandis_v1_0.032361m.g) derived from phytozome v7.0 (c hr-ID scaffold_9; pos 34444202 to 34452692)
cctgtcttcattcactgcgtcgaatgtctcgctgcaccttacgtccatctctgtagaattgtgattcccaagcgaaaataacacatcgtgctacgttgggagtacttaggatgagcaaataatgtatggcaagtctcattcactattatccttgggagttgttcctctcggaccttacttacggcatcttcctcagaaaccaaaagggaaaacagaaaagaggcgagtccctccaataaaattatgcaatctctgcttcatggatggacagcatcctgataaagctcgttatcgacagacggaaatatcattccgaaccgtgctagggttgaacctgctgctttacttatatttagacacataaagattatgaaatatttataaaataaaagtctcgatcatgaaatgaaagttcatactaatagtttcaaatgacatactcatcatcaaatgttgtggaatacagatcgtgtaaaaataggaaaacacaaaaactttatttaaatccaagtttcacctattgaaaacttagaacctaccgatcaaaacagctggaatcccaccaatccatcgcttcaattcaaagttctaacctgaaagtatgctcatccctaatagtatgctcatccctaattccgagcatcaatccccaaaccatcatgctctaccttatgtccttgtgcatagtgtcaaaaaggttatcgagcctagattcaacatcgccgaccatgggcaacccttagatctagtgtacctcctggccagcgatgccatacatggcaatttcgcaagtagtcgtgatcttcgagtagagagacaatgacacaaattgtgggtgatgcctaagagccacgacgcaaggactggagttgatctagactcataaatatatacacaaagttaaacagataaagactcagtccgttagagcgacagattcatttgaattgcccaaacaaaccgatcctttcttgctcaaccaatttgtggtaagatgcatttcaccactaaatcaattatttctagtattacccttgggcctttgatcataataatgacttttattttttattttttatttttttttggttgaaatggctcaacctcacacaagttagaaaattatatagcgaggaccaacaccacaattccttctcctacatgtatcgtccaaagctataaagaaccaacccaaaacgaaagtttcttttttccttttttttatgaaaaaacgaaagtttctccctaacaagtccttgtgaatttcacgatacaattataatatacagattttgccaaccaagcaaaagctggacgatgatggcaacgcaacgaggcttgcttgtcatagaggcaggcgacgattgatgatggaggaggatcaggaagaatgagggcttagagatcaacaaaacgaatttatagtttatgtttttattttaaatctattttccggttacttttctatttcaaaaaataaaaaaattaattaatattaacaaacagatttttttatttatttaatttcaaggaaccaaaaaacaaaagaataaagaaattgaagtgttaccttacacacccttaattattcattaattactaatgtggcgtttgttcaatgttttcattgtgccacattaactactgatatgacacgtcaattttttttctattcatcttcaattatagcttgcacgtggacattgatttagaatttaaaaaataaaatttgctttctctctccctccatccatagccaccgcccgtttttttttttttttttttaagcatagccaccgcccatttggcagactcgagaatcatgcaatttttcttctctttttttccctcgctagcattcacacgacattataactcaatgctatcatataatatgtctggtaattattttcctttctaatcacccttattaaacatagcaatgtatagcataaatatagatgtattcttttatatttatcttccacgtatcaacatagcaaactaatatacttgtcaattgctatacatcatttatcaataatttgacggtaaaattaaatataattcatatatgtaatccaatacggaaaattataacacaaaaactgagggcagagatcgaaagctcctaagtatgattataagcatttctaatcatacctacttgcatctccatgatatggacaatgaacgaggcctaataatttaaagtacctcaaataaactaattacataaagtttatatttttagtttaaatgtctaaggattagtattgtaaaaaatttcaaaatagtagatctatataaatttatccaaaactaatttttttaccaccaaaacactcaaattgatacatttatgagaaattttctctcctttagtttctattaaattagattaataccataaaaaaaactataaactaatatacctataacaaaggagggtaaaaccccaaactgatacatttgtcatccaactcaataattttatggtaaaatttaacagagactaataaatgataaatttgtcataggtgtaccaatttattgattaaaaattttgtttgaagtaaatttgtcataaatataccagtttagagtttttcgtcatattaacacaatttttaaagcacatttgaaaatcaatgcatttcttttctcattctttcctaaggcaggatgtgaatattgggaatatgcaaaatggattgcctgaccacacagaggaaactgaattggctagtggggtgtaattcttgggagtattggtccgatttccgatatccaaaagtggaactagtgttgagatagtccactaattagtttcaaggaagaacgaaattggatcagactgagccgactacatatatatatatatatatatatatatatatatatatatataattttctcttaaaaaaattagtaaaatgtgaactagacattaacttggtcaatggtatcgcaagctactgcatagtgactcttcgctcatcgtcactttcatcaatatcttaagatttgtcattttctctcattgtgtacaaacattttttagtggggaaaaaagtgaccggttcctggatcaattagttctttcgatccaatatttgaatccaccttggaattggaccggagcgggattccaattttcggaacatggaaagaacccggggatatcgaattcgaataaatgcagggttccagcataaacaaaagtggggattacgaggaaattggtagacgcttcggaattgcggccccgctgatccgacccgatcggtcattcggttcgggtcctgcggggcggaccgggagatgcgagtctcccattcctcccgaagtccatatctcgtcttccgtcggactcgggaaccggagagcttcgttcctcctcctccgcacgaggtaactctctctctctctctctctctctctctcgccggcgacggaatctctcgattcggaagtcaggtttcgcttttcatcgattctccggcgatgttcagttgatcggattcggaaagcgattgatttcgccgggaggttggttcgtttctgatgattttctttctttgcttctttctgcgtttccgcggtttttctggttctcgcgatcccggaggtgagtctttctaggtagattctcgtgttgtcttgtgttgggaatgtcaaaatgccaataggaatggatcgccacggatgcagagcgtgcgtgcttctctttagtcagaataggtgcgattctatcgattcgtagcctgataagcttgatttggctgtttcaaggcgtgtaatgtgttcggcgtccaagttgattaggtcgtttgggagaatgaggtgagcatgatgagttgccgttgatgttcggcgatggagacgttcggtcgcttctctttagtcggaataggctcgatcctatcattccgtagcttgatagacttgatttggttgtgtagaggtgtataatgtgtttggcattgtagttgattcgctcattagtgagaatcaggtgagcatgatgagtttggcaattgagacgtttttcgcttctctttagtcagaataggtttgatcatgtcatttcgtagcttgataaagttgatttggtcatgtcgaggcacataatgtgttcggcgtcgaagctggttcgctcattgatgagaatcagatgagcatggcgcgttggtattgatgttcgctgatggagatgtttgttcatctcaactaaatcaagttaatatattgactggatggatagaacatgactatttgtgaggagactttaatggaggaaaggtcttcgtaatggagcttctcgttatagatatgcagtgttctgtctttcatttttatttgcagtaactgtttggagtattatgttgataattgatgtcaccactaccaatgcaagtgtttggcgtcatatattaattccgggctgcaaattacgtaatttctgcaggcttgaaatgtgcttaaaagttggttaatccattctaggcagtttctttagatttctaagatctctgtacatgaagtttggttttagactttagtcatggggcttgctttagattttcctaataaatagagaaatgaaaggtatcttgttttcccccagaaaatgctgccagatagttgcccgtactttagacaatccattttgtatttagatggcaaacaatttatccaattaatcatgtgatagaggcagcaggtctctagaggtagcataccaattattaatgctcctccactgatttatattgatgatttgctagaggatgtgatgttgcaatccactattcaggttgtgtgtgctttatcagaaggaatttacggttaaaactgttgtctcatgggcactcacaccaggaagactttgactaaatgagcaccctttgtttttatggtaaccattccatgatttatctagccttgcactgtctttcgactcttttgctgtttgcttagtggatgttttcatgtctcaatcatcactcgatgcaggtgactgtgtttagtcttttcaaatggaatcaaacatggaccctgaacaccacgtaatgattgaagaaagttctcctaaaagctttcaaattgatccaagaagagcgcgcttcccatactgcattgtctggtcaccccttccggtcatctcgtggcttatccctttcatcgggcatgttggaatatgccgagaggatggagtaatcttggactttgcagggcccaattttgtatgcgttgataactttacatttggggcagcaactcgttacctacagataagcaaagagaaggtaggctcacttttcaattgtgaagtgaactttctttttcccccgaacggccatgacttcagctattgaactctttactatactttgagatgagatagcaccacttcatagttatcgggcagttttgcactaaaccatgtgttagtggttttctatagtatgaattatgccgggcgtcatgctatctgttcacatgttctctacagtgttcttttctgccctgtaaatccgactacaacgaggatcaaaaccaagaggatgaatttggaagagacgtgttgacttgggacgaagcactgagaaagagcacccaggagtttcaacaccatcactacaacctcttcacttgcaactgccactccttcgtggccaacaacctgaacaggttgggcttccgatctggcggatggaacatggtgaacctggttatcctgttccttctggagggccgctgggtgaacaaggcggcgatcttgagatccgtcttgccattcgtcatcatcttcccgcttgggctcatcctgggaggctcgacattcctggcaatctgggcatcattgaccttcctcctcgtggggtggtttttcctcgggacatactgttttccgaatgcgatccagttgtagagctctccccgtagtggcatgtaaaaacaccttcgcacggatttcttatcactcccgcgagacgcggtttttagtgcacactgtatatactggcatactgcggcgtcattctgatttctggtctcttgaattagtcagtgccttgtggttggtagtgtctgttgtgctctgtcggaggggtgggcaggaactcaaatcttccgttttaatcttccgtttttccaaaattgtaaagataaattgatgaaatatattttcatcgtaaaatatttaaatataaattattatcgataataaaaatacttttcagtgattaattatttcgggtgagaaagtaatatttaaattattcatttttcgggaaataaatggaggcctaacttcagaacaagttgtgtgatccaaaagaatttttcggatgaatggaatttgactctgcagaatgattttctatgtgataaattaatttcattggtcctatccgagagtacttggttacttagagtacatttgcttttgagtaaattatttttgggttaaggctgttatacaaattcttttgtaaaacgatatattttagattatagatttgtacaagcttttctttactctattttggaagtgccgatcgcgacaaattgagcacgagtccatcgtttcagcgagggagggagacgatccttatccgtcggccgcggcaaagttgcaatttacgacaaaacgacaggatcaaacgcgagctggcgtcgtacgtattttaaggaaagttcaccaactttcttaaatgcgcaggaaggcggttttccatcaataacgtggtcaccttctctccttctcccttcatcattcttcctccttccttcttgtgcgtgcgcgtgttcgtgagtgagagagagagagagagagatggcggaagagggccaggtgatcagttgccacagcgccgagtcgtggagcgagcagatcgccaagagcaacgaatccgacaagctggtgagaaattttcggatccttttcatgcgttctgcacatgaatctggcgttgtcgatgcgatatgctgtcatctagttcgcttccgtttgtgcaagtagtcgtagcaaatgggcatggcgttcgacgaaatgcaatctcgagccggcttccgaggcgatggtttgtctttgatacttctggatcggccgcgcattcgtttgcggtcctttttttttttttttttttactttttggccccggccgggacgaacgaaacctaatcggtggaacggagaaaaagaaaaaaaacatcagaattcagaaagaggcacgttgatctgagcaatgacgctgacagggaagagaagcaatgcttttcaaggagattatcatcaactttcatcgttcagacttagtgttgttcgataagactttttttttcgtttttttttcccgaaatcatatgtgatgggaacgggatctggaggcgacggctgcgggttggaaggtggcgggccggctgtggcgggaatggggtggcgatggtggcggcggcggggatggaggaggatggctggctcgaggccgaggaagagagagagagcgcagagatcgtgcgggttcggctgtccttgcttattagggtttttatgtgcttagctgtaaattgacaggcagtgcgttaaagtgtgaatggcttgccgcgtcggctacataacctcctcccgaatatgattcacttgtttgaaatgccacaaacagtctgtcgcaacacttagtatgccgaagttgtgaataggggttgatggcattttacctgagtttataatgcggcgccatgtctggccaactcgctgagcataggacgggaagaatactcggtacatagttccccgttgttgattaggttgcttggttgatcgttctccttttggactatcttaagttttgcttgtaacccaagtaaatctcgcaagaaaagtgattcttttcgctaaatagaatcatacttaagtcatctttttactctcgtgtgaaatcaagggggagaaatttgttcatatcactctccttttcttttgaattctattttctcatgaagaaagtacatgcattgcttctctactagtactaaagaggagctggctgagtcatagtttatgactagtgttgttgtatggctttcgaaggtaaatactctgattttttatggcaatatcagcagtctgccagtgaattcttaatagcaggtgattttgtttgggttattatatttctttcagtataatttggtggaagaatgagcaaatgggtcagtgtggctgattaagctctttgtgttcatgagctattgaactgccaattaacaatttccaggatgtttctgctgtagcgtctcattttataacgccactagtttcggtgatgaattggtcagaattgaaatgcatatgatgatcaccgagtttgtttgtttcttttttgtttgaaacaggtggttgtcgatttcactgcttcatggtgcggaccatgccgtttcattgcaccattcctagctgagctggccaagaaattcccta

SEQ ID NO: 10171 - DNA, 1407 bp, Eucalyptus grandis
  Intron number 5 from transcript Egrandis_v1_0.001971m (loc us Egrandis_v1_0.001971m.g) derived from phytozome v7.0 (c hr-ID scaffold_4; pos 18689010 to 18690416 reverse strand)
tgcttttcatcattttgttgggtatgtcctgatgccccatctaagaatcttgtgtagggagacatttgtagatcttcaattgatcagtggtatatatactccttctttcgttcttctttggttttcagcttgttattcgctgtgtgccacgttgtttaactattttggaaagtgcaattgttttatgaagtggtttagacatttacgcggccatgaactagcataattttgcacgtgatgaaatatctgatctctacagggaagcattacaaaaatgttattttagtggctaccacactattactattgaagagggaggtggagttttttctgcctcagaaagatccatttctcgtatatttagtgaagccatccatgttcttctatgctgtaatgattgaatctacacccagagttcattgaatttatttggtcagtcttttcattggataattctccccttcaaaggttcctgttttttcaaggaaattgaagcatgaacatgactttacttttatatacaaactgataaaatgttgaatcagggcaataatgtttctaggaattagaactcgatgaagtgcggagtctggttggtcagtgattgttgctgaaaataaaatgaccgtgtaccatattgattggtatttttgcagatttggatctatttgaggaaatgtgaacccaaatttaaacttgcgagcaactttaagtggctacattgaaagattcgactttaagatactgtaggctaatagaatagttgaccagaaattggcagaaatttcaaagaatattgtccttggatcttgttgaagactcttttactaattaaagtacaaagtcataagagaattcatgtagctgactgtgctaagtggaagatgttggtagttgttctgttggtacatcaatggccatattactttttcataaggctttctctgtcaattatacctggcttcactatgtaaatcattttgatattgaagtgtgcagccaatcttttggtgagaaacttaagaagctgctttgctcataaaaaagaggaacttcttttgggacttctgaacgtctctcaagagaagggcttcattttaccagagattcaccattctgttgagcaattgaacaatcctatagcatataatctaagatggactgatacagccatgaaatacttctttcaagaccttattctgcatttgctatttcaatggtgggaatgcagaattgacggattattacttgtgctgatcctggctgatctttgtaaattcttgtttctcatttcatttaattgttctttttaaaagatgactactgcataattgcttactttttccagtttgtgctatctgatggtgttattgatatttctttctccccaattttttaccgaacagc

SEQ ID NO: 10172 - DNA, 4531 bp, Eucalyptus grandis
  Intron number 3 from transcript Egrandis_v1_0.026219m (loc us Egrandis_v1_0.026010m.g) derived from phytozome v7.0 (c hr-ID scaffold_9; pos 10894684 to 10899214)
aggaagtcgataccagatctgtgtttgttggaaatgtgagtttgactgttatttcttggtaacttgttggctatcttgacaatgcttttcttgataaaggatatgaccttggattagctactagagtttgctcttgtttgaaattttttagggttagctatttgagtctaatttttctctttaaatgttggagttattttcaccatcgagacatttattttcaggtgattttgatgattctgacagttctctgatgttatctagacatgagttttctttcaagacgttttgcactttatccatcgttctgttaataggataaaaatcttaaattttattgcatatacttctacatgacactttcctcagttcatgtttgtctgtgctgacatgtttttcttgaaatgtgagtagatatttcgcttattactatcactgtgcttttagaaaaataaggaccttattgatatagaacttcataataaagatgttgattttcctgaagtttctctcttttccttccaagaacaacatttctgggcatggaggttattcactatcgcaatcccacattgcatttataatgatgcacatctgtgcttggcaaagtatgcccaggggttatgatgacaaaagaaatttggaacaataaatctcagatctaaatgtatctttaaagataacaaagtaatcataaccatgcactctgtgacgatcttgttttgtgtttgcttgtgaatgggttgctgatggtggaagatggttatattcttagttgcagttgaataaatttggtttgctatggttgttagtggtggcgtagaatttaattcttgttttttatttatttatttattaggtttttgctattggatgtttagttcttgttgctagactttgtttagtactattttggggtaaagacacgcaacaagtgtgtgttaggatgagactggtttgttggatacgtggattctcgaaaaggaagagtagagaattatcttttcttataaaagaaaaaaggcagagcattaatttaatctaatgtcatctttttgcaatgacattgtgatgtcatcctttatcttttatcattaggttaatgttggaacctatcaggccctcctaaaagataaatgactgaaaagactttacctaacttcgcgcttttaagaaatgaaggggagtgccagcaaagaatttctttaaaggggtttttattatgagttccgctttgtatttttttgctttattaaaaattttcttgctgcttccgaaattcaaacatcattcatttttgaaggcataaggcatacatgtagagtcatttaaaatttggtcctaatattttagttttctttcattgcaaaattctgaagggaaagcagtagatccttattttttaaggcctaacgaatggaatacaaagaagaattgtcatcttcaattcttggtttactaggatctgtctctttcgtaatattctaatactgaggtcggattgggcagttgtagatgagatctctttttcaaagttgtgaaataagttagcttgttcactaccaatgaggaaagagcatagccagctttctagcagaaaattatatgtgcatatttgagttaaattttttttgcataatctgttaggtttttctgaatttatctacttcgtgacttagatgacatttccccgcaattttatggtactaccattgtcttgtctatttccttgtgtgtgaatcttcacgatattttctttttcgtagtcctgtcaaactagatctttaatttgcggttctctcacatttgctcttgcgtaatggaaagctgcctgcatttcattttgacttgaccactaagctatgtcagtcaaccttgagttatggttgacttcgtgtttcactgtgattgcaggtttctcattcttcaagttgtctgtatagattgagcaggaatctttacactgtattttgagcccaagttaattttgcattagatttggttgaatagatgtggggaaaaagtaattgaagtcgcaaaaaatcatgcgacagaaaaaagaacaaaaaaattgaaggaaaacagtgcaaagtttctgttgtgtgggtgaaaaagtgtgtgcgctgtggaggaaaaagaaccaacaagagaaaaaaagaaagggaaagataggaaaaaagaaaaaaaaaaaaaaagagaatgaatgaaagaaaaaatgcaaaacaagtggtgcatggaaaaagagtagaattttgaaagttggggatgggaatatttgaagaatgttctgtatcagtgagagagatgttggatggctctaaagtagttgatgatttattaggacttctgtagaatctacgggctctcatacccttgctactgctcgtggtggtggtggtgtgttggtgctggtgccgctgacttggcctcaggacttctcgtgatatagcagacctggtgaggggtgtttggctgtgtcttgctcgtgtcattattctattgtttatatttatcgatagttctactctaaattatcaataagatttgctcccctcgatagacctatacattaatccactgtatggtagttgatcatctaacgtcattggaccctacatagtggataagttgttctggtttatccttatctcttctttagaaaaagaaaagtatttttggggagcttctgcaatctggccttttatgtgagcagagtgaaatttttttagttatttttcccctgaaagagctattcgtagcttggctgaccaaaaatctttggagattcaccagaattttactaagtttggctatgtgttattattgaatttctatcttcttctttatttgtgcaatttgggaggtataatcttttgggaaaataccaaaagcaaaccttacctttcactaaatggctacttgcatacttttatttttgaaaataccaaatacatactgagtttagctttggagactactttgcatcttcacatcatttatccttgtgtctgtatttacaaaaaatttgtttctttttccccaaaatgcccatatgcaaattctaaattctgatggccaccgaaaagactcaaaactaattaaccctgagcaagatattttaagtgagtttgcaaggagggacaatttggtctttccaatgagaggttttgcttgaaggtatatgagtgatgtttgcaaaaatagaggtatataagtagtcattgggtcaaaagtaatgtgtatttttgttggtatttccttaaattttgtcaggggattgacagtaaacttttttccgaaaagattatgctggtcagctgtttctgagagtagaatctgtcttcggtatctgtttctgttcctaggtttttgcagtgccttagccttttgttacttagtttaagtagttatggttttgagaccttaagcaacctacacagagcaaggagtagacaagtcatggactcatgtcccggtgatgatgattcttcgacctctaaaatctgttagtctgttctgcttcttcagaaagctctatcacctgcctgcaagtccacacggaaagctcgcactttagatgtttaattttggctacagactgttcactcaacttgagagtctgttctttattctgaatttattaattggggttgctgagtaattagatctggaggatgtgcaaagatgaacttgaagcttgcttgagatatagaaggcaacctgtgcaagttgtgtacgccttatggggttgtgtttgaagttccatgttgctcagttggagttgacataagacgatggttgtctgcgaatggcggttggagcagcaaaaaggaaaaaagggaaaatgaagatgtagtatactttttcgcacttagtaggtactaaagataagctgggttacccaccccgttggtggcagagatggtggagtcgcacgctggccactcgcaaggccggagtttgactccccacctcgtcatttgtgcgactgaagtgcagcactgtgggaggtggggccctgcgctattgtcgccccgggtttacatcaccggctgccgactgtacagcggttcccgggttaacaaaaaaaaaataaaaaagataagctgggttgacgccttaaaaaatttattaatttaattcttaaggagcattaatagaacttgctaaatctgctcaatgtgctttacaattaactggagatattttttctgcaacacccctgataataaatatgaaagagggatctcagtatcagtcacgaaactatggttgttaagcatgtaatttctgtcgatttgtcatggatcaggacatggcttcatgtatgtgtatttatgacgaaggggctgtcctgaaatactttttattttgcctagtaagagacaatggctgatgtgaaccatgtactttgatatgcatgtcggcatatgctcattcaaaaagcatgttaagtcacttttcgtattgttggctagatgcgttgtgccagtgaaggcctgtgacttaaaatggtgcgtgcaggttgatt

SEQ ID NO: 10173 - DNA, 2101 bp, Eucalyptus grandis
  Intron number 10 from transcript Egrandis_v1_0.018701m (lo cus Egrandis_v1_0.018701m.g) derived from phytozome v7.0 ( chr-ID scaffold_10; pos 34663662 to 34665762 reverse stran d)
taggaaatttagcttcagaggcaagaccgatctctctttttttgtactatcttttggtgctgctgtccatatggtaggttttttagtaatttggagacaaatcaaagtggatttccagattttctgtagggaaaactagtattttcatcatgaactggggagtacaataaactttgcatcatgtgtttttgtaatttcagtttacatcttcatattgacattactaccttagccatctgtgccttaatctttttgtgaccagtaataaaattatatcaaaagaaactgtcaaaatttttttttaagaaagtttaaatacacattatccatttgtgtatttttgcaactaccatcgggctcttctttagttataactagtcaagaagcccgtgctatgcatgggtctcttttgttgttattaaataacttaaacttcaagcaagtgtttgaaaatgtcttaaaattgaattgttacgaaaaggataagaatttggactgaactttagtactgatctaatttatctgctataaaatcaagaagaaatcaaagtgtagtctgggttctaattcttttcatgttttcttcatatcagattcaattgtattcattccctcttcattagttaatttgatgctaacttttacaataactaaatgtagatgcattgtattatactctttgagtgcgaacattatgaggagagaaaatctcacaaaaggtttagataattacagttaacaaaatttaacaatcattagaagacgaattagaattagaggttaaaaaaaggatttaattaatttcaaatcagattgcatataattgattggtgattgcatatgaatcaaatagttcttggagaagtataagaacagaaataatattttaaattgtaattccaaccaccctatttatctcttctgcaaattttaaattcaatttgctagcacgataatttttatggaaaaattaagtagtaaaccaaatgatatcagagattatttggatggatcttttttgttctctcaaattttcagttttcagtagttgagctttgacttctctttagtcttgaccgcttcgaattcctaaaactatataagtacaaacttttcagatctttaggatcattaaatttttttgggtagtttcttaaaattaacattctttttaaatttatgcgaagggtgcttcttttactttgataatttcgtattttcttaattagtgtttctagtttttaaaaggaaaaaaaagaaaaagaaagaatggtttgaataaaaaatgaatacttcatttggtgaaacatgttttcttgatttgtttagttagtcagacatatgtcactaaaagagaaccacatatcaacactgatagtgcccttacttttgcaccaagatacttgtatagtattggattaagttaactataattaatgcaagcacattgagtgggttcatactgaaataatttttttgagactaatttattctgttatactttttatcataagctttgatgttgttactacattagttcatacttggagttatttttagaggagagaatttcaggaagtgggtgtgtgaagcgaaggtgaatgagtagagaggaagaactgatgagcttattctaccaaagttaaacctactaatatggaaaatggctccaacaattgcaagtttaaatttggcctttcaagtgattaaaataacacttgtaagtattcagattttttggtgatgggcatttaacagtgattgtggaggttatggagtaggaggtacttttgtgaactgtgcctagtaaaagtgttatcttttttgaaatgatagggtgcatcttacccccatggagcatgataccatatgtagatttccattatgtctgtcgctcaagtttagttctctataccaccttggaatggttgtttataacttagtgaaatttatgctgtaattgaatcgttataaatatgtgtgcatgcctgtgagactgtataggctcattttcagaagttatctctctccaattcgttgggggaaattctcagtcattttaattcacaggtcactcagcttgaacttcatcgccattttc

SEQ ID NO: 10174 - DNA, 5523 bp, Eucalyptus grandis
  Intron number 2 from transcript Egrandis_v1_0.018363m (loc us Egrandis_v1_0.018363m.g) derived from phytozome v7.0 (c hr-ID scaffold_3; pos 6868736 to 6874258 reverse strand)
ttttaattgctcccattttcggcctcacggagcaggtaaaatctcagcaccatcgtcttccccagttatttatagcttcttaatgtggttcgctattttcaattgtgtttgattttatgtgtatttagctttgcttggttcacggactgcttggactagtgggagccggggatgcgagtgttgaactggttggcattagcaaagacgccagatgaactttaaaacctgaacgactatgaattcaatcaaagtttggaacaaaagtttcggtttttgactagaattagttcatctctcttacttagtttttccctgaatttttgtcggtggagcattgatttcgaatggagccctttggctggtctctgaattttccccatttatgctaataattcagatctttgggggatgtgataggtttaggttgctagactttgctagtggagaggctaaaagctaagagcttattcttttccaatatagacttatcttggccaaagaaaagtgtacacttaataatttctttttcaggcagccagtgatttgactatcttggatagtttgtctctaggatgacgctttggggattgacttgtccatactatttggacatacctattcttagcgggataattaacgagtgatcgaatttattgtgagatttatcaatatgggagggaggtgtcatcggccataaaagaggtgggtagtatatttctgtgttataccatagtttctcttctttattgcctattgaaactgatgctgtgcgaaaagccattgttagtgaaagcatcttaatggtgtctgacccatattggtttaatttatgtgtcttggaggatgctttattacaatatcaattgacgaaagactacttggcaaggttctagtacttaagaccttgatatctcatagtgtcagccatatgaattgcatgatctaaagtctagttttgctagtctaatgttttcagctaatttctttgtttctctttcttagcactatggaatctttcttttctgggcaattatgggcattgtcaattgtatatatgccttttactttgaaatgattacccttttatggtaaaccgatgtgttctacccttggcttttccttaatactcttggttattcaataaagtattaaggctgttttatggtaaaataaaaattcgatcaatctccttgcccctcattcttgaagaatgagagagattctttttcaatttgaatccgattcctgatatgggtaggtatttgccatactctaaaagagcttaatgagttcgaccctcaggctggggaagtacagtcagattctcgatttggtcttatatggaaaagttatgatacggtagctgagaagggtgaactatcttatggaacaatttaaatttttgacagcctagaaaccaccctatttaagttcctagaaacatcaccaaacacggaatatgttggtttcactggttccaatgaactctgattgtttctttaaactttagaaaagaagtatatctagcagataaatttatgtgaataaagagtcgtgaaacataacaaacacaacagtgaaactttttcatctcataaaataactctacaagtttcatatcaaagtttgtgaagaaaagacataaatcattaatatcgaatcagattcttgtgtctatttattgcatatacatcttttttaaaagtattttatgaaataccatgtatatttgtgcatagtggcttacacaaggagaaggtgttgcatgggatggttacatcatgtggtaatgagatatggtgtaagaaaccagaacgaataagttattttaaaatttcgatgtcatgtgagatggcaagcattccagtggataatgtcattggttgtttaaaccatgtagccatgtggccggtgtactggcacatggaatccctaaagaggctacaggattcagattgggtacaaggtggatatgacaccatattctattacagatgcctattctgattggttttgaacttttgcaacctataacaaacatgtgaactttagttctcagcttggaacccacctagtcttgctgatttgtaagttctcttatgcacacctagtgtggtcgtaaaaagtgattactcttctgtcaaattagcatgataagttttagccgaagaacatagtttttaccagttagtgtggtataaggttacacattttatttgcatttgaagctttagttgaagtccgttgcagtgtacacttttaaggtcttttactttatcttatcgagagttatgcaaacttatattgatctttaagctattcccctaattttattaccttcacttgaattgtgcaacattagactattgcattaatcaaagttgcgctatggccaatcttttgttgggtcatcataatcaaagttttttaccattggacttattgtagacaaatggatttgcatttgctcaacatgccccctttgtgccctctttatattattacattaggtttagtagaaccatacttttagcacaacagtggcttcttttcttttatgtccttgagaagcaaatttttgttgtgacttagagttttttgccggtccttttatggtccatgaaaatctttattgagaaaaactaacaacattactaatctatcgatttatatttcacaaagctgggtacttttaatagagcctttagaatctaagccatttcaagcgccaccagtagttgtagtcatgggttgggcaatggagaatgtgtaaatgattgaaaattatgaatttgggaaggaaaaaaaaggagttttttttactttgttccttcttgttttgggggggggggggggggggggggggggtgggtgtgggtgggagtttgagtgtagaattaccaatgaatcgttgctatcttcgacattgtacagacttgccagtttttattcagggatgacacaagaagatgaattagtttgttttagatttcttcttaagaagggtagattgatgttagtgttgtcttgagggtgagccttggcatgtcttacttccgacttaatggtcaagggtttgagtcatggaaatggcttttttgtagagaaagcaatggcaaggccacatataacagttccctctcccaacaccgtgccattgttggaagtctcttatacagagaccttttttcgctatattgcaagcaatgaatagtgcaatgtgagaggaaattgaagtgctatattttcgttcataccttgtgggaggcaactttttctggccataccttcgatcgatgcattatttatgcaaattagtcacatacaaactgaactgtaaataaatgtaattgatgcttatgtttctaaccttccaatcagagacatggttggaagactaagagcggagaaaaacatggttgttggagaagttagtcgagtgatgcactttgtatgattggggttactatggctttacacatttggaatttcacttttgtcaattagtaatgaaatcctcaaaatatttaaaagtatacaaagaaatttgaatacttatgctggaagacttttcacagtcagtaaagaattaaagtatttcccttaatggtagaatgctaaaccaaaaagtttgagggtcaaagacgtgaattgcccccatagtttactatcattaagttctttccatatattcaggtaatggaatgttgcaagttttaaatgaaacagttatattgatgttgtcctattccttattttactcttttccacgctatatctgcgtgtcatcattctgcacaacgttttgtatgggctgccatttaaaggttgtatctgtcctatgttctgagcaactttaactacgatggaaccccaatgatagaaatagcgattgcagtattcatccttctagttgaagaggacattacatttagtggattttgtgtgtcctgtcttttgttctatccaattcggttttcatgtaagtggccaaagaaacttttcctggttttatatgcatgagcttcttgtattaatttagatttgtctgccttgtcattttcatcagaactccttgaaagattacaattttgtttcgaaagatggcagatcttttgacagattgaccatcattgcttgtcttagatttcttatggactttttccccttttaaaaatgtctagatgactctagtgtgttatggttaaagctttgttacctttgaattttaagtttgcagctgtaatttgctgcttatctccagatcgtcttttagagtttggcttatcatcgctaccggatggtgtggggctatctcttaaataggtgtcagtccttatttctgattctccctctacattacaaagacattaattatacagggtgaaggctaaaaaacgaatttgatctaagattcatatttacagctttgggaatcaagagtttatgcctttttcgtctgggccgaaagtagagactgaacttttttcttagtgacttggcttgagattttggccctttttgatttgtttcaaacttttcagtatgcataaaaattctgtgaatggacaatcagttcatgtgatatttactgcctgttggttgctggctaacagcctaacttcatctcaggaatcatgtattttgaatgcgatgctaggttaaaaatcatttcaacgtaatgatctgatgccatatgtgtgagtactggatgcaggctcatgagtagtgttttttggtttttgctggctctgtgattcagtcgcagtggcagcaactgggattgtgaaatcagaccatgatggtttactctagggaaatttgtacatgaattggtatttgccatttttgattgctgaaatttttcctatagaatgtggcttttgtctctaggactttggttggggaggcaatttctatgtccagaataaatatacccaaaatggttcgttttgccctcacaaagctgttctcacgtatgctgtttccatgagttattgatgtaaaggttcagtcaaagaccatggcagtccatttggatctaatgatgtttgtgtcttgtgtctcatgattgtcattgaatattcatccttcactttccaccagaggtcaggtgatataattctgatggtgttagtggctgtttactgaagcctatacctctcttcttctttttttccttctttttcccttttactttgtttgtcatatacattacacgaatttaccaccccaactaggttccaataagcagaattttgcttgtgccttttactgtgtcatatatatagcactttgttttctcaactctttctctagatatcaataggcagtactttgcttgtgccagtactttgcttaggttaatacgctgcatgcaaatttaatctgaatcttctcataattctgagcagtatgttgttgattgttgtgaagttgattctggacatattctctattgattgtgacacttataatcctctgatcgttttcccttccctctgatttattcgtcttcctagg

SEQ ID NO: 10175 - DNA, 628 bp, Eucalyptus grandis
  Intron number 4 from transcript Egrandis_v1_0.030530m (loc us Egrandis_v1_0.030530m.g) derived from phytozome v7.0 (c hr-ID scaffold_6; pos 34918012 to 34918639)
aaattgtttggaaggtaaggaggatctttgttataaacaaagggaaacctggaaactacaggattgttggtgcttcatctctattctgttggcaaattgatttagataaccatagatgcaactaaatagttttcctgcaacttaatattggagccaatttattcttggaaatcaaatttaggacatttgctttcctcttagtctcatagaacatggagggaatattgttgttagccatgggacattgacttgcgttgttcaatacttatttggcaaggttaagtagttttaaggaaagctactatcagtgtagttttaaggaaagctattatcagtccctttaagcgatatagtctagcatcacttgaacaaaattgttttagtcttcgcatgattagatttgacatgtggatgttcaaatgctatctttttatcggatttcttgattttgaaatactatcgattaccacgcagaattagatgaaacggaatatcagtctacaactagcggttaggttgcatgtgttctactttatgtatgtgcaatacatcttgattgctttctcatctgcatcattcctcgtgttttgaagggttacctggagaacacagataaagaaagaatcaa

SEQ ID NO: 10176 - DNA, 2217 bp, Eucalyptus grandis
  Intron number 10 from transcript Egrandis_v1_0.005545m (lo cus Egrandis_v1_0.005545m.g) derived from phytozome v7.0 ( chr-ID scaffold_3; pos 23136190 to 23138406)
aaggtaagccttttcaaaagtacactgacttcatagagatgagcttgctaaatgtcttgaatcttgtattgccaccagtaatcgcaatatttggttcttgtaatgctactgttggcacaagcctgggtaataaaggggttccagtgacagtattaaaatgtttgattcaatttctagaatcttctagatgggcatttggtagagaattttagaaaaatcctacaaaaaaaaaattccgatggaaatgtctcaagtccactaaagttgtgtagaaaaatccataaaaattatctctgcaacctatagagatagttgccttcaaaaacatctctgactttttttttttttggttggagaaaaaaaaatctctgacttgagcagagatttttgcacgtctaagttgatgatgcaagcctataaaaggcttggggtcgtccaaaaaaaacatatttaggactttgttttttttttctatttccaataataggtttgaaatagaaatgtaactttatttttctattttcgggacaaatttttaatctaaaagtaagttttgaatagatatgagaaataaaaaatttctacttttctgattctattacaaaaataaaaataaaaacttttatcattgctgactagttgctcaccagtcccacccaaaattttaagacctaatcgaatgaatttctattctgagagcaattttgtgttgttatcaaatgcatatctttacttagaaagaatagaaataaaaaaaaaatctatttatgattagaaattgttcacatgtgccctttgtacaccagctaagttaatcatatccaatcatgtcctccttaatttgtatcatccactgaataataaaagtcttttcctttcggccttgtgctcccttgctgccacttccggaaatctttgtccaattcttttacatcagcggcagctgacttgcggagcattttttcctcacatccatccagttatattttaacacatctctgtggattttgaattaaaaataaaattcctttgatgatccatccgtcatggacctcggacaagccggctgccacccctgaacaccaccgctccggaggccgagctccaaatctagccgagtcgtggcctcggcgccgcaccagatctagtccaccttcacttgcttcaagctgatccatggccgcctccgaatctggtcgacctcgacttgacgccagatatcgtctgccttaaaaacggttcgagctcggcggctcctccatgactgacgagaagccgccgagattttggtcacaatgtcgagcttggcagccatggaaggccatcacctccggatgtagaggctcaatggcaatggaggccgagcgtccagatctggccgtggcggaggtcgtgacatgacctcgagctgcagcgatgaccgccgttagaggtcgccttaagagacagcgttaaaagttgcagagggccatggacagagcgtgtaacaagaaaggagacaaaaaaatagaaaagagaagaagcaaagaatggtggggaacaataagaaaaagaaacatcttttccaacttttcaacagcatcaccgggatgagccacgccgacgaccatggactgccagatctcgagagccaacagtgtcgacggccatggcggagcaaggttcgcgagtgacgccgatggccatggacggccaaaattggaaagccagtggcgtcactcgtctaggtgacgcccacggccatggtcggccagctctgaagagccagcagcgtcaccgacgcatcatcggccatgccagctcgtccgaggtcaagtggctggctttggacgaacgaggaagatgaagctagaggaaacaattccaccacacaaagaaactccacaccaatatttttttaatttaattcaagacatgaaattttttttaagtggatatcaaggaaaaaatgctcgccccgtcagctgatgcggcgctttgaaaccacctaatatcttcccctttccgcacacatctacacaaactagcagataaactagaaaaccatcgggcagcaatggtagggatgccaagtggtatcatcaatgcattaggtcgttaaatttttttaaggagctttatttgttgcttactctattaattgcatttgtgtgtgcatgtttattggacgtctttcaatgacatcctctcttttgagctctacaggacagtgagagc

SEQ ID NO: 10177 - DNA, 702 bp, Eucalyptus grandis
  Intron number 2 from transcript Egrandis_v1_0.029838m (loc us Egrandis_v1_0.028244m.g) derived from phytozome v7.0 (c hr-ID scaffold_6; pos 40833922 to 40834623)
ctaggactgaaggtacttcatctgtagaatatatgttaatgaagattctgttgtctgaatccttttggcattgatttaagtgagtggtgtttcttgttctattatggtgcttcatcaatttcatgagttcgataccattgtggcttgaaggtggcctatgacatactgacgatttcaataattgtgcttgtcgatgtagataattaatctctcgtgaaagtctcttatcttatgcattttgccttagtgtagcagaccatacttgaattcagcgagaatttctgtggtttgtcactttctagaaactttggcaatcaactataaagcagtttcttctttaccaaaaaaaaactataaagcagtttccttgtccttacatgctctggttgatttttttccacctgctctgatgctatgtcctgctttgtggtccaaaatggattttgtgaggcagagatggaaagggcaaatgagattcgattcaaatgtcatggtttttctttgtcaaaatttgtgagggatgcatcttttatttgtggccggatgaacaggttgcatatagaacctaagaaatgagaagttagtgcaaattgcttggcttatggatatttgtagttggatgtcaggtcttgtcttctttaattatctgatcacttccaatattgatctagagatatatcataactttcagcggagatcgca

SEQ ID NO: 10178 - DNA, 4124 bp, Eucalyptus grandis
  Intron number 5 from transcript Egrandis_v1_0.054960m (loc us Egrandis_v1_0.054960m.g) derived from phytozome v7.0 (c hr-ID scaffold_25; pos 370454 to 374577 reverse strand)
tgaacagtctccttgtctttgaagtgagaaagttggttagcttagtattccttggatactgcgtggtatggacagcttagtatttccttcatgtactctggcaactattttggtaggccttcattgggttgtgctattcatttatgtgccaaagaattctaatactgtggtgtgatggaactttgtcatgctttaaatgtcataatgatatgttgtcaagcctagtattgttttcatgcgctctagcactgaattagttgctaaattgatgatgtgcaattgtaaatgactcctggtttgtggttagtttttcatttcatgtcatcttgctacagttttcataaatacttaagagcacttcaaatagataaaggtgactcaagttagggtggtttgctggttgtcaatcgtgatttttatttttttggttggtccagcactattttaatgatccacatggtaacaagggttaaaattgatgggttgattatagttcctcatttttggaagataaattgtaatttcttgctctttttgccttgatgtattctgtcaggtcaggtcaagtcagcaagacgtcttacacgccatattgtgcctcagaattactgcaatttggaggatttagggacagtgaatatttgcaaaggacacttgcagggaatttaaacagatggaacagacaaattagcaaaagaatgcatcttgatatttgtagagttggttaggccatctgttatataccagtacttttgagccaagcaagacattagcagaatgtcttttgacaatatcggccgtactgtagaataattccttattttgtgcataagctcttgttagttcatgtacatgctaaaaaggaaaactcaggaagcattttcatgaagtttcttgaggaaacctttcggtaccttatatgcaatttgaaaactctcttgcattaattccaatgcatgaatagcacataatgataaaggtaggaaatcgtactatgtcccacaaaagcaagcaacttgagttgaatacactacactaatctggtcaaagcttttgtggtcaatgatgttagctaccccattagttggatccaaagagttcaaaaaaatatcgagtttgacaaagagacttgtaaacttctttgtactactagtagttcatttgatgttacttactggattgatttcatctaattcactggcaggattcagttatcatgccactggttgatgtaagtgctgtaacatccaagagagcttttgcacagcgcttctaaaaggaggaaaaatcatcaaaggatgaggagctcgatgtttctgggacttctttaaactctagcaatgcatccttggaatggtaaatggtgtttgcatgttgtcatccttctgggtacaccagttaaagcgtccattaaaataaataacttgaatttgggagggggagatggggatgtcattgatgctagatagactaggtatgttggatgcagaaatgcttaatgcccacatggagttggtaggtttaggccctgcagaataccatcccaatggtgtcaagcatctatatagttttccacatatttctaattttggttctctaaatgtaactcttcttctagctcctcttcttcctcttttttaatgattgagcgtccttacaaggagatattccatgtatactggattgtacagtataggctgtaaagtttctcacatgttgtactacttgaagtaaatttatccatcagacccaaaaaaataaaataaaataaaataaatttatcttcttctgattagagaggggcattttgttgcatcattttgattaatcaagttcactggtgggagtttaacttacttgttaagaggatatctcaggctatgctacatacttgtatgacaatttggtcgagagggatactgtaaggaatcgaagaaggtgcagagagtaggagtgtagaggttgctgcatccgagtatcttcagttctcatttgactttatctcttggtaattcaaattcataagagcttaggattagatgcttatccttggcagttcttgctatctattctcaatggaaaaagttggagaggaggctttttttgtttcccgaaacatctaatgcctcatatcgtcttctggatttggagaacatgttgagtgcactatactactcgggccaacccttgaatgcttcttgttgagatcatcaattgtagatgcttgtacccttgtgatcctcacctgaagtaagttttcatggatccactcctcctcgaggttcaaagtggacaacaagattcgtttttggatcgagataatggattggaggctgccaaaaaactatagatttccatcgctgtagatgacctactatcccaaagaaatcccatataaagtagttaaaattcctcacactttgatttacttaacaaattttgatcaacatttcctgtttaccgtgcgttctctatcttcccttttcttctattaattttattgtgaagaaattattctctctctctctctctctctctctctctctctctctctctctctgttgtttttctgatttttttaatttttatttttatttttatgaacccacttttctttgcacattcattgtgtatcgtcaatactgcttcttaattattctaatctactccgggtaaacgtataacatcattatgctgaggtcctgttgtcaaggttgttatcttgggacttgaagatggtacagtttcactgcatgatgtagaagtaagttttccatgctattgctgaacgttaccctcattacttctcaacgagaaattccttctgcaagaatcctttatcatcaaaatgtgttcttctctgatctctcttgagaagttttttaattgctcaaaagctgaatgatgaaatgcaaatagcaagcttgctgaatgaacattcagctgctaatagagatggaaatccatgtttactggtcatgtttgccaatgtcaagtatatatggactgttagataggtcaatttgagcaggataagcttaacaaatcttattagatcattgaacatggccatttgttaaacagatgagcaaattagaagagatatatagcctaaatgaattgttgttttcacgtgtcatacattaataatagattcaatagatatatacactttaggactttaatctaattgatgtggctaattgcattatcatgtaggataggaaattgtcaccttgctgctgatgttgtcctgatgattgaaaatgcttcaaatgttgatgacaaatttcagcatagcatttgcagaggtcgagctcattgtgaggatctacactctcagtcgatggtgtcaatagaaacagtcatatgtgacatggtcattttcatcaaattagtagtttattttgaatattgaaactcaaatacattcagtcaaattaaaaaggttatggtttaggtgactcctgaatgatagaatttgtatgtgctttaattatggttgtgggtggaaaagttcataaataatcggttatgtcattaagctatagctgcttagtcatgagtatgatggctacgaattggttgatactactgcatttctttctttaagacttccacaaatttattaaccatcatctgatttatggactatgttttgcttggaagagggatgttttgcataatacataatgaatgttatcttaccaatctaactttctttacttaactatggatatgtggtgtgctgctttttatatgtggtgtgctgctttttatacgctagtgcttgcagcagttatacatgctgtggtataatagtttctaacatggcatatatattaagtagaatgaaaaactattacgaggcttgaagtcccatggagcagttgtgctgtgtctcaaccgggaggaagatgcccaagtgaacaagtatgcatctttcaacttaaggttgatatgacttcttgatcttgattcttaatagacaatatttcattcttcatatcttacatgttttttctaatgctttgtttgcagttaagtttcaaactaagaatcttatttcactatccaatagctttaatattttctaccttgatatatcttgttcagtttataag

SEQ ID NO: 10179 - DNA, 3154 bp, Eucalyptus grandis
  Intron number 1 from transcript Egrandis_v1_0.028990m (loc us Egrandis_v1_0.028990m.g) derived from phytozome v7.0 (c hr-ID scaffold_9; pos 12829981 to 12833134 reverse strand)
tcgaaggctccgtccaagatttcaagcaatataaggtgagtcagcaaaaccattcacaaacataaattcaactataaggagatttataataattgtggaaaataaaaaaagaaacaatcatacaataagtctcggtctcacttactttaaaaaccagtagacgcatgtgatgttttctctctctgcgtttttttggcttttccttttttctgtatatgagaaagttacatagttgcagtaagaggttcagattttatcacaaatatttggaaaaacttcattttataggatatatatatatagaatagcttatagcctattatttaaaattttctctcattttataagaaacaattggttttacttagcatttccaagccctgattgagtattcttctcaagttctcgtcacttcttcatcagtctttctcgtccgtagtgtacttcttgttcatggagtccgcttctcattcatcgatcctcctcttcttcatctgagtgtcctttttcttcttcgccgaatccccaaatttcatcttcgttcgagcgcgacgacgtcgagtccttgcgcaagagctcgatgagtccaacggcgatgtcgggtcctcttcgtccaaagccgggtggcgtgaatgagggtgttataagtcactacatcgagcttaatctcctttcttgtactctgctttcattccgaaggaggtatgggaactcatttgagttgatttctcttgtggattgataggtctgaagtttgggaatgatgtcaatgggtatatgcccaaacgcaggatgttgttgcgatcttactaatcttagcaaaataagagataggatcgtccaaaacaaaacagaaaaaggacacagattgttcgcatgattttgtttcggttgattaaggcgggagcaactatatttaatgctcaattttgcggttctctgctttggaaacatgctaaaaagattggggatttggcttgaatatcatgcataacgcccatggaaatttcctgaaaattcaatttcaaattattatgaatccatcttttggcccgtggagtcaaaataaaggtgtcatctttacttaaagtgctatttgttcacttagaatctccagaatatccaaagaatgtatgatttctttaatattgtattagggatattttctttagagcttgaactagcctacataatttgacaatccaaagtgctatctattcttggagtgccgattttcaaggacaatctggtctgagttgctaaagctgttgctggtacagcaccattcgtggtataggtagaaaaagcatgttttcagcgttacaatcatcaacattagatggtgacttagggaagatggtattcatttttctactttcatgttgccaaatttgttgcttggagccctttaggcaatgaaacaagaacctggataaaatgcgtttgtttgtgagtcttaaaattgatttggtcagttctttgtcaaatcgaattttagtagggccaacatgtggtaattaggtgtcctgcctctggtgaggcgacaaaaatggtgatattcgatgcccagggtttgttaatgtctcccatttttgcaggaggaagagagtgtatggggaaagagggaggaatgcctggctttatatgagataaattcccattggtagattagctatatgcctgaagtttgaacacttggtttggttgcatttggtggggactgtactgaagtttaaatacttgatttattgcattcggtgcattttctttttcatttcactctcgtactcggtgtagagcttaaaagaaaaggtttgtgtgcaaaaatgtctccatttaaggtttgctccaaatttccaagccctaactgagttttcttctccagttttcttcacttctcctaatttgtgggttttcttctcaagttctcctcacctcttcattggtctttcttgtccatgcctccatggtgtacttcttgtttgtggagtctgcttcttgttcatcgatcctcctattcttcgtctgagtgtccttcttcgtcgagtccccaaatttcctctttgttcgagcgtgatgatgtcgagtcctcatgcaagagctctatgaggctgacggcgacatccagtcctcttcgtcctagcccgacagcttgaacaaaggttttaaaagccactatatcaggcttaatcctctattcttgtattttgctttcatccgatggaggtacgtgaactcatttgaggtgttttctcttgtggattgaataggtcggaagtttgggagtgatgtcaatgagtatatgcacaaacacgggaagtttcttgggatcttactagtcatagcaaaataagagataggattgtccaaaacaaaacagaaaaaggacgcaggttgttcccatgattttgtttgggttgattaaggcgggagcaaccatacttaatgctcaattttgaggttctttgctttggaaacatgctggaaaaaattggggatttggcttgattatcatgcatgccaccccttcgaaattgtctgaaaaaagaaaaatcaatttcaaattattatgaatctatcttttggactggggagtcaaaataaaggtttcatctttacttaaagtcctttctgtacacttagaatctccagaatatccaatgaatgggtgatttctttaatattgtatttgggatattttcaatttagagcttgaactagcctacgtaatttgacgatccaaagtgctatctatttttggagtgccgattttcaaggacaatccggtctgaggtgctgaagcttttactggtacagcgccattggtgctatgggttaaacaagcaagttttcagcgttagatggagacttagggaagacggtattcgttttcttctttcatgttgccaaatttgttgcttggagcccttctggcaatgaaacaaaaacatggataaaatgcgtttgtttgtgagtcttaaaattggtctagtcagttctttgtcaaattgaatttgagcagggctaacatgtggtaattaggtgtccttcctctggtgaggccacgaaaatggtgatatacgatggcctgggtttgttaatgtctccggtttttgcaggacgaagagagtttgcaggccgcattaacagaccc

SEQ ID NO: 10180 - DNA, 3227 bp, Eucalyptus grandis
  Intron number 1 from transcript Egrandis_v1_0.020371m (loc us Egrandis_v1_0.020371m.g) derived from phytozome v7.0 (c hr-ID scaffold_5; pos 36019 to 39245)
aaggtttcaagagcttaggcgtgaacctagtccatgtgagtagttattctcatgtgattccgttagtttcccacgttcggtgctgcttcgaggaattcaagcatcccttgccatttgatcttgctcggaattctgagaaatgtctttaattttagggagaacccggagacacaattcaccatggccaaacgcaatccaggatcaatttctcccccgatactaaatcaacttaaaatctcttagcccccagcaacaaccagcaatgtatagcctcacaatatgcaaatataacgccgaaataataagtagacaaagcaaataacgacaccaaggatttaacgtggaaaacccaatgcgggaaaaaccacggaccgcccaaaaacattcactaatcaccaagaatatcaagatacacaaagtattcttctctagtcacacactagagcctcaatatcaacattacaatcatctttttctcaccacataggtagacaaacaagttgggagtaagaaaaccttaaccgcaactagagaatttgaggatggttctcgacgaataaaaaccatcaacttgtagccctcggtctcacgaacaacatactgaaatttgagccgattcagtcaatatttggctttcgaatcaaagccgcaaagttgcagccctcttcctttcttctcttctcccttgcttgcagttttctgtttctctctcctctcttttctttttcgacggatgcacacctccacgcacgacactccacttctttttgttttgttttgtgttgtttcctttttttatttaatgctggctgggcctcacatgaaggtggacccagccaacaaatctccccctccacctcatgttggaaggttcgtcatgcccgcttttcttctacaagcgtcaagcttcaccacgggcaaggctttggtcatcatgtcggacttattgttgtcagtatgaactttctcaagtaggaagagcttctcttctagcttttctcagatccaatgatacttcacatcaacatgcttcgatcttgaatgaaacaccagattcttgctaaggtggatggcactcatgctatcgcaatatagaacaaacttctcttgcttcaagcccaactcttgtaggaatttttacatccacaaaagttctttacctacaccggtaatagcaatatactccgcttcagttgtagacaaagtggtacatttttgcaatatcgattgccatgaaacagctacccctgcaaagattattataaaatccgatgtggatttttgggaatcaacatcaccggcatagtccgcatacgagtagccactcaactcaggctttacatttccataacacaagcaaagtgtagaagtgcctctaagatatctcagaatccatttaccagcgatccaatgctccttacctggattagagagaaatctactcacaacaccaactgcatgagcaatatcgggttttgtacaaaccatggcgtacatcaaactacccacggccgatgcataaagaattttcatcatctcaaccttctctttctcacttgaaggacactctttactacttaacttgaaatggcctgcaagtagagtactcaccggtttacatgtgctcatgttgaatctttcaagtaccttctcaatatacttctcttgagataaccacaatttcttattcttcctgtcacgagtaattctcatgcctaagatttgcttagccgggcctaggtctttcattgcaaaagctttactcaactcatttttcaagctcttgattttcttgacataatgcccaacaatcaacatatcatccacataaagtaggagaataacaaaataattatctgagaatcttttcataaagacacaagaatcggagtttgtcttaccgtatccttgttctttcatgaatgattcaaacttcatacacaagaattggggacacaattcaccacggccaaatgcaatccaagatcaatttctcccccgatactaaatcaacttaaaatctcttagcccccagcaacaaccagcaatgtatagcctcacaatatgcaaatataacgccgaaataataagtaaataaagcaaataatgacaccgaggatttaacatggaaaacccaatgcgggaaaaaccacggaccgcccaaaaacatccactaatcaccaagaatagcaggatacacaaagtattcttctctagtcacatactagaggctcaacatcaacattacaatcatctttttctcaccacataggtagacaaacaagttgggagcaagaataccttaaccgcaactggagaattcggggatggttctcgacgaacaaaaaccaccaacttgtagccctcggtctcacgaacaatatactgaaatttgagccgattccatcaatatttggccttcaaatcaaagccgcaaaattgcagccttcttcctttcttctcttctcccttgcttgcagttttctatttctctctcctctcttttctttttcgacggatgcacacctccacgcaaaacactccacttctttatgttttgttttgttttcttttttttttatttaatgctgactgggcctcacatgaaggtggacccagccaacatttaatcagtagtatcagagtcaattttcatcttaatctttcacaagatcgagttgatggagtcacgttacaattcagcgtgctttttctcttctctgatatttcggcctcgtaagttggcgaaaccataaacaatctccctctcgtttttcacactaattgacgaatctcctcagcttcccatgctgagacgaacgagtgcatttttcgacgagtcttatgaaaatttccatatgtttcgtactgtgtagatgaatttttattcagaagtacatgtcgctgatctgtaattcagatgtcattgcaaataccctgtcgtagcctttcaaaagattggtaggtaatgcatggacaagaattctgtgggtagcggcttctttttataaaaaaatatatatgtatttctcacaacagtttttctcgtctggtgaaggtattgaagtcttatcttcattagatttcgtatttctcctttttcatagtcttcctactggccaaaattagatcggttgatggttgctgactttattgattgtttgtccatgttcttggttatttgattctcagggagacatatacgatcaaaagagtctattgagtgc

SEQ ID NO: 10181 - DNA, 4850 bp, Eucalyptus grandis
  Intron number 3 from transcript Egrandis_v1_0.018325m (loc us Egrandis_v1_0.018363m.g) derived from phytozome v7.0 (c hr-ID scaffold_3; pos 6868736 to 6873585 reverse strand)
ggagggaggtgtcatcggccataaaagaggtgggtagtatatttctgtgttataccatagtttctcttctttattgcctattgaaactgatgctgtgcgaaaagccattgttagtgaaagcatcttaatggtgtctgacccatattggtttaatttatgtgtcttggaggatgctttattacaatatcaattgacgaaagactacttggcaaggttctagtacttaagaccttgatatctcatagtgtcagccatatgaattgcatgatctaaagtctagttttgctagtctaatgttttcagctaatttctttgtttctctttcttagcactatggaatctttcttttctgggcaattatgggcattgtcaattgtatatatgccttttactttgaaatgattacccttttatggtaaaccgatgtgttctacccttggcttttccttaatactcttggttattcaataaagtattaaggctgttttatggtaaaataaaaattcgatcaatctccttgcccctcattcttgaagaatgagagagattctttttcaatttgaatccgattcctgatatgggtaggtatttgccatactctaaaagagcttaatgagttcgaccctcaggctggggaagtacagtcagattctcgatttggtcttatatggaaaagttatgatacggtagctgagaagggtgaactatcttatggaacaatttaaatttttgacagcctagaaaccaccctatttaagttcctagaaacatcaccaaacacggaatatgttggtttcactggttccaatgaactctgattgtttctttaaactttagaaaagaagtatatctagcagataaatttatgtgaataaagagtcgtgaaacataacaaacacaacagtgaaactttttcatctcataaaataactctacaagtttcatatcaaagtttgtgaagaaaagacataaatcattaatatcgaatcagattcttgtgtctatttattgcatatacatcttttttaaaagtattttatgaaataccatgtatatttgtgcatagtggcttacacaaggagaaggtgttgcatgggatggttacatcatgtggtaatgagatatggtgtaagaaaccagaacgaataagttattttaaaatttcgatgtcatgtgagatggcaagcattccagtggataatgtcattggttgtttaaaccatgtagccatgtggccggtgtactggcacatggaatccctaaagaggctacaggattcagattgggtacaaggtggatatgacaccatattctattacagatgcctattctgattggttttgaacttttgcaacctataacaaacatgtgaactttagttctcagcttggaacccacctagtcttgctgatttgtaagttctcttatgcacacctagtgtggtcgtaaaaagtgattactcttctgtcaaattagcatgataagttttagccgaagaacatagtttttaccagttagtgtggtataaggttacacattttatttgcatttgaagctttagttgaagtccgttgcagtgtacacttttaaggtcttttactttatcttatcgagagttatgcaaacttatattgatctttaagctattcccctaattttattaccttcacttgaattgtgcaacattagactattgcattaatcaaagttgcgctatggccaatcttttgttgggtcatcataatcaaagttttttaccattggacttattgtagacaaatggatttgcatttgctcaacatgccccctttgtgccctctttatattattacattaggtttagtagaaccatacttttagcacaacagtggcttcttttcttttatgtccttgagaagcaaatttttgttgtgacttagagttttttgccggtccttttatggtccatgaaaatctttattgagaaaaactaacaacattactaatctatcgatttatatttcacaaagctgggtacttttaatagagcctttagaatctaagccatttcaagcgccaccagtagttgtagtcatgggttgggcaatggagaatgtgtaaatgattgaaaattatgaatttgggaaggaaaaaaaaggagttttttttactttgttccttcttgttttgggggggggggggggggggggggggggtgggtgtgggtgggagtttgagtgtagaattaccaatgaatcgttgctatcttcgacattgtacagacttgccagtttttattcagggatgacacaagaagatgaattagtttgttttagatttcttcttaagaagggtagattgatgttagtgttgtcttgagggtgagccttggcatgtcttacttccgacttaatggtcaagggtttgagtcatggaaatggcttttttgtagagaaagcaatggcaaggccacatataacagttccctctcccaacaccgtgccattgttggaagtctcttatacagagaccttttttcgctatattgcaagcaatgaatagtgcaatgtgagaggaaattgaagtgctatattttcgttcataccttgtgggaggcaactttttctggccataccttcgatcgatgcattatttatgcaaattagtcacatacaaactgaactgtaaataaatgtaattgatgcttatgtttctaaccttccaatcagagacatggttggaagactaagagcggagaaaaacatggttgttggagaagttagtcgagtgatgcactttgtatgattggggttactatggctttacacatttggaatttcacttttgtcaattagtaatgaaatcctcaaaatatttaaaagtatacaaagaaatttgaatacttatgctggaagacttttcacagtcagtaaagaattaaagtatttcccttaatggtagaatgctaaaccaaaaagtttgagggtcaaagacgtgaattgcccccatagtttactatcattaagttctttccatatattcaggtaatggaatgttgcaagttttaaatgaaacagttatattgatgttgtcctattccttattttactcttttccacgctatatctgcgtgtcatcattctgcacaacgttttgtatgggctgccatttaaaggttgtatctgtcctatgttctgagcaactttaactacgatggaaccccaatgatagaaatagcgattgcagtattcatccttctagttgaagaggacattacatttagtggattttgtgtgtcctgtcttttgttctatccaattcggttttcatgtaagtggccaaagaaacttttcctggttttatatgcatgagcttcttgtattaatttagatttgtctgccttgtcattttcatcagaactccttgaaagattacaattttgtttcgaaagatggcagatcttttgacagattgaccatcattgcttgtcttagatttcttatggactttttccccttttaaaaatgtctagatgactctagtgtgttatggttaaagctttgttacctttgaattttaagtttgcagctgtaatttgctgcttatctccagatcgtcttttagagtttggcttatcatcgctaccggatggtgtggggctatctcttaaataggtgtcagtccttatttctgattctccctctacattacaaagacattaattatacagggtgaaggctaaaaaacgaatttgatctaagattcatatttacagctttgggaatcaagagtttatgcctttttcgtctgggccgaaagtagagactgaacttttttcttagtgacttggcttgagattttggccctttttgatttgtttcaaacttttcagtatgcataaaaattctgtgaatggacaatcagttcatgtgatatttactgcctgttggttgctggctaacagcctaacttcatctcaggaatcatgtattttgaatgcgatgctaggttaaaaatcatttcaacgtaatgatctgatgccatatgtgtgagtactggatgcaggctcatgagtagtgttttttggtttttgctggctctgtgattcagtcgcagtggcagcaactgggattgtgaaatcagaccatgatggtttactctagggaaatttgtacatgaattggtatttgccatttttgattgctgaaatttttcctatagaatgtggcttttgtctctaggactttggttggggaggcaatttctatgtccagaataaatatacccaaaatggttcgttttgccctcacaaagctgttctcacgtatgctgtttccatgagttattgatgtaaaggttcagtcaaagaccatggcagtccatttggatctaatgatgtttgtgtcttgtgtctcatgattgtcattgaatattcatccttcactttccaccagaggtcaggtgatataattctgatggtgttagtggctgtttactgaagcctatacctctcttcttctttttttccttctttttcccttttactttgtttgtcatatacattacacgaatttaccaccccaactaggttccaataagcagaattttgcttgtgccttttactgtgtcatatatatagcactttgttttctcaactctttctctagatatcaataggcagtactttgcttgtgccagtactttgcttaggttaatacgctgcatgcaaatttaatctgaatcttctcataattctgagcagtatgttgttgattgttgtgaagttgattctggacatattctctattgattgtgacacttataatcctctgatcgttttcccttccctctgatttattcgtcttcctagg

SEQ ID NO: 10182 - DNA, 1990 bp, Eucalyptus grandis
  Intron number 4 from transcript Egrandis_v1_0.022744m (loc us Egrandis_v1_0.022496m.g) derived from phytozome v7.0 (c hr-ID scaffold_2; pos 24569099 to 24571088)
gtgggataacaggaaaaacaaggtacaccttttcttcccttaatgatccaatgtataggatgaaacatgactgctctattacgatgtgtagctctcactcgctttgtcacatttgtgtggacaaccatgatttttcatgaggttttatcttcataggtggtccaaataagctgtatggctgagctttctatcagtcaataacaagtgaatgcatgttcttgtgcacacagccctgggctttctttgtgtgcttttgggcagcggctaatatgcttattgctggtgtgtggtgtcgtgcagcatgtatatctatgcatgggtgtcagaatgtcatttgtcgcatcatgtgtgatatctgtagtttgctggccaagtgcagtgcaaagtcttactgcgtgcgagtatgtggatttgttggttttaattttggtcatcttgacataattatatagacctggatcttcagtgatgtgagttgataaggtaatatttcccagaataattctctgaaaattgaccagtgaagtagtttgcaatgccttctgctgctaaacatttcgatgggttttggtcaaccttaatgatctcaaacagacatagacatcttttattttccaaaagaagctctgttgggtcattcactagtacataaaacaaaacttaaagaagataatggggtgcaagatgtcttagtaaatcttcactagaattcagatctaattaatgaaggaagatgtcaaacctgttcctgggtgtgccaattggtgttctctggttgtgttcttatcatgacgacctaggtgtatactacaaatcaggtcaacccgaacaagacatgattatttaattgtctcgatctacaaaacacggattaaataaagggtcaacaagaatacacgacctgtgtgatgtgactaacatacaggttaatgggtcaacatgattgcttgacccgtcatgagacagtggcaatctgcaagggcttctccaagaggggaagatatgagaaaaagaaaagcttgtgggttttactacaaactagaaaagaaaagcttgaacaaaaagctacaagaaacgaaaagcttgtgggtttattaccgcatttgaatgtcttttccaaatgagaattctgcattcgtagcacacacaggaagaccacatgcggtaccatgaaacacagacgacacaaatgcacacatgtagcaccagagcaagcacacagtgcacacacatgtcgcagccaacacacaccagtccacacgcagctagaaaatgatgtgaatgcacataaaccagaccatgagaatagtcaagatctatccggaaccgagagaggcctgcgagggggtcctgatgctacagaggcgacaagggagatggagaagcatggttaagagaacttagtgaagaagatggctatggtttcaattttcactttcagttttgtttgtattatagtatctgctttcccccctagctcatatttgaagtgcttttccatatatgtcctataaaaataacaattacacaatcattttaaacatagttcacgggtctatttcatgtttggagggtttgacacaagcatgacacagcactacacaattattaatcatgtcttggggcccaaacctgctaactgtgttgtattcaagttgtgttattttgtcgtgtgaaaaatcgccacccttacttgttccttatgcaagtacattccatctaacatctactgtacagctccaccttttttgttattcactgccatctactgctttggatgttttgattctcaactgccagtacatggattatctgaggtgtaatctgaaaatcttggatttcatgccatttggggataaacttactgtgccagttgttttctttctacttcagagtgtctttaatcccttctaattagtttactcaagtgttctacttgtatgtgtgattggcagaagaacccaaaatatccagatttcaagcataagga

SEQ ID NO: 10183 - DNA, 2723 bp, Eucalyptus grandis
  Intron number 2 from transcript Egrandis_v1_0.001167m (loc us Egrandis_v1_0.001167m.g) derived from phytozome v7.0 (c hr-ID scaffold_9; pos 6248320 to 6251042 reverse strand)
cacccagggagatagcttggcattgcatctttgtaagagcatttgccactttattccttatggtacagatgcagttgaaagttatgtgcatatatgtttgtcagagaatacttcaggttcatgtttgcacaattagttacttgcagataagcaagcgtggtttcatacattgtgctatttctctatccatctgattttaatggtataatccatcaactaatatttattactttagacattatatctcttcatgttcactttgtagtcgtgactagcatatattgagctcagtaaattgcatcacattagctgagtttggcgagccatggaggtcaaaatgataaactatgaagatttcttgacccttttttaaccagatatgtacatgcattgttcgcaggcattaagatattttcatgtaaagaaccacaggatgaaaaatgatttaatgcaatgttttaagacattggaatgaagaactatcgaggggtcctgctgtaaggtcaattggtcgaaccggttgaactgccggttaatccagttgattacagtttgcgtgcaatgtgtgtattgccactatttttagctggccctcagttaggatggcggttgtgaagtgcctttcaataagaaatgaggggtttagatcccctcattggcactttttaccgttttttattctctattttagagagtaggtgtattctttataggacagctgatacgcatatgtcaaaggatcatgtgagtgttccttttacaaaccgcaacaaggatgatctgtggttgagtgtggaggttaatgtgcttctcttccataagagcatttaacgacccgttgccaatatccatttcacttgttcagaaattaacaccccatgttccggattgaccaggttactgggtttgccagttgaaacagctaaattggtttttctgcaagttgatttgggctttaaaaggcccgttccatgtggaactggaagctgttcttgttcagaagtgcatttgggatttcttgttctgaagcagaggatgctacacatctttttcctaggttttcaaatagcatacccctcaaatttcgaaatctgtgaattttttattccttatgattacactgaggggcctagtgcagctcggagtctatcgcatctctttcttcgaagcttcggcttatctgaagctgctgactttggtcaccagactttgctactgtcctcatctttaaaactagtccttttgtcaagaaatgttataaggtaggataagaccagattaatgacttgaactatgcaataatcgacttggggtcccattatgtgctcttggtcatggtccttgaaactgcttctccatttatgtgcccgatgccatctatgagtgactcttttatcttgcattctatgtttcctgatgttctcatgattatagattgttctgggcaatcatgcaacagaaatagcaaaatccttctcaattttttttttttttttccaatcaacctttgtgtaaccctttcaaattagctttcctggaacaccaaatgcaggaagtacgaaattcttgtagatgctcttaagaaagtcagattttgattatgattaatgttccttgtccctttgacaaacaaaataattatctaccaattctgacaatgctaagaaagtaagactctagggaacttttgttttgtatgtgttaccgttaatttgacaatgtgaaagtttactgggagaaaagatgccgatggtcccaaaactccctcaggatagttgtaccatggtgcccaacttctttttagaaaggacctgacactgtttgtggtcgccacgtaatatctaccatggctcccatcatctttctttgctggattgcattatttcttacatcttcaagactcaaaaaaagattgcattatttctgacatcttcaagactaaaacaaagtacatacttgaaagagattctaaatttgaagaaatcaacttcttatcagttgcagaagaatctatgaaatagtcagtggccttttcatttgagttctcatttctatgagcttatactgaagcagaagcctgaagggggtctcatttcaagatcttatctttatttataatcatttcataacggaaaaatcaaatgagatgttggatcacttaagtggaattgcttttgtctctgctagacgtgttctttggctctctccagaatatcacttgtgagtgatgtttgaacaatatcaattctgtggttctgtctgcaccagggcaacatccaggtgttggtcttcttgattatttctataactcgatggactaataatagaaaaaccaactttgtttaatctcccttccgatcttcaacttattctttgattttgactaacaagttgataacggtgcatcaacttttgtcataggatgcttgatgggagatactgaaaccgcaccaaaatttttagtgcataacctaaatgttgacacaatattggcagtggccctaaattttcccttcactgtaatttttcgctttggcttatggttcttgagttaagtgaaacaagtagatcatatttagttacctcatttcattgcttgcatttcctattcacaatttattttgtcattttgttgtgccgtgattttgatctagtctctggctatttaccaatatatgtcctatgcagagacaacgcccaggaggtactccccattgtcgttc

SEQ ID NO: 10184 - DNA, 2461 bp, Eucalyptus grandis
  Intron number 1 from transcript Egrandis_v1_0.019666m (loc us Egrandis_v1_0.019666m.g) derived from phytozome v7.0 (c hr-ID scaffold_8; pos 27314626 to 27317086 reverse strand)
cctcgcatttgaggagccctagcaagaattcccaggtgcggcggcttccctcctgcttcttcttctgcgaggctgttagtttgaatttgctgctgtgccgttattggtaatcgagtttgattccttcttcgagtatgaattgaaatgaatgaacttgtcgaagcagattgggtgactggagtaatgcgcgctctctattttctgtgtggaatgttgtaatggagtgtctacattggaacggctaaaaaaagtgggatatttctgttgtgaaggtctaataggttggaactttgattactggtggtatctgtctgtactcattctgagcttattcgattgtttccatggagctcgtttgatgaactcgaatggatttttatcattgatcctgaatccagttgaagacttaagtagccatacaatcgaagtagatttcgcatggcgtgtgttgtgtgtggacagaaggggacttgataggatattactggactgggtaatcaagcacctttgtcggttcaagtcggggtataccttcttgtcactcaggtcaggatgggagtagactctaccgatagggatgggagtgttttatgggaatcgggttgtcctcagctagctgttaagaggattatgtttaaaccactcagtttttaaagtggattttgttttctttatgcttaatgatcacggcaatgtagcagaaagaagcggcttttgaaaagaaatgtttttctgaagcccccacttttgttgaggtggttttagactaagcttgctgttttcctaggaaccaagtccttatggttactcaagttttgcatgtgatgattagatttcgaacttcccctggaaatggattgagaatctactgctgttgctgcgttcactttccgcattaaaagcttccttctcacttaatataataatgatgaaagccaattcaattccataacatttacatctgttaaccttcatgaataaaaacattgactctaatgcttgaggtctccatgactccatcgccttcctctgagagtatactgtgggttgtgcataaatagtgaagaatctactcataagttggaactggtttgggctggctcaaaaatctcttcatgcttaagcattggtttggccttactccacggaaatgaattgaatatacacttggggaagatgaaatgcttttagtgataggatcgtaaatgtcaattcaagcgtactccataatcaactatagagtagcaagcagtgactggattgaaggaaagctgggaggaagaagaattcttttagcagataagcaactcctcactatcccaactcgtaccaaaagattgtacagaaagctaatcaattttgcgtcaaggaacatgttctacagttctacaaatagcaattaacggcttccatcacatgtaaagggaggaggcttcgcaatcttcaatatgtagtccctagtagtgtgtaaatggatagagtccaaatctcttctaaacttcccccagtctacagaaggagaaaacttaaaagcttgctagctgggccacaatccaaaggtctcttacaagaccagacaagttaacacacaccccccctcctcttgccggggggagttcctcaaccgaggaagtgagtagttcccgtagacccataaaacatgcttctatttattttagcaacaacttgtaagatctcctcaaagaaagccggagttgtgcatcacccacctgagcctaattaatagtatatagcagatgtcacaagaatcatataggccaacttttacctgagaatgcataaccggttggctgattaaatgtcaatccatcaggcaagtaggtatttttggtcctttgtggcatggtagtagaattattaccaatgacattcgaccagtttatactgtatcggcactttcagtaaaggtattctatttcattcccttcgggtctccagtaatgtcccctagactctggtttgatcccttctatttattatttaggccttagtttttggtccatcttggtcaatgactctctctttggttggctgttatgcaacactgttctcatttctcttttagttgggtcttatgctggtcttctcctttttttcgctgagtactattaaacttattttccacaatatagtatccttattaaggaagaatcgccgctgttcataaacaatgaggatgcataatagcaagctgatgagcttctctttgatggaaggataaccaatttgagatcttggttcgtcattgtgtctgtatgattatgtgtgttgttatatgcatctgcttgtatgttgagtgcacgcatagtgcatttggttgtgtttatgtgcactttcttgaaataaaaaatagtgaattcttatgtgaagtgctctatcctgatgtggtatccttgtaatggcagccatttgcttttgctgtattctcagatcagcaatc

SEQ ID NO: 10185 - DNA, 2088 bp, Eucalyptus grandis
  Intron number 19 from transcript Egrandis_v1_0.000098m (lo cus Egrandis_v1_0.000097m.g) derived from phytozome v7.0 ( chr-ID scaffold_4; pos 20378636 to 20380723)
aagctgtgcactgaattaaaagtaaccttgagaaggtaataattaaattctgtgtttttttaatgtttcagtgcatgtgcatcttttctttttaaagacaaatggaacggtactaatgtaaaaactagaagaacttgaaggatactagtttgaaaagatgtacatcttttttgttgtagttttctcttctgaagtactacaggtaactataatggttccatttccatctaatgaagtcttattcatgagctaacatctaggaaggaggttgatatgagttctttgaaacttccatttaggagttggtgcaaatgctagcaattcattttggtccagtggttgctgcttgtagttttacctatgaatgtgactgactctaggatgaggatttctaattgatttgggttctgtacttcatgacaaaactgaatgttgttgccatctggcaataatttgtttcatacccttcgaagatgtacctgtactgttaataaatgcagaccaacctcattgcaagtttcattattcatgcacttaaaacttgatgaatatttatggattattgtattccctgctccaaggatgatttgcaattgagccctagtacttttttcccccttttggcaatattattccatgtacttttaatattggtaaaatagccttaccttttgatttctctgggattttttgatgtaatcagtgatgccatgatggggtatcattgaattagtcagataaggtatctgttaaaatctcaataggaggatgactgatggactattacttatgataagtgaagcttttctcaaacaaacttcatttttccaatgatctaaagtacagttggtgattcgacccaaaaagaaaagcacagttggtgttgagatgttcccctaaagatttacccaaatacttgaaatcatggaggtatcatggtttggctttcttttacgtaggtacattagttggattcattgaaattataatatccaggacacctgttggtcaatgtcgagaagtagaatgaaaaatttctgaggattgcttgaaggtttttgaatttcatatgcaatttgtttaagatggcaccatgtagacaaaagttactcccatgatttattgatacattaagatttaacagatgtttaaatgtcacagagcagtggtgttactacaacatgaaaatcagtgctttttttactgttttaacttttaactgtctttaatcactgtaaatctgagaaccgacaaattcttaggtggcattttgtttgctttaagccaattaaatgtactttgaattttaaaaacccataaaaaaaagtttgtggtgaattgatgttgttatttgtaggatttgaggtgaatactgaagaaaggtgtgatttcaaactcaagaagggaaaagcccaaatctaagagtaaaacctgcaataaactttcttaaaaaaaaaaaaaaaaaaactagctacaatggaaacccattagttttggattgatcaatacctgttgcttttcttcttcttttctatatatccttgttattcttggcaagttttcaaacgcttcatgttacttatcatattcatctacggtaattcacttatactcaataaaattctgaattgtggatagcaacgtttctctccacccaatcttatcatctgcaagctaacggatatatcaaatcttgttagtgactttacttgggttttgtcctttcttcagttctctttgcaatgatactatactgtgacaggagatttcttgtgctattcctagaaattgtgaatcccttggaactcagtcaacactctggatgcagattaattagttgttaaatgctgatatataatatggatctattgcattttgtctaaatttgtgatctttctcagggatttatgttccttttattttagtcatcttaattttactaaataggatttgcagcaaagcataggttccaagtagcatatatgttttgacattctaaagtttgaaccaacataatgtctacaaggaaccaacataatgtctttgcttgtaggtatcaacaagagggtataaactggcttggatttc

SEQ ID NO: 10186 - DNA, 647 bp, Eucalyptus grandis
  Intron number 2 from transcript Egrandis_v1_0.021285m (loc us Egrandis_v1_0.020002m.g) derived from phytozome v7.0 (c hr-ID scaffold_6; pos 33794537 to 33795183)
acgtcggtcaccacacaactggagattttcgtaaggtactgcttttacgcttgcctcaagttgttccatgacatttcccaatgctgatgattgttcttccgagcaacttaggttcgtacattttgcaataagtactctgtacaatcaattctatgtagccttgtgatactcagaataatttcttattgctgtctgggaaatattctttgggattgatgaaggcaagtaaaatcaaatgtgactgattcagcatattacagaaagtttgagaatattagtggtaggtgttcaatttttaagacagttttggagttttgcggagaatgcttgttggaatggtggtgtactttggagcagttcctcatattttgatttgtcaatttattgaagatggtttcatgaaactctagagaccacatacgctacttcattggacctctctctattgtgtcaaatgaataaccaagtccattatcaaaagattagtcctatgacaacctgtgaaataattctcatctatcctaaatcatttcaattttcatgaggtgttgatgtaagtaatttcctcgcttgtagggaaagaactttaattttatatggtttctttgtctcctagttgctggtacctcttgtgagctcctaccgtt

SEQ ID NO: 10187 - DNA, 7288 bp, Eucalyptus grandis
  Intron number 2 from transcript Egrandis_v1_0.005439m (loc us Egrandis_v1_0.005439m.g) derived from phytozome v7.0 (c hr-ID scaffold_9; pos 12538719 to 12546006)
tatactttggcaagtgttcttgatggttttatatgagatgggcttaaggcccgtccgcccatgttgggcccaaaaagctcggcccacgggaatacggcccatggatggggggacatataaaagggaggagagagagagagaggacattggttggaaattgaaaacgaacgtacgtcttctcccaatgctctctctccctccaaaaagaacagtaagtataaggcacgttcttcttcccttcaaggcatcatcggatcgaacaggccagtttctcttcctctatcggcgtcggtgtctaatctgtggctaacaaggtacgctcgaatccgtggtgtgctttacgatcggtgatacgtgttttttcccgggcttcgtcttccgcattgctttaaggggttcaattgagtgtcgaaatccggtttttcggggatccgtaattcccaacattggtatcagagccctagttcacgttttcccgacctgtttgacgttttttgattgatttttcgcaaaagcaattcggtcgtacggatcggggcgagaaatcccgacacccgagcgctgttcggcaatttttccgtgttttcgtaagtcgaaatcgaattctaatggcataggaagaaaggtgacgtcaagacgagtctggcgatacgtcgagcgccgccgagagacgctgcacgtgcccacacgcgcagcctgaagccgctgcgcgtgggtgcgacgcacccggaagtgctggctcgcccagcgcgtgcgacacacgcgccggtcggcgaaccggcatgtgctcgccgccggtcggcgaaccggcacgcgccggtccgcggaccgacgcgtgctgacgtcagcatgacgtcacccaacggtcagtaaccgctagggtgacatcatcgatgacgtcagcacgatgacgtttcaccgagcgatcaccgaccggcgacccgaccggtgacccgactcgacccgactcatggatgcccggcacgcgcgcggcacgtttcggatgacgtctacgtgacgtcatcccgtgcacgcgcgcgacacgtgccgtcggttcgcccgaaccggaccgaccggtccgatgtctgacgatcggcgaccgttgacccgttgaccgacgaccgttgactattgactttgaccgttgacccgaaaaaaaaattgtttctttttcaattatgtctgtgtgagttagaggtaatccatttttttaattctgcatttgttgcatgaatcatggaaaattatgtattttccattttgtttattgtggattataagtgatccattttagttctgcatttgttgcaggaactatgatgcgttatgcaaggatacctgcaatcccgagaacggacgaaggaagagctagattgaaaatgctgatgaaagagttagctgattatcggtggcttgatggtgatttagtatcacacatggtcagggtcaatcggatgatacaataaatcatctggaatggttatctcatgccagattttgagaaggtgccggctttgatgaacactcttccacttgaatggcaagcagtgttagatcggctatgggaggtcaacgtggtcctgggttataggaggctagtggaagcttttgtaagagagtactataggattgagttggccaaaacttcaacccttagattgagcgccacatggcgcagagtgaatgcgccttggtggcgacatgagagctctccaaaagtttttccatggttggcaaatgtgccttcaaaaatctaagatattttgactaatagattagaaggaacattccctaattatttcttagattagtttgagatgttattgagtgtgaatatctttttctatgttgatattttcttctatgtatattacttagtgtaatggattgttgtattatgttgaaagcattattgttttattggatatcaattatctgttgctttctgttattgctggttgctgtgggtaattagcagtgggtagtttagaagtttttgtagcttcatagaattgattttacatatgacaatcatattaatgatagttttaagttaggatttttggaggatgattggaaacgtagtgaccttttgattctaaaaccttacttgaaattgttcattaatatgatgggtctgtgcaaaagggatgcataaatgataggcattaattattcgtgcatataagtctgatgtgttcagatcgatggttttagcaactaagaacgtaattgctgatatgaacggcaacaattgtggaatattgaatatgaagattcaatatgtgctggaaaagctataagcactagaagctcttgaccatattatggaagatctaaaggatgttgtgcgccaccttgagctagtagaggactgcctatcggcatttgagccgaaaatagacattggctatgctggtcctagctcagaaagggctttgagctttaagcgcaagcgtatcgattcgttcaatatgtgggaatgcaaaggatcaagtccttgttgtaagaaattaagagttaaccaacacaaaagagaaaaacgtcctcaagtgaagaaaaagtcaagtgtgaggtgttacaattgtgacaagaaaatgttactatgctcgcaactgttgtgagccgaaaaaggtaaacacctcttgtacatttgagaactttgattatgtgtcaagttctgaattattggctgaatccaatcatttgtggattgtagattcaggaaagacataccatgtagcgaaggatagagaatccttcatggaattctgacgataccgactggaactaagtggatctatgtgggatataactccagaaatgaagttaaagggattggcacttgccaattgaacatgcgtggtggacgcaacttgttcctacatgatgttctatatgctccagagattcgtcgaaatttaagtgtctattttgatgttgattaagcttggttttggtacgaacttccataataaaggtgtagatttgtgtttaaatacaaactactatggttgtggtcactttctggatggttttattgtactaaatgttgactgtggtgatgtcaatatgttattcccttgtttcacgtcttttacttcatgtgataatgatgtgaatgtgtggcatgctagacttggtcatattggccaacaacatatgaatagactggccaaagagggcttgttgggcaacattgaaaaagtcgatttgtccatatatgagcattgcctagaagggaaaacgacaaggaaaccatttggaaaaggtaaaagagctaacgttcctctgcatttaatccattatgacgtttgtggttcaatgaatgtgaaaggaaagcatgtgactgtttacttcatcacattttacaaatgattatactcgattcggatatgtctatttgatttctcataaatctgaagcattatgttgtttcaaaaggtttatgaacttggttgaaaatcaattagacaagaaaataaaagtattaagatccgatcgaggtcgataatatttatctgatgagttcagaaaataatgtgatgaaaaggaatagaaatacagttgtctattccatatactcctcaacaaaatggtgttgcatagagaagaaacagaaccctacttgaaatggttaggtccatgatggtgcatgctaacttacatatcactttttggagtgatgcgttgttaactgctgcctatatacttaactgggtgccttccaaatcagttagttccactccatatgagttatggacaggtagaaaaccggactaaagttttcttaagtcatggggttgtgctgcctataatgaatcctctcacaaataatgaaagaagagtattttcatgagatactccgaacactcaaaatggtatatgtttataggtgagcaggaaagttggagtataattgaattttgaatcacaggatgtcacatccttagtggatgaatttcctaagaggggcgaaataggagaagattacttcctatttgaaatcttggatcaagataatgatattagtggagttcgtccaagtgggagtaatatgagaagtgatgaattgaattcaactcattctcaattacaaccacatgatgaaatgatatcgtcattatctaatccgagtgggagcataatggggaatgatgtgctaagtgtaaaatctcccatacggcgaacaagtcgccagagtattcccgatcgaagttttgacattgaaggggaaacttttatgattgctccacaagatgaggatgagccaagaaatattaatgaggctctgaattgccatagtaaggaaaaatggattaatgcaatggaagaggaaatggagtcaatgaaattaaaccaagtctgggaactggttgatcttccaaaaagaacgcagagctattgggaacaagtgggttctcaaaataaagcgaaatgctgatggctcgataaaaatgcataaggcccgccttgtggcgaaggggtataatcaacaggaaggaattgattatgaagatacattttctcctgtagtgagatttaccttgattcgcataattctggcaatagtgtttaatatggatcttgagttacatcaaatggatgtaaagactgctttcatcaacggagaattagaggaatgaacatatatggaacaacctgttggtttcatagtgaaaggccaagaagaaaaagtatgtcgacttttgaggtcgatatatggtcttaagcagtcattaagacaatagtatatacgttttcataatgccataatggcatatgattttacaatgatagatgaggatcattgtgtatatatcaaaagatccaatgatcaatttgtgatcatatcattatatgttgatgatatactaattgccggaagcaatatggagcttgtcaatactgtcaaaagttggttgtcttccaattttgaattgaaggatatgggattgtaaacccattgacactcctattgcaaaaggtgaaggattgagccatagactgtgtccaaggactccacaagagaaggaacaaatgaaacatgttccttatgctagtgctgttgggagcttgatgtacgctatgatatgtacaagacctgacatatgttatgcagttggaatggtgagtagataccaatccaatccaggccaagcacgttggaaagccgttaaatgaatactaaggtatctaaaggggactgctgattatacgttgagttattatggaaatgatctgcaactcaaaggctattctgatgttgattggagatgagatttaaatgaaagaaaatctacttctggatttgttttcttaccgaataatggcaccatatgttggagcagtaagaaacaaaagtgtatagccttgtccacgatggaaactgagttcgtggcattatcagcagcaataaaagaagatgtttggcttaagagattattggatcatttaggtgttatttgaagtgctgcagattcattgttggttaactatgatagccaagcagcaaaagcgtacaccaaagatccaaaatatcatggcaagaccaaacatatagataccaagtatatttttgtcaatgatatgattgcacgaaaagatgtgaacttagagtacatactacgcatagaatggtagcagatcccatgacaaagccaatacctagagatgtgttttgtggccatatgaaatctctaggattgcgtagagtctgatgtactggattgtaatttccctgaaacgttcacatttgatgaatttgtatttttcatcattaatgcctataaatctttgtttgatctttatgcatcttaatgctcagtgcattattttaagttgaggaagtatgtcggacagatataagattagcccactcacatgggtaatcgcctctatttactatgtgataaatagagatgatactgtttttaagcttattatctaggtgataatcgagagctcaagcttaaatacgtatgtcgctttaactgggtgttaagatgatgacataatacttactatgtccgaaagtaaaataacccacatatcttactttatctgtctatgatgccagatgtgagttctgatgaattttgtgaatgagtagatacatgaactcaagttagacattgggtatgtctgaactatcatctgtacggtattgaaggtgtagacatacgctccatgggaaaggagttaataccgtaatacgtatttcatactacgtatgcatgaaacgaccaacaagagtggcaaaagtttgatctcaacttttataacgtgtgagactcttgaggaaaagagttcctcaattttttagtcccctcatgactgttacttattctcaagatttctatttagtgtttgctatcttaggatgttgccaatggtcatgagttgattcgatctaatggggcatttctaaaaaagcaagctaaactgaaattgagagtttgaagggaagaggaagatcgaatttggagaatcacattgtagtttttgtattcaccggttaaccaattatgactgtctttgtgataatcataattgtgaatacaatatatatatatatatatatatatatatatatatatatcattgtttaaaagagattaagagagatataaatgtgatcaatcgatctagggtgctgcatattaaatctactcggagtgtgatgcccattatgagctgctatatattcctaacatatgtatggtaacgagctcttaaagtatgctggtcgcacggattattcacgggtatgaatgttgaagagaggtaaagagaatcctgtttagcccaccatgtgcgagtgggagatgatggttttatatgagatgagcttaaggcccgtccgcccatgttgggcccaaaaagcccggcccacgggaatacggcccgtggatgaggggacatataaaagggaggagagagagagagaagacattggttggaaacagaaaatgaacgtacgtattctcccaatgctctctctccctccaaaaagaacagtaagtataaggcacattcttcttcccttcaaggcgtcatcggatcgaacatgccagtttctcttcctctatcggcgtcggtgtctaatctgtggctaacaaggtacgctcgaatctgtggtgtgctttacgatcggtgatacgtgttttttcccgggcttcgtcttccgcattgctttaggggttcgattgagtgtcgaattcggtttttcggggatccgtaattcccaacagttctcactgcatttacctgtgtaagcgatttggta

SEQ ID NO: 10188 - DNA, 3219 bp, Eucalyptus grandis
  Intron number 4 from transcript Egrandis_v1_0.053785m (loc us Egrandis_v1_0.053785m.g) derived from phytozome v7.0 (c hr-ID scaffold_9; pos 6179425 to 6182643 reverse strand)
ttgttgctgagttgaaggatcctttgatagcaaaggtaattgggtaaataatttatggccatctcttatatacctgttaacttgcatcacgtttaaaaatatttgggcatagtgtaactttatatctttgttcatgtttcctccaattgctcttatatgcatgcacagtcatgatatgtgtcaatcaataggactttttgcccatcatacatatgtagtttgtatgctacttttattggaactattcctaagagaggcagtgcgcttaacatcatggatgtccaccctattaatttagtgagcaatgcaacaaaagtcttacttaggtgctcgcaatgagattaaaatgcattatcggtaatgtgttggttcatcaagtccttattttgagggaggcaaattctagatgcagctttggttgccaatgaattagaggattcctagcttaaggcgaagaagaaaggtgtttttggcaagcttgataaggggaaggcttatgatcatgttttgcaggattgcctcttgtttgttttgaagaagataggcttcgggggcagtggtgtaattggataaaactgcgtatttcgaccctatgcttttctgttctagttaatggttgctcaactggttcttttaaatgttttcagggtcatagacaaggagaccctttatcccccttgttatgaccaatgcagaaactacaacaaaattaaaattgagaagaataaaagaacccatagatttacgtggaaaactgccgtgggaaaaattacgggaagaggagaagcaaaattcgctatggaaatttaatgattacaaaaggtggcttgaaaaacttgagactcctttttttttttttttggtaaggaaacttgagactccttttgtctctgcttaaaacctaattacttgagaaaatttatacagctcctgactgcgggggctgcgcccctacacccccttcaaggattggtgttgggtttgttaggcccaacccttctgctaccaatactaaatgtccatttttgccacaaattacaatttgggtatcgaaactcaattgggttgaatgcctgaaacagaattctagacattcttaacacctctagatgtttatcctggcgatagaggtattttgcaaaatgcaatggaaaagtgtctgagttgggttgattttctggctttaaagtggacagttctaggatggaaatgactttctatgtcatcttgcagaagatactatcattgtctgtgaagatgatgttcaatagttactttattagatgattgtactcttgggttttgtggcaatttctgggtttaacatcaatcttagtaaagcaagcatatttgacgaggtgaaggaatgaaagacacgttgtcatctttggttgtgggttgtcagctaggttctttttcaatcactggtgctactttcaagagcaatcgtatgttggacactgattcgagaaatttgagaggagatcatactgtgggaaaagatcttcccagtccaaagtgggggacttaatcttattgaaagtactctatccaaccttcctatttatttcttgtctccctttcccatccctctaggtagctacagggttagaaggcattcgaataatatttggtgggttgagaccaaggaggtttgcaagttccatttggtaaattgaaaagcaatcaagcaacctttttgctgcagtggcatagccattaagtccctctttttatttgactaggctcttctcagcaaatgccttccttgtcaacatctttggaataaagtagtggttgcaaatatcggtcttgaaaaggcagtttggatcactaaggttgggggagcttctcacaacactggtgtatgaaagatggttagagaggattggagtgagttccttcttcttacttaacttaaagtaggtaacgcaaattgggcacagttttggtctgacgtttggtatggcaacccagcattaaaagatcagttcccaaatctgggtgacatttgacatcaagaggagcaaggaggcattggaagtggatggttattattcaaacattggtatgatcatttggaatatgagttttgaggcaaggccaagattgggagttctgtggtctgacgtttggtgtggttgcacggctttaaaagatcagttcccaaatctggttgacatcaccagcaaggaggcattggtggcggattattatcattgaaatgatggtatgatcataatattgtgtcttgaggcaagcccaagattgggagtttgaagtttttgtttgctttcttatgttttgtataatatgaagatttctatgcttccaaggatgctttggtgtggaacaattgaagagagggaatgttttctgtagacttactacgagctgccagatatctaggttgttgggtggtagaatggattttccttggaaagcaatttggaaagtaattccaagaagagcttttttcttgggaagcaacttagggaagaatcctcagtttagataacctatgacaaagagacaaagtattgatacataggtgtttccggtacaaaaaggatgcagagaccttgcggcatctcctccttcattgttcttggatgaggatggtttgggcagcttcctgtgcttgcaccggattatttggggttattggacgttctgttgaataaaaactatgggcttggtagggcattcacttatggtgcaacaagacaagaaggttcctctcttttcctttttcctttttcttttgtggttgatttggtaggagtggaacaagatagcttgggttcgggagggatcttctccttttaatggaaattggcttgaaggtttactcttttggtatagtggaaacttgtacatgtatgaaaattcttagacactatagttgatcatttgtcctgtaattgagctcccgttttgttttgagagctgttttgtgtatggctttagttttttgagctcattttggatatgggttttcacccccttggtgctcaatctgtgatccttttacctataaagggaactcttcttcctcaattacaatatgattcttgaactttggtttcttaaatacaaaatactctggctagcaatatatatacaaatatattgactttgcagtggcttttcaagttaaattaattactctttatatccttaggctgcagagaggctcctacagagtgaaggagacct

SEQ ID NO: 10189 - DNA, 3239 bp, Eucalyptus grandis
  Intron number 3 from transcript Egrandis_v1_0.033821m (loc us Egrandis_v1_0.033821m.g) derived from phytozome v7.0 (c hr-ID scaffold_9; pos 13739934 to 13743172)
gggtatgtatgattcctcgtgttgctaactttatctaattctttctgatgtggtaactcatacgtgcagacctgatgtctgaatgtgtcatatcaaatatggctctgctttatgtgtattgtcttattagcacctacatggccccatatacttttaactgtttgtcagattgtatattagaatatctgttttttgtttaattggggactattaatatttgctttttattggaaaccttacattttttattccttgtctacagaatatccagattaggcacatgctgtttaactttcaccattgtatatgtcgaacaataggtttttgcttttttaaatccgattgttgaaaccaagttttgatatcatgtacgagggatacctagaagtgaagtcaccgttttagcacaagtgaactgatattctaggaaatgttgaggcaaattaagatgtctgttactagcaattaggttgatgtttaatgcgaaagtaaaaacggaaatgggaccaaagatatgtaaatagacgatgggtgatgtagctactctgggacacattacttgtttcagttttgtcgtggagaaagggaacaagtcttcagtgaagagtattctgctgaccagatataatttcttagatgcttagaaaaattgaaactgggttgattgttatctcttaggttgcctccctgtgcaattatgggtggttttgttcattctggtgatactctgccttgctcagagcattggtatactccttggaatctcagtctaggcttgaaggatcatgtaatatgccagtttattgaagtaaatgttgttggctaaattttgagtggttatgatatcgtgtctcataagaatagccatagtatctgcaactggaaaagtttgtggttattgaaagtgtcaactttgcgaagcaagtaatttgtagccttatcttcccagaaagctaacatttagttatgaagtctcaattgcagttcccaattgtttagttgaatgcaccataagaactaagttgtcggtttgtcagactgatatcttgaaattgaatgtgcatgagttgttattctttagaagttagactacctgttatccagttggatcttttcaactgatactgtgatagcaaaactagccacgaggttttggttacttattaagactatcttgtttagcatgcttagttctttgtttttcccccatcctcacactttctcttggatttttgctttttacattaggctttacaagtgtctcctgggtacttgttaagcatacttaatagcaatattttaatttccaaggtgtcattaacaaaatgcaagaaaaatagtacattggaaaatggaaactttctgtaaacggcatctttgcaagtgccattggggcacattttaacaaaagtggtctacagtgatagatgttttctttttctctaaagactgacaaaaaaagaaggaactggatcgggggaagttatacagaagtgcttatatcttgcttgagattttgacgtcctcctgaattatttactgcttgtaattggtgtttggttatgaatccctattactgagtttaataggatcttagggattcaatacattttttatcgcattacttctctggcccccccctacttctcttaacaaaaaagagttgcatagttgtgtcagatggtaaatcgaaatcaggtagatttttatgtcctcagcagatcaacaaaagtgttatttgtgttgagattaagtgtaggataagtagttggaaggttgatctttcactggtagtagtttctgttaaactcttttttccttcatttcttctcctacgacagggcctgtcttcatgtccgtgaaagccaaaatgaacttagcatctattctgcacgaatctgtctggttgaagcaactattcttgtggtcattgaattgaatagtcagataatactaaacaaactcttcctgctagggatgagaatcaatccagtcttaaaaatacttaggttgtcattatggcaattcttctttggtgcatctgtttcgttgattgatgaagtcatatcccaagctccagatctcccctcatgctcctttctgcataaactgagagatatttaatctttgttactcaatgaacacctcttctgctaatattgctcggactatatactgaaatctatccctttccggctgtgcaatcttctgtacttttaagtgtgatccttgtccttaactcaaacttgccatactctttcaaaaatgcctcacacaaatgcgcacgtgcacgtgctcgtctgcacacacacaagcgccctgcatgcacatgctcacacaaatttgtattgttgagcattgaatgcacgtacacagaaaatgttacacatccatctgtgataatattctgtttctttgctgctacaacttatgatatggactttgatctgatcttataatctgattgaatgtccgaatagttctatctaggttatcaaattaaacgttgttgacttgaatgtggaaaacttcttagtaactgaaaatcaaaacattcatcaggtcatcttatgtgatggcaaattgaatctatatttcttggcagattggtttgacttcttatctttgaaagtaatattggaatgaacttagcgcttccaaacccacccccaacccccaaccttttggttgtatatcaaattattggatttttctcagctagtgatttggtcagtaagaacaacattgggaaacttggaatgcaagctttggatatattactttgtgtaatgctttgagatagaggcagttgactattctccaacgatttccatatctttctttctttgatccttgtgacagtgacagacagaataatagttgtcttggaatcctgattttcacttataaggaccttgatgggtacgtagatgtgcatgtgcagggacattgtttcaaaagattgttagaagctggataaataatgcatgtacacgagaatgcattttcctgtttatttattgcttcgttgaagttttcaatttgtgctgtcgatgtgaagggtctctaactaccttaaggatttagccatcttttttcttttgtagtgtagtctctgttcttgtcaagtgaataatgtggcatggctgcagagattgtcaccccctttacgtgtcttgattcagaatcctagtatgtacttttgtcttacggtatttttattgggtttgcaggtcccg

SEQ ID NO: 10190 - DNA, 5111 bp, Eucalyptus grandis
  Intron number 1 from transcript Egrandis_v1_0.028444m (loc us Egrandis_v1_0.024758m.g) derived from phytozome v7.0 (c hr-ID scaffold_2; pos 14646887 to 14651997)
gctaaggtaaagtagcagattttcgaaaaatcttgcctaaaacatcaacgatgtgatgttgggaagtttattgaattaacattgttacgtgatgaatgtttcaggagagcaagccggatctgaacccatccaaatcaaaggtatatttatgcttgtgggccttctagcacatgaataagagttttggaaaggccttacttatgcacggagcctttatttacttaaagagattaaacattagtattgaagtttccaaaggataagtcttgtcaaagaaattgaactggtgatactctgctgattgaattttgatgaagtaagatagtcactcattctaataactactccttgcatatgctaacgttgatcatgttgacaggttagcaccgacttcacagatgtgtttgcattcagtggaccggcaccagagaggatcaatggcagactcgcaatgataggctttgtggcggccattgcggtcgaactgtctaaaggccaggacttgtctgctcagatcagtggaggtggtatcccgtggttcataggaacgagcattctgctctcagttgcatctcttgttccgctgcttcaaggagtcacggccgagtcaaagtctgacgggttgatgacttctgatgctgagttgtggaacggaaggtttgcaatgttgggactaattgcgttagccttcactgaatatgttaagggaggaatacttgtgtagggttttggaattatacactcgtgtaagtagttcagaatgtaatcctcagaagcataatataaagtgaagcattgtctcaatacaaatactgtgccccatgccatcttggtttaaatcttaaattagagtttgctatactataaatcattctctcaaaggacatttcattggatcattcaacgtggagtatactttgaagaaaactccctccttcagaaaaaacctcgattcgcttgaagtggaagtagagaagcgtcgcttgatatatgagatggtaattgcagattaataagacacaagtacctttaccaatgagatttggatgaaactcagacgacaatgggtgaacaaagaacatacctaaatcagaaagatcccaggcatttcagatgtaaataaactaaagcaacaataacaaagaaggattgagtgaattcggatcgtcctttgatgaggaagttccgaattctcaaagcaacagattttgcaaacaaaactaaaccaaagttcggtctgcacccttccaagtaaaatggtggaaatcgaccaactcagcaacaagacatctggagaatgttgagtgcaatcacttattggaatactaatcacagcttctttctgcctttcctttttgaccgtccagaggtcgatggtatgatttcatggacccagatttatttcacttccatcagatacgtagcaatcgatcgattaattaacccacagcaaaatatatccttcagataaaccactcaaatcatgatggaactattacaaccaatagatttctatcccatagcacatctaaaaactgcattgtccgacaaaacaacatcggagaaggatctgacctaagaggacaacgtttgcttttaagaactgcaatctggggcaggcaatggcggacataaagcttggtggtttgcctcctttttacaggctttgaacatctcctctttcaattacaactagcctctttacctaatcatgtaatcgattatttaagtaaacaaatgatgtggataaacaaaaccaaaatgcagtaactgattcattacttgtcgcaacattcccctaacggtaggggtgttccatctcataagagttcagttacccttgcgaagccgcgacccctcctatgcacactgaaaatgtaatagatgggctttaaaaataaaaaaaataaaataaaaggaaaagaaagagtttgaaaagtaaaaaaaaaaaggaagctcaaggatatttgtggaatcttcggctatgctttaaaaagagggagagagagagagagaaagaagagcacgggcagaaagaaacgggagaggagagaaaggagagaaaggaaaagaaaaaaaaaattggcgcacttgtgatccggacgcctcatcaaaccgactcaagtgtgtttagcaacgctagtaagaaattgaagtctttaatcacctacttaaagcaatcgctgcaattagggctcgaaattcggatttcttggatatttgtgtggcgaagccccatttttgagtcgtcgagatggtactttggatgttgtgaagctatagcatctttcggatcgtaatttgagcttgtggtttgtccgaaacggaattttgaagttgatggcgcattctggtattgtagggaacagtagctttgagcctttttttttgttatttttggtactgttttgggtcctctgagttggggttgttgttgtacattaagagagctttcgaaagactataagacgatttgaaatggaattttgtggagggagttatggcgtgatgaagttggtgcatgggctgcacctagcgggaaatgatgggttttcgataaatgagagcttttgtggcgcataggtgtcgttttatcgacaaataggcctagtatagacaagtcgttatgcgaatatcctttttactcggccttttgatattgtttttccattaattgttaggaatccgaatgtgttggttcgagtgagcatcgtagttgatttttggtttttcccaagtgagtgacactatttcttctttgtattttaaactcatgttttgagaaacgtgatggattatatattccatgagttgataaaaaacatattttgttgcataaaataagatcgagctattactactatttttgttgttcgaagggagttatattccgacttcgatttgaatggttgtttgaaagatgatttttgaaattctttgtgagagaatcttgaaatgttttggtgaatgctttgatatttatatatcaaattttgagttgtgatgtaacttcatttctaacattggattactggatattgtaattggtggttggtgctcaatgtctatgtggaccctgaggggtgtgggtatgcgcatactattctaggatatccttgtgggccgagccaccggctaataataggtggagaccttgccaataggggaatgttggtcgtcttgtcacgggcgttacgcgtgaccatggttagacatttgagcatgaattggtcaatggggtggaccattgacgtgtgatttgagtttggtcgatggaatggaccatcgatgtgatttgatgagattaattaatggaatagaccattgatgcatgttttatgagattgactaatggattggactattggtatcttcagtatttgagttatgattatatatttgagctatgttttaaatgtgcatagtgatttctcgatccgcttagaagaaatgtgttactccgtggtagctcactcctctcttatacttgtttttcaagtttttcagcaagttgcgagtaagcgtgaacgttcgctcggggaggacttttgtggtggaaacttttttgtatgacttgtgcatagttaatataagttagtctttgtagaagatttttgttttgatttttttgtagattatagatatactatgatattataaccaagtgccccttttttgtcaaatatatatatgtgtgtgtgtgtgtgtgtgtgtgtgtgtgtgtgtgtggatgtatatatgttgatatcgggttaaattttggttacattgaggctgtctttggtaaaaggatggccgtgtcatgccccttcttcttgtgaatcggggtgtgacataagaggtcttcgggaatgctcctaaccagtgttatgtacaagttgggactccatgggatcggcaggcaagccttgtaagttttgaaggcattcatgcttccccctttctcagcgacactagaagcgaggacatcagaactagctttttccatgacaaactgcagacagcgatggatggacaactacaataagcacacgcaatgtgaaaaattggtttaactaaatcagttgcaattggtaagataggtgggagaactcaagaagccggtggagggagggaatatgaagtacattggtttgtcagaagctagcattgatacggtaaagagagttaatgctattcatccaaacccagctgtgcagatggagtattctctgtggacttgcggaattgaggatgaattaattccactttgcagctccactcctattatcttcaagatgtgtggcaatttttacaggactttcaatttcggagaactgtgaagagagtgccgtgttgcgcttgagctgtgaagtcggggcatgtcgtcttcatcgaatcgcaccaaaggacgtcggtacttgaaagttctctgtccggtccaatttgttctttaccaaactcgaaaacctcgaactacgtcgctcttctcttggccttacgttcggaagccaacaagaactgaagttcacaaaccattttgtccgttgttttgttcagggctatttgaaggcccacgtcgtcactttcccattaaacggacgaggtgaaaccatttaaccccctacggacgtgcatcgcgtggaaccaacaccatccttcagtctctccctccctctctctctctctcctccccggcactatataaatagtacttcgtatcactcactctatagtccaagacagtagcactgcagtctactcagaatcgattctgttcgcacgttgagctgagaattgttctcctagttgtcccaaaacttttggtcatcgtttgaagatcatggcctcgacaatcctgatgcactcggtccctgtgagtcctaggaccgtggtcgacattagttccaggaaatctgttgtgagagggctcttccctgccagcaatagtcctagattgtctcctcgaggtggcttgcatgtgaggtgtatggctaaggtaaagtagcagattttcgaaaaatcttgcctaaaacatcaacgatgtgatgttgggaagtttattgaattaacattgttacgtgatgaatgttgcaggagagcaagccggatctgaacccatccccgaactt

SEQ ID NO: 10191 - DNA, 7698 bp, Eucalyptus grandis
  Intron number 5 from transcript Egrandis_v1_0.017915m (loc us Egrandis_v1_0.017925m.g) derived from phytozome v7.0 (c hr-ID scaffold_7; pos 44173335 to 44181032)
cttctcttaaagtctgacctgagttcccttcgtagtgattatcagtggatgtaccatccatgtaaaggcaaataaatgagtttgatgtgttaattgttgaactttttatgcagcgaatcgaccatagtgatggatcggaaatccatggaaaagtgggcggttattccttaccactgtgtatcaaattgattgaaacattgctgaggagacgagagaaatttcatatccagacattctttgtgcttggccacaatactagacgggatgctgatggacgtgcatatcctattattactgggttcctggttagtgtctgttccagatgtacttttattacattgttaccttcttccaaatgatattaatatagagatggaaacataaaagtagagtaatggaaatatggacaatttttttgtcgatagaatcttctctcatgataaatagcagtagtctgcattaccacctaagaggcgtactacatctattgactagatgggctatttcgagtccaacactggcttcttattatgggacctaggtaatgtattccaagcaaacttgtactaaaggaagctattctattaatttcttaactttctcttgaaggtcatgatatatcgcattttcctgaacttcaggaattggagtttttctatttgtcaattttctgtgttccaatagttcactaacattgtattattgcgggctgcgtgtcaaatgttaaatatttgcattttgtctgtctacaatttgatttaaactcttgttcattgggtgttcgtcaggtagagacatccaatgggtctgtatctcccgcctgttttgatagaacttccagatgtcctgatgaagtggtccgtcgaattcgtataactgcttgcagtgatgaccagaattggaggggcaagttgctggagacctatcatactcaagatgataaattcataattgcaccttgctattggtaagaagatgctgtcaaatttatagtcagcatgcattgccaatgcacataacaagcagacattgtcctgcttttgcttttcaaattgttcaagtctctgtgacactttgtatatgttgctgacatgatgtaggtctgggcgtcagtttcacaatgctttgacatggcggcacctttctgactcccaattgcttctcacatgttcgacttcgccttatgctgaaggtccagattttgttgataatatacggaggttagttcaacataaagagttcgacttttgtcttagcgatagctgctggactttctcctcctttctgagttaatctttcttgcctaaatacgactgtaaccagacttagaagggtgttctactgattagctttcttctttagcttaagagccacttccactgtcagggaaaatattcgaattaaagattttttgctagttactttcacattagagggagataactccttgaaatccctgtggcttatattatggtgaattctcggtggcgcaaatgggtgattgtggtaggtgattgcttgccattgttctcattgtgcgcatataccattcttgcaattttcccagaattcaaagggtctgctcagtactcgcacattacttagttcttgcaaacaaactgattgcttatgtcattttatattgatcaggcggtttgattatataattaaacacccagattggaaggagacttttccaaagaggcaaccgcgtgtatttgagaggaatggtctaggaggttggagaagatgcggtgattgacatgaagttccctggacaatcgtgaatgaggctctagctatttagggaaccatttacttacctgaagttccccttggagtacggacttgcaaatgtttaccccagaaactttcacctgggcatagctctcttccgattgtgtccacctctcagcaaacagcgtgatactgggttgggccatggggatgatgtttacattgaaaatgtcctagtcgccagcactccgttcagccatttgagaaacatgtctggtcagattgttcatgtagtcccatttgatctcaaggtaatctgattcttctgttagaattggcgtggcgtcatacgcatcatatgtatgccacaagcacgctgagcgcacttgatcaagtttcccaaatttttggagtgaagcccacgtacatgcattagagtcatgccagcaccctcttgtatacaccggcaggaccgacctggcattatccccgttacgactcttttagggataattgattttttattttttatttttgggtcggaagagaactgattaaacatactcatttgcaaattatattttcgggattttctaaaataaagccatgatatcatgttcataacagcaatcgaataataaaataaatagaataagaaaataaattggctaggaaatattttagtgattgtaaattctatcataatggattttttggtgattaactctcctagtagaagaattgacacaattgcaatatgtttaagacttttttggtaattctctcatttatagttccttgttactttctctagtaattttttctcttcacatcagatttgttagctttctcaatattttcacaatatatatgttaatattcgagttggtacttccattaaaaatataaatggagacactaaagtggccattaaatgctgacatgtcatcttatagccatacaaaaattcgttttccaaattttagaaaattaaaattcaaaggaaaggaaaaatcaaatagaagagaaggggaggggtagctacagtcgaggtggccgttttgatggtggtagagggcgtgggacgcctaacagacaaagcatggcagcatctggcacaggtacttcttatgattatgtggttgaactatcagtttttaccagtgaaaaaacattgcgctttcattgttacataaggaaaaatgatccataaaattaatattgctggtaatggagcttataattggagactttcttttgagtgtgctattccttggggcgctactcaatcgatctgcaacttcttcatcttttgccccttgtgggtttttatagtcttttgacgttgatgatatcaggccctttgggtgaacttcatttaaaatgttccaacgcaagaaatatcgacgttacatgtgtgctctgttggttatttcgtaattagcccggagttctcttttatggtttctttgttgctttctgtctactagaagttgttttctcgggacgttgcaaggaagaaaacgatgttcaattgcgggcttttgggtttctcttttgtttcgctgtaccctctttggtctctctttcagggtaggctagctggttttctttggctgctgtttggccattttctttagcccctttccacttactctgacttctgtctatgtgagtgtaagtttttgggtccgagatctcgctgtatagctctatatagctttctggtttaaaatcaatataattcttacatttatcaaaaaaaaaaaaaaacgacgttcaatgatgacgaatgaggcggcagaggagagcattgaaactcactgtgattagagtgagacgtgataccggaggggatgttagtgatgctatatttatttatttatgaatgaagcaagcaagacacagagagaccggagattttgtaattttggggaccagcgtgcgcattttcattgcaattttgatatatatcaaatcttttgatattctatgagtgaaaattagttacttttatctttagcccggtgtatgatgttcacatgagcgcgcatgcattggtttgcgaccggagcttagatcaaaggatagagaattatattggtgacgtctttgcctaatgaatgttgatagttcactatcacgccggtttaatatgagtgataacgtttttggtcctgagaataatttttgtttagaaatatttttttttatgtgttccctagacaagtttatgagcggaaaaatgttgtttgataactgtacaaattttctattctcgaaatagagattcgtacgtgaccttcaaattcttttgcaatttagatgttttcaatttttaaattatttttcttttatttttctttcttgtttttccttttgtcgattgtaggtcttggtgaggctcaactaatggggctttagcgaggttactggccttggccgtttattttttaattcggaaaataaaaaaagaatagaatcaaatattatttgatcggttaataaataaagcttagtggatggtggtgctgttgccacggatcttgaactcacaacattcactcacgggtagtcattacaccttttcagatgtcaaagaaagaaagaacaaaactcttatctactacggcttctgtcccgtccttgatgaatgattcgtgcacggtttcgaatgattcataactgatatggactttgacttttcttcccaaaccgttccttattatcattcactcattgtctaaacttaaaatggaattattcgaccgtcaagagtatgagtggcacttcatcaagaaaatttcatgctcatatttttattgatttaaactagatgacgtgacgggggtacatttacggtcctcaccttcgagaggcgcggaaaaaggagagcaacgctgcattttaattcaacattgttcttagtggcaagataaaaatttctttaggactcttttgagttccaagctatgctgaacctccatctctagcaaaacataaaaatgatatgaatgttgatttcgtcgcacattttatggactagaagtagatgccaaacggatattttaatcatatatccaatgtaatataggttacgcttgatagtccgaatttctaatcaggataaaattagataaaataaaatgtgaaattcatgaattttgttatatcatatctaatatttggtgattgtaatactaaaattagatatattcacatcatatcatatacactatttagtataaaaagtatatcaatacaaataaaccaaaatttttataaacagagatggagaaaatctcactcaacattgttgactattttatttttatttcccttattttttattaatttattttttcttttatcttccccttcaatcaaacaatactaaaacacctaaaatatctaataaatataaatatatagtcttatatgtatattgaatttatattataaaatagaattaaatttgaattataagattaaattaaaataactattttttttgtattttgaattttttatattaaaattcaactattatttatgttgaaatataattttgattttatcaatttaagaagttcattatttgagaaaaatgactttttaatttttaatattaaaaattttattcatctttattccatctcctttacaggataatatttatatttttcttatatctaattttatcctattttgagtaggcattaaatgtagaataagataattgttatattatcttaaattttatcttgagcagctgcagtgtttaaaagagaagtgtccgtaacaaaactcagaaaacgccgtgacgcctgacgttccgtacaactgctgaagtcgaactgccgaggaaacggccagtcttttttccgtctccttcgtccgatcatcgatcggtcaagagcgccgccggccatgatcctcgtcgacgacgttccggtcgttcccggctccgatccgccttcgccgtctcaggtaactccccttccctgcgatccccccccccctctccctccgtcgctcgctgcttccgatcaccgtcgtcgtacggagcttcgatttcgtcggaaaaggtagcggagtcgacggcggaacctatcgcgcgcttgaatagggtagcgacggaggggcgaccctcctccgatctcgcgggtttcggggtccgacagtcggagtaggcagaatgattacagagtccttggcctttttctttttctgctttgcggagcttttgcgtaatgcggacacgacgtgcgttggagctttctccgtccttccttcttcgaaagtctagcggtaatgcggttggataacgattgacggagaagaacgttggggaaaaatggaaaaaagttggatgttttaagctttgccgtgctcgtgcacctctcttgtgctcgatctgcgaaaactgtcggctggccggttagcgaacataagatgaggagctcgcgaatcttcttccgtgttcggcttccaaaccaatcgccgaggagattcgctgcaaattttaagtaaacgatgttaactttatctgattaatttgtagaaaacattgattggaagatcttctgggcgaaagcttgtttgaatcctggttgtatgcacatgtcgagtccaaatccttttactttatttttttgttcatccactatatttcttccagaagatgaacaccttgaggtggaaagagaattcaatcagcagtgcgccgtgctcattagattagcaatggtctttgacataaccttgcgagcaggcgcttgattgaaaagcagcccaaactagctaaaacctcattgcctaacagaagacagagtaagcaaacggagttcccagcttgaatggacagaaccataccatttctgaactgagaagtatacgatatggacgtcccaacttgtgctttccactagaattagcatgtaactggttgaattgaattgaattgctgtgggtgtgaacgtcactttctgttgtataagaattaacaaaagaaacttgggggtgaaaactgattcatgtcacctcttttgcagtttaagctcgtttcatccgctgcatatatatctctctcgtgatgacttcttctttcttacttgtcaacaggttctggaaatcttagctgctttaacagaccacccaactttattatctgcctcgcattcattcagaaataccccagagaagaggttttccatttcagaggagtctggattggggagcgttacacagcccaaatgtgtttatgtattccaaagagaatatgctattgttgaccctgctttggtggatgtatggctcttcccctttcctcatttagaataattggaatgtttgcttatctttggagtactttgtttattacttgcaaaacttctaatgactgttatcattctacatgacaggttgtcgggactgatgaagcaactacatgcgtggggcttgtcattcggaatcggtcaaatggaaagtatgaagttaatgcggcagaattaagagaggcttggaaacaacaaacctgttgcgttgcatataaatccctaaatctgcatgctcatctttttcccattgaatctcaggatttctattgcccatttggattctccagctattgtggaaatgggtcttgctcagatgttatcacaaattttttatcacgacttgcaggatgagatggatgtaatggttttgtatcttttatcaaaaaaagcaaagctgtgatgtttaatgattcttgattattttcacattcttatgcaaagtcttgttaaatgctgaaatgcaggttcatgtcattggcggttttgaggatgcttctcttaaagtctgacctgagatccccttcttagtgattatcagtggatgtaccatccacttaaaggcaaataaatgagtttgatgtgttaattgttgaactttgtatgcagcgaatcaaccatagtg

SEQ ID NO: 10192 - DNA, 4249 bp, Eucalyptus grandis
  Intron number 2 from transcript Egrandis_v1_0.033750m (loc us Egrandis_v1_0.033750m.g) derived from phytozome v7.0 (c hr-ID scaffold_4; pos 29798301 to 29802549 reverse strand)
gaggcaacaacctggccgacgaaaggcggatcttaaaaaagataagcgaagcccaaaggaaggcagatccatgcatgtccatgcaagaattcgatcaaaaggtatgattcgacactcgacctggtgcgttacagactttgttttgacctgacttcttttggtttcccaacctttgcgctcgggaaaatacagatcaggaggttgcatgatacaaatccatggcagagacgtgattcgaacgaggagaggaagactagggatgagatcaaaaggcttgaattggcaagagaggaggccatgacaagtgctgcttgcaaggggaagatgtgggattctttgggctcaaagctaaccataagaaagcaagttcaagtaaagaaaatcagacaaattacatgttcaaactcttggcctaactaattttgtttctcttcttgctagctaatgatttgcttatgtattttagctcatagaagagggactaaataaaactagacagcagcacttggctttcaatgctgaattggcttttgtcaagaaagaattggcatcggtcaaaaacgagttgaaatcagtggagaaggaactgttgcacattgaacgaatgaagggcgatgcctacaaattcatcctcgaatggaaaaaagagcatcaagaagcggtaggatgatacatatatcctcttgctttcgctagctgcgtttttcctagttacttatggctttcttgattcattttcagaatgcctgctacaacaaacacgtttcgctcatgaaagctgcaagacaactcgcggagaagaaagacattgaagcacttcaagatttgtctacccaagaggttctttcatctctctctctctctctctgcatcacgtattgctgttacaattgccataccaacgtttgttagtcctttttctcggtattaattaggtagaaaagtttatgcatcaatggaatggcgaccgacacacgaggcaggattacgagaggaggattctagcttcgctgaatgcgcgggggctgaatagggacggaaggagaaggaatcacgatgagaacccgatagtaattgagggtccgacgatggtgaagatacccagaaggctcaggaaagccattcaagcaacggcgaaaggaggatcttcgagcagaaaacccatgttgatgtagaatcagagtcgtgataaaaatcagttccaaaatgtccatcactgtcctctatgagaaactatgttttgtcaacaattattaagaattttctgaatgtggccacataattataaacagaaactgcgcaaggggtcagtattcttgagacagacatgaatttacttagaaaaacccgaacataacgcgacatgacaaaatttactcgaaacttagacaagttgcaagtaaggacatgaataacaaatgctagtatggtgaaatggaaaggaatgaaagccggtgtgaaatagaggtaatgttgcctcaccaacaaatgttgtcgaaatcggctcctcttacacgtgaatcctgttttgcttgaaaagaaaaaggcttaaactgtattaggacccgtctcactcacttttggaaagtttggattaaggggccaacgaagtactaattgctcactgggcaagcctctcactacagtgtcatcataatacgagtggaaagcccagaaccagctatctttctagcgatatacctaagcccatgtacgtaatccatagactaaccaaggtttctcgatatagatgatagaccgcataatcaaaactctgaactttgacttgcaaatcaagtcttgaaacattttaatctcaccgcttgttgaaattagattggctcacacgcacgttgctgctcaatagagctggcaaaatgggtcataaacctatattataactcatttttagttaaatggatcatatatgggttgactgaaagtcaaatatgagtcacaaatgagtcttagaaaagaaaagaaatggatttgaatgggttattaggaaacccactttgatcccatggcctacctcctctacctcctcaattctctcttccttccaatgattgcaaatctttggatgagcagagcaccccctttttctttttcgatcccaaccgattgcagccactgcctaccttgctatcacaccaccatcttcgttgccagtcccgagctcgtcggccttaggcgagctgcaagctcgctggcctcaacagagctcgggtcgggctcacctagatctgccgagccacgagctcaccggccatggacaagcttgggcttgcctagatatggtgagccgtgagcttgctagccacaatggagctcgggctcgcttggatcggtcgagctccgagctaaccgaccacaacggagctcgactgcttggggctcgcttggacgagcgaagccttgatctcgctggattgcggcttggccggtcaccgtcgacggagtaacaagggactagaaggaggaggaaaaagaaagaaaatagaaaagaaaaaaggaagaaaataaaataaaataataataataatttcaagaaaaattaaaataataaaaaaatcgattttttttaatgatatttggtagatagatatccatatacatatcggagaagtacttttaaaggaagcttgatgctgtttagattgataattagaaattctaaatatcataatgtaatttttaacttgatgaactaaaatcaagaaatcaaccaaaataaaaaaagaattacaattaaaaagttatgcattctcgcatttaagaagattttttataagcaaatattattttcatgtcaattattagctcatcaaactttttcttatcaagagttattcaaaagtattttcatttaaaggtttttcacattttttattttatttactttttaaatttggcgtgaagtttttatttaagtaactaaattcagttaaatagaaatgtgtttcaataatatgggttggatcgggtatgggtcattaaatttatattgcataaaaatgggtcaaaacgagttcaattgatcaatataagttgaatcattttcgactcgattcaaatccgatctgacccatttgactgccctactgctcagttgcttctgacattgccatgtcttcaagaagaggaagcaaaagcaatgcacgtaagagcgctctgttgaacattgacctattgcgcaatctgtctcccacccctcaatcatcacgcgtggcgttgacttaggatgagttgacttatgcctcctttcttgggcctcaagagttatgcttggaagccaagtagaatggcttggaacaatgaacaaggtctctcctttaaaaatgaatagaggtgaatgcttggtccccactccaattcactccagcgttgttctcatttggaagatgccgaagcaaacgaacatggagtcccaagaatgtgacttcgagggtgaccacgaccgcgtcggtgctgttggttactcccacacacgtgataatcttgttgaaaaggagagacaaggcaaagcagttgatgagcgagctgaaagtgcgatcggcgaaagagagaatactggcggaaaggtccatcggttctactttgtgaaacaacatccattcgagaacccgaacttggtcgcgactgacaagattgttcagcatcggtctgtgatcgagcgaaagaggataatgaagaaggtatgtccgaacattttttgcatcatagataattccagttgagaacttctcatcagcaaagaagataagctggttacctttggtgactcggcataccgataacagaaaatgtatattgtgtgtcaatcctaatgtttcagtatgctctgatatacatgtttggttctcagattgagcgagatcgattatacttctcgttgcccaatttgagataccaggcccaaatagtgggaagcgaggatttgaagttgctgaaattatctatggacaagctatgcttcgcgaacaaagtgagcatctgtaaagccatcaaaccgggctcttcagtgggcgagatcgataatctggttagcaagagcaagatatggttaaaagtttttcctgcagtactagaaaagtgattatataagcaaggctctgattgcagctaatatggtactctatgttggctaataaaatggtgtagagcttgcattttggaatgcttcatggaggcaacaacctggctgatgcaaggcggatcttaagaaagacgaaggaagccgaaaggg

SEQ ID NO: 10193 - DNA, 8130 bp, Eucalyptus grandis
  Intron number 1 from transcript Egrandis_v1_0.026667m (loc us Egrandis_v1_0.026667m.g) derived from phytozome v7.0 (c hr-ID scaffold_8; pos 9751109 to 9759238 reverse strand)
gccaattgtacgcttcccccccccccccccccttgcccttcccgcaacgcttttttgatcttgtttcgcgtcgaattcgtggtctgaggttcttggtttcgcgatggaaacgtccgctaattatggatcaatactcgatttttcgcctgtgtaagttactgaattgtgaaagtaatgtggtgttaagggaatctatttggacttgatgaaagtaggtggttttgtgtctagcaagatcgacagcactttaattggccggctaagcggttgaattgctgtcatgctcgctgttttcagaattaggtgcgtaaaaataccacaaaaaaattccaaactttacttagagtgacaaatttatcctaatttttttttatatgaaaaaccccaaactttattaactatgatacatttaccacatcaatgatattttcgtcttattttttctattttctctttttctttttcttttttctttttttcttcttcttctctcttccctcctctggccatggcggagccagtagagggaagccgacgtcctctgggaaagtccgctggggcggtatggtcgagcatggactcgtaattatactacccaatttgtcgcttgcgtaagttatcgaattgtgaaagcgatgtggtcttaagggaagctatttggacttgataaaagtccctggctttgggtctatcaagaccgacagcactttgagattactttatgcgcaagttggtttttataattgccatgagaggtcttgttccgtataaatacgattgaagttcggtcattggtgatataagacgctcaaaaatagtttggtagttgctctcttgaaggaagcgaaacatctgacgcaattgaaagttttcgtttcttttctaacttttaaagttttgtgatataaaaaaatgccagaaaattggttaatgatacctctctctctatatatatatatcagaacaaaccaattttcatttaataagcaaaattaggagaacagctacagttagcgtggaagcataacatatcccaaaggggttagggggcttagaaagctaattaggagggagggattctattccatgggcttttgcaattcaattggcacgatgcttgtttttggtggacaatggacaactaccgctcctttaagctgagccgaaagacccatgcattcatctattaaagtttccgaggatccaaggactttgggctttgcctaataagagctcatccacgcataagttattacaaagcacttctacttgcagatcggcagttcccctccagtttgatgtcttctgttagaaatgatgcccctcttcattgcagcgaaacgtttgtcgaagttctcttaggctctattcttttcaacagaaaatatcacattttttggaaatttttatctaagaagccattttccaagaaaataccaatatttttcagtattcggctgaaatgtgaaaataaactaaaaaatattttccattattcggtatttgattttattttctgggaaaaatcaccaaaaatttgatttttttaatattaaaaataaatttttaattatttttattttaaaatataatttttattattttatatttctttttctttttctttttcttttttccttttttttcttttccttcctccttctccctcctccttcctccaccgctgcttgtctcaatgacgcgcggcagcccggcgactagccaagacgcaagtcggcgagctcgaggctcaaccaatctaggcaagcctttgctaaggctggtgagtttgcaactcgcctaaggcgggtcaagcaagctcgggccttacccaaggtcattaaacattgacgaggctcgagcctcacttgcctcgctttggcttgtggccaacaaccaacaaaggaaggaggaaaaaaaaaagataaacaataattaaaattttgattttttaaaaataaaaagaaaaggaaaacataaaaataaaaggaacatgcgtttcattaaagttgatgaggtaaaagaaaatatggaaaatattttcctcgcttttgaatgtgttttttctattaacaaaaagtgtgttccgtggctaatttattttcgtgaaataaacgttagaaaatccaaaaaatgttttcctgaaaattatcttctacgaaatgagtggagccttagagtgctctactatgtaagacaccaagtagtttccagcagataatttggttatatctctcttgaatgaagtgaaagtgttccacgttatcaaaaattcctttcagattcaacgttatccctttcgcgtttgtgcatccactcttataagtcaaattcctcgtgtcacttttaacacggcttgcatgtgagtgatgttgagaaattgtcccacatcgcttgacaagcaattcagtgtactcttttgattcatgtcatctccctcaaacaattagcttgagttttttaattggacaatctggagaaataataattgttttttcgagtagaaacttctatcgtcccttgattttaatcggtttatatcggccatgattttaatgataaggatagaaacataactgtgccatgtatgttctaatccatactattatcttcacaagtaattatgttatgaacagaaattactcatatgcgtagaccatttttctcttcctgaccgaatatagtttctaatttcgcatcaattgctcgtacagcttggaaggcaaccttggggtgagaacaacttcaagaggagtggccttgggcaagttgactcctaagccttcggtcatgtccaccggtttgtccgacggtgttgccaagtcaaatccttgaagaagacgagccagcgtcaagtggatcacccgcaatgcaaacgacgctcccgggcatgaccttctacccgacccaaatggaacgaactcaaaatgctgacccaaagcatccacgccttcagggaaaaaaccaaacaaatcaaattgacatgtttttttggtcattttttttaactgaattagaattcattgcgacctttgctttatgaaccacttttaaaccattctgtccctgacatttttcttatgagttccccacgtggaggtttaatgggcaggtcttcgtacctgaatggctcgtcaagaacctttcgggtgagaatttttctggattggaccagacttgagggtctttgtgcagcttccaagcgttgatgaatatccaagtacctttcagaatgagatacccacttacggtgcaatcctctctcgcttcatgtggaaccaacacgggagctggtgcacgaaatgacaattcaaaaacacacctcataccactcatcgtttctcattcaatttggtacatttctaaaacacacatcatatagcattacatctagatatcatactttgggtttcgaatatcgcacggtcacaatgatgtgttaatatcaatacctggtggatataagcgtaggctttccttgacgatggcttggaggtaaggcaagctctcgatgttggagtcttgtgcccactcgcccttgcccactttgaggtccacctcttcttgagctcttttcaagacatgcttgttgttgagcaatagagacagaatccacgtcaaggccagagacgttgtgtccgatgcggctgctataatgttcttcagcatgtaaattcgccggatgaaaaattacagaggaccaagaatatgtgtcagtacccaccggggttgcagcttgacttacaagatataattttgatcatacatcatttaaagaatgtagaaaaagctatcgaaggttttgaatatgaaggtgagctagatccggcccaattctaattttcttttggatttttccatgaaaactacaaacccagaagaaccgagtggaggtgaagctttccaccattttctggctcattcggaaaacttgccaagaagcagtccacaagcccataaagaacacaattaagatatgcagacttcatggtaataatggagagagcgctataatatctgattctattctcgattctctgaaataaaatttaaaaaaaaaaaacatttggtaacattttgtttctgaaatggaatttggaaggaatcaagtagtaaaaaaagttacttttttattctcgaaaataacttcaaagtcaagctcaaatcattttctttttttatcgtttcttttcttttctttctttttctcttcctcttcttcttcctctagcgaccaccggccaaacaaggtccaaaaacctcgctagagcctcgtcaacctccccaaatttggcgaggcaagccttcacccaaccactagtgagggtcaaccttgctagaactaggtgagggtcggcctcgtccaaccatggtgaggctctctcaaggtcgacgaccttgcccgttagaggaggaagaagaataaaagaagaaaaaaaggggaaaagagaagaatgtaatgaaattattaaaaatataaaagaaattttaagttacaaaaaaatttaaaagtcgtaccaaatgtatttgatacacatttctatttcgaaaatagaaattttgtacaattaacaaatgcttttaaatactcataaacttttttaaagaataaaattagaaaaaaatcatttatgagttgaaattatttctgagaacagaataattagcaaacgcaacctcaatcacaaaagtcataccattactgttgccttgacgagcgtatcgggagagtaaccaaacaaggcgaaaccatccttccccatcgcagacagcagcacgtctatgaaatcctccttcatatcgatcgcttctcctctcttcagcttgtgttcttcgacccatttcccaatgatcacgtccagttctctcgccaccatcttcatggtcttcacggtccccaagcagtcggtccatcccatgaagggcaccaggtccgaaaccgcagggaacccagaaatgtacataaggtccttgatcactttcctcaggtgactcgcctcgccgtcatcggaggaggacccggttgatgccgacgatagtccaaagtatctcttgctcgcgatcattctggttatgatgttcaaggtcaggagctcgagcatttcgcttatgatcaccaccttggaggacccattttgggcgttgtcagtgttggtcctgcagagattgtgcaggtccttgatgaaggtatcgatttctgatgcttgaacgtgctttaggtcgtcaagcctgcaagagagatattgagagccttcgtcagttgatgatgagtgaacagtgcggtcggggtgcagattcgatgcgtagagtaccagaggtggtcaaacttgatatgcaaatcaaactcgaaagcaaactgaaaattcaaactatattcttacagtcctacctccgagtgcccaggagctcaagcatggtgatcttcctcatctcgcgccaaaagtccccgtattccgcgaaggcaaaagcggcgttcccgtagcccaatggactcccgccttggatttggtacgagaagcgagttccttgtcgtgggtggtgaagcactcccggaccgcctcctggctgcttatgacgaccgtcgggtggactccgagccggatcaggaacatcgggccttgcacgtcggccatggcggccagggtcttggccagtggggtctcgccatggagcaagtggaggtggcctatgatcggccatgcccccgggagctccgggggtaaattggcaatcttgggcttgttggatgccctccacaggcaaacaaggagtatcagaagccctagagctgctaggagatgactgaggaggagcatggtggattagagagagagagagagagagagagaggtgtgcgtgaatgaagagagttaggactattatgtatcgaatttcctttaaatggattgtatgatttatttcatcctttctctttcctttctcttcttcttcgcttcttcgcttcaaagaaaaaaagagctaatgataacagaatgcactgactacatagcatttacacaagaaaaatgcctgatgtcattgtcgtaatcggcacgacagcgatttggagtggttggtgtaaaagattggaaaattaaatggaggagacggcggccggtgagtaggtgagaattatgattagccttgaggtgtgagattggttttgtcatagtttgacttttagtatcttgtccttttcctgataaattaaaaaaaaaaatagaaaagattggcccgtagaaaaccccaactccacaaggcaatgcaatttgcaagatttttctgactagatggcaaatgcaatcggtgcaggtgatggcatttctatggttgatgtagatttggatgataatttacctcatattgacattttattattatttttaatatttgattcctaatttcttctcaaaatgaaattggttgatttttttagattcctgtttgacatgctgaagtgaaaaatgaggaaataaaacattacgagaaacttattgatccttaaatttcgactaaggaattcaaggtgtgcacatgtaaatggctataaaatggggacatggattcgatccacaaccttacacacgatacttcttttagtcctctacatgttcatgtcaagattcatcacgtaaaggacatgttataagttacgcttacatgaaatataaataataaataaatgtgtttgagattttttttttcttttggaataatttatgttaaattaaactcaacgaaaagtatcaagattgggtaaatcatattccataaaataatcgaccaaaaaaaaaataatccataaaataaatgaaattggctttggagtatggctaaggaaaacgccgtgcaacgaatttctccccgaggcccatcaaaagtccagacacgtcgctcctctcgcatttcgggtccccggcccgaacccgaatagaggagagagagagagaggggacttgtcttcttcatcgaatcccgctcgccatagccagtagctcagccgagctcctgcaattccgcgtcagcaatggccgccaatttctggacttccactcactagtgagtctcccgaactcccctgattcatgcgccgtgcttcttctctgtttccgcgccttaatcctcgtcgattctcgattcactttcttgggccctgaggaaattttttcttcgatttctcccccccccccccccccttttgcccttcccgcaacgcttttttgatctggtttcgcgtcgaattcgtggtctgaggttcttggtttcgcgatggaaacgtccgctaattatggatcaatactcgatttttcgcttgtgtaagttattgaattgtgaaagtaatgtggtgttaagggaatctatttggacttgatgaaagtaggtagttttgtgtctagcaagattgacagcactttaattggccggctaagcagttgaattgctgtcatgctcgctgtgttcagaatcaggtgcgtgaaaaagtgaaggatagtgatcgatcattagtatcgggatgtgacgggaaccttggaaccttgaaaatatgaggctaatgaaggcctcatttggtgatcacgagggtaccatggatagaaatatactctcttttgtgttctttggcttcccataaagagtatattggtaaacattttgactgtagtataggaaaagaggattcttgattgccatgttcagtgttaaccgcatctcgagcctgacaattgatgatgcttgttaagatcactggaattacggcaaaccaggcatgagggagaattttacacgtcgtatttctttcatctgaacatgtactttaaatacaaatagtggctttgttcatcgctcgtatgttggggaaaaaaattttgccagtcgaatttttttcttgtcagcagtggttgcgtgatatcttaacccagttgaaggtttttttttccctttttttttcccatattttatttgcttttctggagtaactaatgcggcagtggactttcgtgcaaagttaggaatagtggacttgcagttcctccttgctcttacccgtttgaccaaaaggttgttcattgtcgtcacatgttatatgggtatattttcaagcacattgatcctgttttttttttcagatat

SEQ ID NO: 10194 - DNA, 1930 bp, Eucalyptus grandis
  Intron number 1 from transcript Egrandis_v1_0.002442m (loc us Egrandis_v1_0.002442m.g) derived from phytozome v7.0 (c hr-ID scaffold_8; pos 64169913 to 64171842)
tctgcgactcgtgagcgccgtccacagtgatcccggtgagtgatgaccctcttccacacgatattcttgtcgttcatttctggaacaagttctttcgacggcttttcttggtactagactgtgctgtacatttctgttgacaagatctgatgaatggcaacaaattaagctgttcgtcgtcgtgacaggcgatcttcttccccataaagaaaacgcaataatgacgagtatttcccataatttgcaaacgtcaaaatgcatcgctcgcgtttcgacgtcctattataaaaaagaaagcatcttcttacttagatttcaagaaagcctaacacgtgcttcttccttacaaagaaaataatgatatatcgaagtggatcgcttgcgtttcgaagatctgttataagaaagaaaactacttcttgcttatatttcaagaaaggcatcttcgctttacttgccgcatgttattgacaagagtaaagttgggcgacttgtgttttaagctttttggttctgtggcacgatactcttgcgcgttcaatacaatgattcggaaattggccatgcatccgattcaatcaacctaatctgtcacattccctactgaatttatcttctgaagtttgatcttttatgtgcaactttagagaacatgtgtaatcttgatggacttagaaaaacaaatagaaatttttttactgaaatatgacaggtcaaacttagttaccgcatgtttgttggtaggatgactccactatgcgcgcatttataggcatagataaacagtatgtgcccacatatttttcgacaattcttgatattttaatagatggaccatggtagattaagagtaatcattaaatcttgcagtttcatgtgacagaaaatttgggtacatttgggtgtttgcactatgggtaggattctcttcttataatataaacgaaaaaattatgttaattccgaaaatctcaagccaaggggaaaaaaaagccaattgaaaaacgtaaacgttcaaactaagttaagtattttgacttgattttaatgttgaccatctgggcacaagttaattagttcgtattttagcaaccgcttcaggcgctttttctttttctctcgacatacaatacatgcatatatgtatatgcgcgtgtatatatatgtattatatttatgcaacatttctaaactcaagtaaatatgtgtctcatcttttttcatgtttttgaagaagtggatgaaactaaatcagaattataaattgttttcctctatcgagtccaaattttaaaatcgacaaaagtaaagtgttcctatctgttttgtactgttttgaattttccactcacgctttattttattctatttaattttactttttaattaagaaaaagctcaaattatttttcggttctctctctccggtccacatgaggtgattttcctcatgtcatgtcctagtaccacaccacctaatcaaccaatggtgcatggcactagcaattcttgtagttaatttgtggctattggccaacataagctgtcatttgtcatttttagttgggaatttatgcggggtatcgcgaagatgagctttctaaatcacttcactgagcacaagctcgggtcgttgctctttccttttggtttttagcacaagatcaggtattgtttgttgaaacggcaccatgcttgcgacagcaagaagattatagataacataatgtcagtgggaatgaactaaaaattggaaacaaaaagcaaatgaccttgcgctgatcattgatcagattcagaccccttgccatgttaaagatgaacgtcattctcatttgccgggatgaaaagatcgaaatctttgaaaatttttatttctttttcgcgttctgtagaaaacggtttgcaggggaaattgggaaagcctgca

SEQ ID NO: 10195 - DNA, 3275 bp, Eucalyptus grandis
  Intron number 7 from transcript Egrandis_v1_0.025086m (loc us Egrandis_v1_0.025086m.g) derived from phytozome v7.0 (c hr-ID scaffold_8; pos 50079548 to 50082822 reverse strand)
cctagttctactgaaagagggaagacattgtgcaggtttttttccttctcctaccccactttggtctcttgcattcatgcttccgttagtataaactgagcatttctgtttctcatctgtaccctttaagtaaacaaagagataaaagccaaaagagagtactggagtgttctttccgctcagatagaatgtcaaatgtatagattcttattctgctactactgtttctgcttgataaataattaccaaggaactttaaaaaatccttaatctttagtatatagtaggttgtaatatttttgtgattgggctttggtagaaggaacttactatgtacacattccctttctctcacctttaatgtggcctaattatgtgagtgtatactggtgtatctcaaacctacttttggtagaactgtacccttctgcgaattagtttggtgcatctgagtttcttttttatgaacttctggagtctcggaaagctatgcatgttctttccctatttttcctgtgtttcagaatttggaaagcaagctcttttatttttgtcctccactatattataaccttctagttgtgttagcaatcttaaataaggtaattactaacactggaatctctttctcctctaatgatggtactgcttttgcaatattttacgaattatcaagtggcttctcaaaacatccccttgaaaatctcttcaaccaataattggattgttttgtatggtttaatccaagatattgtcacagaaaaacctggataagaaggctgttcgacactttagatggcttagaaatttcaattacataactggagaagctggtgtgtatatcaatattctgttccgaaaagaaaaaaaatctagatattttggactgtacttaggtaacattttgggtggtcaagccaaaaagaaaaggtaacatcttgggaagagtgtcttccctagcatttcctttgactgttttatagtgtccttttccactactatctaggtctcaacataatctctcaagaaaacaaatcacttcttattcttcaagcaaacttgaccttttaatgagctgagtcatggatcgactttcacttgttactttttgcatcaaatcttacaggtcatgtactttgatatattcttaaatctgaaatacttgaaattttcacaaaatgcaaatgtcaatttgtagagttacacattttttttgtattgaagtttgaataattttttaaattttaacagaaaaacataaacctttcgcttttatttaagttgaaacgaacaggcctcggcttgcagctatctcttttacagtttttacatggtattgtgcaattgggtcatatttatctctctggctcaaagtttgaaaactagtatttcagcacctatatcgttagatgcttcaactactttactcttagcactgatgtattatcaggcttggaattattatctggatctgatattgatgaacttggctttgatactatgagggggttatgatagggagtaataagcgatctgagacaagtatgctatttcttaacaaatgacccttctcttaacctcaaaagggattgcctcttagtcttcaaacgccattaatgtataccataaggcattcatggcctataaaatttctaatccacaagattcacaatatggcaagtggagaggatactagcacagctaaactcatcttattggactaacaagataattcttactatttaatgctatcaagtcttggtggaggaagagaagtgtttagaatatcgctgtaaagtgtatataaaccaattattttagccaattcttattcctcaacttctattagaagttaaaggctagggcattatggacttttacacacaaccacataggcatctgccaaatgttcttctagagcaataatacaaatttccctcttttacaaatggaaggacaataataaaagcacttcggccaaaggcagtggtctgcgtaacatgtggtacactaatacaaacctagcgaacaaactgctttattaaagtcgatacttttttacgggctcgtgatatgggtcaagatttaagtcttcgtgatctaattggaatatgggtttactatgctagtgctttttcctggatggagcttggggtctatttatcttgagtgctggagttgggtcccaaaggccatatgcacggtctgggatgtggttacttcctgtccggcttgttggcatatgacctgtgttgagacttggttgtggccagctatctaaactcataaccctgagcttaaaatctcataattcttgtggtcttggaaaaaacccattagtttcatggattgcttctgtattgttccaaagcttggtggatgacatacctctctagtcgtctcatatgtttggaaataatcctatggaacttgttcttagtaagcacgggtcaatatagaatgtgggatggtgtgattcttttttgtagggaattctctcgatttctctatatttgactttaagatccacaatactacatttaaaggatctgtatgcctttgcagtggaatatgcacaattaagttgctgcgaggtcccagagttgtacaagtgaatgtagaatctttcgcataggtttaaaacattgatggtccattgaatataacagtcgtatgaattttaggatccggattaaggtcaaaactctttgagaaacaacttcttccaaaactcgaggaataaaaccactcaaggacttttacaaaatgactgagatcatgttgttgatatcattcatcgatgaaatggtttgtattagtgtgatatcattatgtggtatggttggggttctttatcctttttgcttgagaagttttttgaaacctttgcttgctttcactttcttcagattacatgtgaagtatgcctcctttcaaagcttgagtatttaatctggtagcactttcacctgcttctcagaagtcaaccttcttccctcttttcttgaaccatgacttgctctttacgtagtcacttgaatagagaccacccatcctattttttgctagaacatttttgcatactaattgtttgttgctttttcaaaaggcttgttttatgaagctcaagtggcatattgcagaccaaattggctagaatagacctcttcttcttatgtttctggatcccatgtatagaaatcgtgtctttatctctggagcctcaatttacatgaaatcttgcagggatcctgtggaattggacgtcagtgcac

SEQ ID NO: 10196 - DNA, 2650 bp, Eucalyptus grandis
  Intron number 1 from transcript Egrandis_v1_0.027274m (loc us Egrandis_v1_0.027274m.g) derived from phytozome v7.0 (c hr-ID scaffold_5; pos 16456320 to 16458969)
cgccgtccaggctctttcgccgagcaagctctcgggtaagttcgtttccctttcgaatccaacgagccaatctctcttcctgcaattctccccgacttatcttccaggtagatcggattttggacggccggtgcgattccgacgtgggctcaagagctcgagagctcgagggcgctctcgtgggcggtgggattgagagtttctcgccctttctttacgttgcggtcgcggagagcggcgcgagaagaagggttgggatgaaattctgaactgttgttgccaaccgggaactagagagcgatgggaatctgaaaggcgtttgtaggaatcggtcttttaggcttctttgcttttcttggatgatttaagagtactacttagcggcttagcgcaaagctttgggcaattctctccgacttctcttctgggtgtatcagattttgtatggcaggtgcgattccgacgtaggaatggaggaatggggggcctcgagagctcgaagacgctctcgtgtgtggtgggattgagagttcttgcgccttttgatgtcgcgattgagaataggggtgcgagaagaagggctgggtgaaattttgagctgctcctggggacctggaactagagagcgatgggaatctgaaagacgtttgtgcgaattgatcttttaggcttcttccctcttcatggacgatttaggagtacttgacagcttaacgaaaaagcttttggcatggttactgaagtgaagcctgcaaatgtctccctcttttcgtggacatcatgcaaacacatctgatttctttccttcagattttctaaatcttgtatcatgatcccctaatttagtatttgggtccttgacaattaatatttggagttccatagaaagctcacagaataactgttcgcgagaccacagttactcttttgcaagagagactagcttatgtgtagcttgctttactttctccatcatttgacagttatacttcttggcgagcctcaggcctttgatgataaccctctgaagctggacctcaaatccctttaataagtcctcctgcctttttggatttggcaagaaatctgggttttagtgggcacaagtgtcatacacgagtttgctcttacaacagctacatgttttttggatcatgatcctgagaagcaagaaacaaggaaattagtttagctgtataaggagccattattgatagttgatacatactacaacacagttttgggccctagataacaacctattggaacggtggctcaagcattgatgaggcaaccgatgaaacccaaaaaagaagagtaatgcatgccattacctcttataatagtttatgaaagagtctatacttcaagaagagggcaatatttgtcctgattaatgtgagtgctgctaagtattgaattattttctcccccaaaatttagctaccatatccacatcattaaggtaaaagttacagaatccctcattaatgttaaccttgggggccccacctgccaccgtgtaggtggaattagggtggaaatcttttataagacacaataacacaacttgaacacaacacaaagttagcaagtttgggttaaaaaagctaagcatatttgagtccacccacaaggcattaataatcgtgttgtcttcatgtccaacctgccagacaagaaattaacgggttagtgtatgcacaacttgtatgtgacctctttagatatgattagcttatattgtttttagtttgatttgagggtatttagttaatggatattgcaatttgcaaatagaattaggaaaaattgaagaaattttcatgtcaggtacatgtcgatggcttttgtgtcatggtgggtcatgcaattgtaaccacccatcaactcactatttaatcgtgttacacgggccgtgttgtgtttattgttaacttttatgcgtcaagtatcttgcttgaggagtggatcatgttcgtgtcaagtaagtcgacgcgattgactaatcgtgtcgtgttttggttgacctaaataacagtgtacacttatttcgatgtgagacgaacacgacctgcgaacacgaattgccacccctaggtagagccttatttggtacacgtagcagggagtttgtgtttatccgtggctagtatgctgcaaggttcaaatatctcattttttaaagaaaaaatgcaatggaatcctaaaagtttcaattggtgcaatcaagtcacatctctatatcagaaagttcaatctaaggctgccacatatatactgatggagtgccacatagacaaactttggtacttgccattgaaaggacttgattgcttttcttgagaaagatttaggtttcaattacaactatcgaaaagtttaggacttgatttcatcccgcatgcagagttaagacttctggtgcatgtttaccttataatttgctgtcacttttgttaataatgtttacagctttacaaattctgttttattggttcgatattggtgttatacgccaaccttgatggacttttggctctgatctggactatgtctatgtatttataaggtgtacatattgtgccttaagcagccacattttcatacttcattgattgtgatgactgtccatgcaggtctttgcttc

SEQ ID NO: 10197 - DNA, 3850 bp, Eucalyptus grandis
  Intron number 4 from transcript Egrandis_v1_0.015717m (loc us Egrandis_v1_0.015546m.g) derived from phytozome v7.0 (c hr-ID scaffold_6; pos 1952431 to 1956280 reverse strand)
gcccagttcgcgtcttcaactctggtatactctctctctctctctctctctctctctgtgggtcttcttcttctcctccaccatccatttccttttcttgctttgtttctccataattaaagggctaaggtccaggtcatttctatcacttcccctccaccatccatttccttttctttgcttcgtttctccataattgaaaggctaaaatctaggtcatttctcgctaggtgtttagtacgcaggtaggaggggggagagagagagagagagagagagagagagagagagcgcgcaaggcactacctagctttgtggactcttttggaaaaatcctacgactccctatcacgagtctataataatcaagatttaattttcattaatttctcacgagaaaagctccaaagcttaattaatccgaggttggcgcgttggtgtgcgagtttaattttggtttaattcggtgtcgagatcttaaattttcctcgcaaaggttcaggcattaccacctcgagatggatatgttgttgtcatcattgtttgtcgtcgccatttaccggagccgtggcttcgctctccgcgactgagaacaaaaggaaaaaaacattgttctttgtgttccagtgaaacttgggaaatttaagaaaactttggatgctgttcctctcagtgctgcaccagcatctgtacggcattattgtcagacatctttaaaatatgtgtttgtgtgtgtataaatcgtagagcaatacattattattctgtctcctttatttgtttatttctctggccaatttatctacgcatttaagacaagatttctctatttatcacacggcaatatttgtcgaaccgtgattgccagtttgttgctccacatgacataaattgttttcaagggactcagaggctaacgctcaagggaatgacacgtgcatgctcttttcttgatttaaaataatgtaaattggtgcttcgactctgtccagtttttttttgtttttttggtgaaaactctgtccagttttgttatcatctcacctcataagaaaactgggtaaacaagagaatgtcattttcggctccctcattgtcttcggcaatctactatgacaaacatgtgtctgttagtttatggtaatagtcatttgagtttacctgacatttgagaggctcgtaatgggaccgttgcctaagtgtatctgcttttactagacaagattgtttgaattgtttccggtaatgtatagtagtgagtaccaaaataagtggggccattgcgtcttatctagtctgccaagtaactctcgagacaaattgggcataaaacattgacaagtgaaagttcatttggtaaagtgtagacaatatatgatatatgatcacattctcataagctttgtgtacctatcttcgtagaaattttgtatcttcagcattgttgaggttgtcctgcatcgattggtcggggatggtggtcagtttttaagtataagataacgcctcaccctttgagttagcttttgaggtgagagaaatcacccaactagcgttacttattgtgtgcaaatgtaaggtttaggtagattggtgatggtcccatatactttaatagcggaatcatagattaccacgacgaagaaagagggaaagatggttgacttctttatacttgaagatggtcacaaagttactatatgttgtcaaatcagactgtcaagccacatgctcttctgaatttgtattctctcagccaataagtgtgagctgcttttaaaaatatatttttggtcctctctttcagttgtattcttgaaccgcaattgctaattattgggcttgtttagctagtatcaaataattccatgagctgttattgtcattttgtgagctaaacagtctacattgtacttatgttaatgtgcattgctggagatggataatgtttgtggatagattgccattgatatagttcgtgaagagctattgcccctcgttgactaagatatgcgctgacatagtttaaaaatacttcttgtactagtcttacttcactttactgtccaagtgttctgatctctccagtccgtttgaaataatcttcatcatcatcgtggataattagattcactcatagagaaaagaaagaaacctcatacttactacaaaggatgctacgtttttctttcttgtggttgaaagtaccgttcgaacacaatctgagatgtctagaaatgacttgggtgattcataatatttcctaagaaagatatccatgattctgaaaggaacatgatcgttcccctcatttctttccataggaaaaatttctaataatagcaagggtagtttttgtaattacttcgttcatggtgattcaaaatcttgtgttgcttttaaggtaccttgattcacattctttcttttcctctcagtattgttgtgcctctgaagtatctgcatagcttccttcatttagaaagaggtgaaatactttggtcatgaggacacattcatcacactagatatacattttgtagccatggccactattgaagcaaattcacttggctatgaggatttttatgtgttatattcaccttgatgaattattgtattgagttaacgcaggatgtatcttctgcctttattaaagtctctatagttttgatttttctgaacttgataattttttgtcgatcttcagcaaactagtttttactactcatctttctttatatttacaatccgtattaagtgaagtaattgcctttttgtaccatgaaaatgttactataaagacccttgtcacctcactgcgaatggttcgagagagagataatatgaatctaaatcttggccacagcaaagtggttcttgaaggtgcatctaactctttgtttatagcagacctttcaaaatggttcataaaatccatttctgaactcaaatgggttttaaaaaaattataaatggattagttatattgagtaaatgagtcataaatgggtttaaaacacattatgagtgttaaacgagtcacaaatgtattataaataggtttacaacttgcttagacctaacccattttaatgactctctttttagtctcaccttcactcagtattgcactcactcattttgcactcttacctgagtttgtctatggattttcgtagattgggttaaatgtgaaagtgtttaaacaatacaggtcgggtcagatacgggtcattggatttatattgtgtggaaatggatcaaaagcggttaaatgggtctatatggattggactatttatggcccaacccaaacccgaccccctatttaatggatctagtttacaacaacaattgttcagctaggtgtgagtcctttttgggaaaaaactggcaccttttaatagttcaggaatcaaatagcagctactgggtgtttggctgatggttaagttgatgataacaaaaaaatggcacgttgggtaagacatttttcaagcttgtgtttgagtccaaatgcaatgtttagtcactatgcatattcatcttctaatctttttatagaaatgaaacatctcttagcactatttctttgcattcaataagtagctaatattctttgttgttcaaattgatcatgtccaaaatcctgcgtttataaatcgcccatgtgcaccatcatatggacttaccattaagctagaggatctcattgtccttatttaggtgccaggaaattgctaattatgtcggagtagcttttgatgtacttttctcattcggaaaaaaatcgcagttgcttttatttgactgtaatgggttttcaacatataaaaattaatgacag

SEQ ID NO: 10198 - DNA, 4354 bp, Eucalyptus grandis
  Intron number 2 from transcript Egrandis_v1_0.019585m (loc us Egrandis_v1_0.019605m.g) derived from phytozome v7.0 (c hr-ID scaffold_9; pos 27940245 to 27944598 reverse strand)
gcggtgccggcggtgtcggttccctggtgattcaggtatatcattttgagttgctgagctctgctgatgctcggaaaagcaaaaagaaaggctcataacggaaacaatgatgtcaactgttattgggtcgggatctgctccagtattcattcaatttagactttgagaatacgatgcttatgatataattgtcttatcgtttgaacctatggatatatttatgatcttttgttggtcctaaaacacagctagccaaggaagtctttggtgcatcaagagtggcagctacatctagcaccggaaagctggacttgctgaagagtttgggagctgatttggcaattgattacaccaaagagaacttcgaagacctcccggagaaattcgacgtggtgtatgatgcggttggtatgtgtttgaaatatactctgttattccatttacaagtttggagttcgcccaacttcttagtcttgtcttaataatcttaagctttgatgaattcccccgtctcaacaaaacaaacaaggggatgcatatacactttccaagtggaattacagctatttctttatcctcttttagctggtatttgactaaagttcaaggtgcacttatcatatgttttgtaggcttctttgaagagtttaatcattctaaatgaaatgcatgcaggtcaaagtgagagggcagtaagggcagtgaaggaaggaggaagcgtggtgacaatatcagggaaggcaactccacctgctgtcctattctttttgacatctaatggctcagtcttggagaaactcaatcccttcctagagaaccagaaaataaagccagtgattgatcccaaaggcacattcccattttctcaagctctcgaagcgttcttgtttctccagactggccgagtcaccggaaagatcgtcatccacccgatcccatgagattagagagagggagatcctagcgttctctctaaatatagaactaggagcacatccacacatatgtatatatagtggctagctgtataaattatatgtgtgatatcaaaaacaagtcatctatcttttcaataaatttatattagaaatattcatttcattagtaatattaaagcgaatatcgacggtttatttcattgatcaatctcatactatggttgtccaaaaacccaacccaacacgacccgaacatgacccaaatacaaactgtatacaaaacaagtcgagtacatgtttcaagtcttaaaattgttcaaataacaattataaaataagcaaacaaacatgttttggtttgatttagagtcggaactttgtttggccgtgaacactttattgactccaaacaaacacgttctctcatccaaacacatcagaccccgagtaccgacgactctgccttctcctgacaactatgccttctcctctcgtcaccaatttcattgccctccaccgcccgtcctctttcttttccagatttatgcattgcgcgcacgtcactggtgattcgctcctctcgttcgaatgccactgtcaatgacttcttctcgttcgaatgccactgtcaatgacttcttgtgactctctctctctctctctctctctctctctctctctctctctctctctctctctttcgctggctctgtttctacgtgcgctctgttctttcgcgttgataaaatcttggggaggaggaatttggcgtctagtgaatccgggtctccgtaattacatgcttttcatgtcttgatgctctgaagcgtttttggttaactaattctagtttcctggtcgtctgcgttctttccgtagtgctctctagtagttatttgatcttgcaaagcaccaagaaagaaaaaaggcgaggatatgagattctgctgtagtttctctatgttgggctctgtctactttcgcgcattctctaagtccacatctaccgcactgctgttgcatggaagatggctcgaaagaaaagagagctgcttaaatttagatggaaaaaaatcaatttgtctgctcttgttattagttttagactgtgtagatgagaatactgcactttcttgctctttttagtgtgcaatccaagcatcgacaccagccaatctatgtggaatccatgcggcactgccattaaaattgatttcatgtgtgatgctggatagttagttgtagggttttatagtgagagatgataggttattaaacacgtaggttgcactgaacctggaggcagaattcgatgctcctgacagcccaaaccagaccaagtgctgatcaaagtcctcactgctgcattgcatgctgttgacctgaagagagcacctgggttcctcaaagccaccgtcacttgcgctccagtaggtaacacttccaactgtatgattgaccatgacatattattgggcagtagagaaatgccagtcgggcccaggtcccggatgatcgggaccgagacctagggggccgggccgttgaccctggcggcagggcttgggacctcagtggccaccccagagcccttgaggctgatcccaggcccagatccccgacaccctggcccaagatcctgatgaccggacctggcaacccggttctctagcccggctcctgctaagatgagtccgggttcaggattgtcaaagcttgaatccgaaacttagagttatacttgagatttcaactttcatattatttgcaaagtgcccaaaaaaaaaaaaaaacatccttcgaaaatattttcgaacaaagttcattttcaatgaaacaaatggagatataaataaaagatcgttttattcaaaataacaattaatgttgcagtaatatgctgatgaatcataaaatgatatcaaatcaaaataatagtgtctgaatgattgaaaagcattgatgaagattactattttaccaaaaatgtcccactatcatcatgaaatgatggagtccactcgaacattgcatctagacacaatgaacttggaccacaatcaattcttatacatcaacgaacgcaatgaacttggaccgcaatcaattctttatacatcgacgaatccaaggcgcttaaacccaactcaagttttcacgacgataatgaacctcacccaccctttacctttacgcgttaccttaactctttttatagattgacaaggtgaggtcacttcaagcaccaagaatcaacaaaactctattgttcttccatctcccaccaattcacacacaattgcttagcttagcttagcttagcttagcttagcttttgcttattcaatggcttccgactcagatgtcaccatcccctcgaagatcaaggcttgggtctatgccgaacgtgggaaccccgccgatgtcttgaagctggttccagacgttggggttcctgagattaaggaagaccaggtccttgttaaggttgttgccgcttccctaaatcccgttgatttcaagagagctctcggcttctttaaggacatcgactctccgccgcctgtaagacatcatagtacttacctccttcttttttccctttaattttgttcattgctggtgactactgatggctgttaaacgcgagcctattttgatctggaatttctcgttttgttattcatcaattatggtaacaccacttgtgaaatttaatttttggccattatcggacgatataaaatcttgatagcttctaattacttctttctgttggataatttatttttatttttttgcatcctttttctttatttcttttttttttatattcattaagattgtgcccggctacgacgtggccggtgtggtggtgaaagtcggggatcaagtgaagaagttcaaagttggggatgaagtgtacggagacatcaacgagaaagctttggaccatccaaagcaacatggcactctggctgagtacactgctgtggaagagaggctgctggctctcaagcccaagaacttgagcttcattgaagccgcttcgcttcccttggccattgaaactgcttatgaaggcctcgagagggctcgcttttcgcctggcaaatccatcctcgttttgggtggcgccggcggtgtcggtaccctcgtgattcaggtatatcagtttgagttgctaagctccgctgatgattggaaaaggaaaaagaaaggctcataatttcaacaatgatgtcgactgatattgggtcgggatctgctccagtttttgttcaatttagactttaagaatacgattaatatgatataattgtcttatggtttgaacctatggatatatttatgatcttttgtcggtcctaaaaaacacagctagccaaggaagtctttggtgcatcaagagtggc

SEQ ID NO: 10199 - DNA, 945 bp, Eucalyptus grandis
  Intron number 8 from transcript Egrandis_v1_0.001157m (loc us Egrandis_v1_0.001157m.g) derived from phytozome v7.0 (c hr-ID scaffold_9; pos 37832991 to 37833935 reverse strand)
ttagcattcctgcgtctacacagtcccattggcaggtactttaggtttgctttgcacttttttatgtaccattctggcattttgacatgcaatgtggctgtgctcttataagctagtttccagattatgttctctggatgcaatgtgccttgtgaaaaggtttttgttgttgaggtaattttgtctgatagtctgtgctaggtgccatgaggctaaagtgaatgtttcattccttacaacataagtataattttgggaatctgtgtcgaagtccacctattaagttattcggtggtaagagtagctttctgtgagagttctttctttttttttttttttttgcaatctgccattattctttgaaggaaaagattcatggtcaatatgttggatttgctctacttgtttggtttagctgcaatgatggaaatccgtagactctggtgtttcttgcttttttattatttgttgtgctgatatctgggacaaagacttatgtgtgtctcacgtgcttatatattatcggttcgttgcaactattctggaactggtagatggctttgatgattctgtgaatcaacaatcaactctgcgttgcaagtttcaccttgtcctcgattttcaataatttcaatatctaaatgatgtttccattatacctaaggtaatcacttgaaatgtctagtcatctgtttgttgtagtaaaaggtcttcctttagtttaaattccttaaaaaaatgtcataaaagttgatgtcattcagcttgacatgagacgagatcaataatgaaagctctgataattatctgctggggtcatcaccaaaagatcaatactgttatgtagagcacgtttctgttttttgcatttgctggtggattgcaggagctgcttcattgtaagcacatattgacttaagtttaatatgcaggtttctggggaag

SEQ ID NO: 10200 - DNA, 991 bp, Eucalyptus grandis
  Intron number 2 from transcript Egrandis_v1_0.014480m (loc us Egrandis_v1_0.014480m.g) derived from phytozome v7.0 (c hr-ID scaffold_3; pos 66185868 to 66186858 reverse strand)
aagttgcctaaaggtattcctgtgaatctgcttaattgatggactaacatgacaaaaagcatatcattcatagatcctatcaataaaaagttgaagggacagtgactacatctatgtatacaatttaatatccaaatcatgaggtaggtcacaaattaaagtcatgtataactgttgtaaagtaaggcaagacgttttactcaatatcaaatttccaggtagaattattgagaattgtagacttggatttcatctagaggttgatcagtccaagttgttctctaacatattcaagcattattaaatttcattgcatgtgcaattttcgattcatgagtgtgatatgtatccttttgttaatcatcaatatctaacttgctgacatgattgttctcccctcttcgtggctatagcaaagaaattcatgatatcactcttgaatcttaccacaaaactaggtacatgaaattaccatggtatttataggaaaaatgacctcatttcatcataggtagagatccctaaatttaaagtgcaaattgatatttcagtatcccttgagatcatagctattaagatggactggacctcaattcgtatatgaagatacgattaagtttaatttaattccaagtctaaatgatatatatgctttacgtgaatctgtaaatccaagatagagctattgatccattattgaatcttcccatttttcattaaaaaaaaaaattccataaagttgtgtgtgttcatcaatacattcgcctagtctctcatgcatgcatttttattttcaagctatattaaatttgttttcttgattaatatcttacaaccatcattttcttcgaaactactatgtagatgtaacaaaacagcctaaatccatctttaatatctttggccttttgattcttccttattatataaaattgcttatctaataatacgtgcagtttctttcatcaaaaggattgtagaatcgaagttg

SEQ ID NO: 10201 - DNA, 6811 bp, Eucalyptus grandis
  Intron number 1 from transcript Egrandis_v1_0.044050m (loc us Egrandis_v1_0.044050m.g) derived from phytozome v7.0 (c hr-ID scaffold_5; pos 40476611 to 40483421)
gccggtagcttgtctgggtggcatttgaaggacgggtaagtagagtggagtccatattttgtgtaaacaaaactagtctttaaaagtaaagattgtatgtaaaataaataaatctacacacatgattgtaagtatatgacttaatttactgtttattattaactagcaacatttgtttgtttgaaaatagttggtaaggaagtcaaatgagagttggtaacacaattcgaaaagttggtaaactaaaagaacaactaaacattggtaagtagcttaagtgagatttgacaaggtaggtaattatttaatatgacaaaagttggtaagtcactctaatttagattcatattttcatataaaagctagtatattcaaagcagcaagttatgcaaatcaaaatcggtgagctagtacaacacttggtaatttgcaaaaaaaaaaataaaataaaaaataaaataataataataataataaattggtaattttatgtaagtgttgacaagctgcttacaggaaaagttactgattttatatttcaccaacagatttttttttttaacttaccaatttgttgaaattcactggcatgagaaaaaaagaagaagaaaaaaccccaattttggacatgaagcaatagaattctgcctttggtttaggtaagccccgtttcattcgggtaatgtctatggctctttattttggatccttgttgccttcctcgaagtgtaataaaagttataaacgttttgcctctgagctatttgagttcttcacctttcattttggttattgaattatatagattttcaatattggtcaactgaatcctgaactcgttattggtgccattttgagttaaaaaaaatcacatgtgcccaaccacagaatagatacgtggctttttccagtaataaaaaatttgacaataggactccatcggccgaaaatttaaatgacttttttgaacaaaataaaatgttaaaacctgatggagtacaaacggacaaaatgttaagtagcattattgcacgtaccccatttctttggaaggaataagaaagttcacaatgcttgatccaggataattagtacgtataagccatctaaggcaatgacatcacttttcggggtatttaatagttttcgattcgaaatcttaaccaccgttcaaagttctaaataatttgattaaccgttatacggtcacaaaggaaaaaatgtaaatcgtcatgtacacatcaaaagaacatgaatcacttggatgactaaaagctgaaccctgaatttgttatggttggtgtgaagttctcgaagttctaattcgactccattggaatactttttgtgttgttgtgtccaaaaatgggatgccctgttttgtcattgttggttggtgactgctcattatttgcttatccaaattgctaaaatgatgctacagcttctttttcggtttttgtcagagatgattcggagcatatacaaaaaattgtgaaggacattgccacttacctaggccgaacacctttgcacgttgctaagcatccagttgggatagattcctgtgtgcttgagctaagatcgatgttaaaccttgagtctaatgatggtgttctcatggtgggattatggggacaaggaggcataggaaaaacaactttggctaaagcaatttataatgatattttcacacaatttgaaggttcaagttttttggcaaatgttcgagaaacttcaaaagattgcaaggacttagttactttgcaagaaaaattactacatgagatattattaaggaaacaaagattagtagtgtctagtgttgatgcaggtactaatctaatacaagaaagactttttcgcaaaaaatttctccttgtccttgatgatgtggatgacttgcgccaattaagtgctttagccggagaaagcaagtggtttggtaatgggagtaggatcatctttactacaagagatgaacatttactaattgcacatgggatagatcaagatcatgtgtatgaagttaaagcactggatgacagtgaagctcatgagctacttactaagcatgctttttccacacaccaaaaactaaaaatcaggactaatctagtgaatggtgttatgaattatactaaaggccttccattagcacttgaggtgctaggttccttcttatgtggtagaagagaacacgaatggaaaagtacactaaagaaactttctactattcctaacaaatccattaatgatgtgctcaaaataagttatgatggattagaggaaaatgagaaagagatctttctccacatcgcctgcttttttaaggggcaggaaattgggtacgtaaaaccagttctcaacagttgtgatttggagatggcaattggattgaaaattctcattgagaggtccttgataacgattaagtctagaaccctacatatgcatgacttgattcaattgatgggtatggatattgtgaagcaagaatgccgcgatgatcctatgaggcgtagtagactatggttatatgatgatgtcgttgatgttctatcctacgacgtggtaagacttgtcaataccatcaaaattctgctcactatctttgattttatttactgtatatgcataacttaaatagtcttgtataaatagggagattgtgtagtcaaagccatagtattggagccacccgagctaaaggagattagtatcaatccttatgcttttacaaaaatgagaaggttgaaattgctcatcttgcgcaacgtgcacaattctttcgaaggtcctgtgtgtcttccttattggctaagatggtttgagtggcctggggctccatattttccagaattctcccctggtccaaagaaattagttggactttgtatgagcaaaagcagtatcacgatagtggcaaaacaatacaaggtgagcatttacctccatagaccttttttattatatatttgatttgtgcatatacgtactagtacccaaaaggaagtggtggtcctcttatttagaatccacttatctatttgctttcaaaatgaccctaattgcttgcttaaaaatacttctacgtgcagcaaaattggcatttgcaaaattaagcgaaacaactttgttatatttaaagggaacattttgttgataaaatatacaatacaaagaaatttcataaaaatatgtggaaagagaaaaataactcgagattttaaaaatgtcattgaatgataagagaagatgtgtggaaaaagaaagatatttcaacattttaatttttttaggtaggttattacatcataagtaaattcaaattttaatacgaaaaatttaatggataaaatagaataacttatttcacgtgtctctccatgaggataatatttataaaataagtacttgaggatgattaatggaaaaagtagaaatccctaagaagtaggaggttttctttacttaatgtgataatatagacaaagttcaaatactttctaaaaataatatctctagtgatcgacattgttataggttgacgtaataaagcattaattcctgagtaattttcttatactgttaattgcttaaatcggttcttgagtatatgaaatccttattttattcctaatgcttttcaaatgtggcttttttgtctttgcatgactttatttttttttattatgtttattgagtttttcgcttttacaatttgatagtatcccgcattcatctattaacaaagtgtttattcttatgctcaatcactcaaaacttcacttcgcatctatgattgccacaaggcatgacacgaggcatacttttctcacatgacccatattcgcatactcaccatagttcactttgcttctaagttgccacatagcaggcatagttttgcaatgtggcccacattcacatgctcaccacacggcaattcactttacttttatgattaccacatggcatgagacatagcaaagttttagcccagactaattttcgtctactaatggagggtaagtttgggttagtggtacctgtttgaaatttttgattagacaaaaattcgtttggagtaaatgtgttatgagatttttgtgagataaaattaatttggggtaaatttgtgaaccaatttgagatttatttatttatttatggtattaacccaatttttatttttatgatcgtctaatatagtttatttggaattcttttctatgttatgtaccgatatttactcaatttgttaaaaaagaattagaatataaaaagattggagttatctttaatttactaaagtactcatgaaaactaaattactagataaagctcactcgtaagtatgccgcatggcttaatatcgtgcaagctttaccatatatatagatttgtaattacttttgaagtttctaagtgtttagtaatttcccaatactatatgtagttcccacaaaatctgtttatggtaactttgaatgagaaagttgattaataggttcagaaaattaatcaggaatctgaatagtgggttccaagttgcctgatctaacaatgctccttgcttccttccacgtgaagatacttgtttcctaactatgaatttccttgaaagtggccgcggtatcgttcatatgtcctttttgtcctttcagaatgtttatcagcgtttgttaggtgtttttgcaggacctccagcaattaaagtacgttaacttgagttactgcaagtcgctagttagtatgcctgacatttcatgtactccgtatctcaaggaattgaatctcatgaattgtaaaaaattgatagaagcacatcagtcaattgcatatcatgacaagttacaggtgttaaggttaacgggttgctctgaacttagtgtttttcccaatgtgctcaagtcaaaacatctccaaactctccatcttgatggttgcaaaaaattggaaaggttccctgatattccaaatgaacttgaagacttggaagagctttggttattagggactgctattaaagaacttccaccatcaatagaaaatcttgtctctttggagaacatgtttttagataattgcaagaacctggtaagtcttccatctagcatttacaagttacaaaaccttgaagacttggcacttcggggttgcacgaatttcacctggtttccaaaatacgaggattcagctaatccatgctcagagattggacttccaaatctgcgatcattaagacttgagggatgtaaactatctgaagtacagtttcttgaaaacctttcctgttttcccttcttgagacagttacggctaacagggaataatatcactagccttcccacaaccctcaataagcgtgctcatttgtcccatttgattgttgaacattgccatcaactacaggagattcccaaacttccaccaagtttcagctacctttatgcggaaggttgtgaatctctgaaaaataatggagatttaacttcacttcatcattttgtccgaagagggttgaccatggctgatacttactcaagtggcgaggtttctctctctctctctctttctctctctcacacacacacacgaatcgatgtggagaatatgttggatccagtgagcacttgtattgtacaaaagcgaaatgcaagatcggaggcttaagaaaagtcaagaaatataaagtgattccgcacatatatgcatgtaattgagttggctaccattcctttctaggaataatttgtattacatgagatttgtatgttaatgcaagtaaagattaatggataatttatagagatctagtttgaagtggaattcactggaactacttactaaactcaaattggtaatattctatctgagcgttaataacaactttgggtactttctaactgtttttttggttatgactggggttgaaaacagatgcctcacgatttcaacattattctctctggaggagagatgccaaagtgggtcttccctattgaagagggttccatatctttcatggcttctaaggatttgtacgataagtttcttgccttggctctttgtttcgttctctgtaatgatgaattgaaagaggaaactttggttgtatctcatgttaatgggaaaaggctggatcactctgtacatacttcatatacatcggattcagatcctatctcgcttgagtatctcataccatgcgacccgtggggagaagttgattttagtcaaattgatgggagtcttgtacaatttagcagtaaagtatcaagtacaagagtgaaaaagtggggattgcgaatactatgcaaatcactagaggaccatttaaaagttatacttcaagacaatcagctaatggatccagctttactctatgaggtttgttatgaatcaacagagctagaagccgagagttcacttatgcacgaagatagttcaatggaaatagatctacacaaagactcacaagattgtcaaatgagtacgaatgatttaaaggtggattttcgagataaacagcttatagatctagcttcactctacgaagttggtcatgaatcaacaaattcaatagctgagagttcactcatgcacgaagataatttgagcgaagcagatctacatgaggacttgcaagattgtcaagtgagtggtgaggaacaaagtcaaatagtaccaaaggaaaatcctgagcttttctcccttgaggcatgcaaaccaagaccatggggacttctaattcgattgacagagatgtgtatggcagtgtttgctcgctgcttttgttgttagg

SEQ ID NO: 10202 - DNA, 1778 bp, Eucalyptus grandis
  Intron number 6 from transcript Egrandis_v1_0.006964m (loc us Egrandis_v1_0.006964m.g) derived from phytozome v7.0 (c hr-ID scaffold_2; pos 18420737 to 18422514 reverse strand)
cctttcgcttacctaagttcactgtgagttgctcaattcattgtatccccactgaaagggttcataattctagatttggtagaaacaaaaagaaacagcgagaataagacaaagacttgtcctatataactttatgctcataatttggtcacaaagatgtgttctatataactttaaagtttatgctcataatttggtcaagattaattgtttggggggagagagagagataaagagagaagagacagagagtaatagcattgcgctcgtactttggaaataaaaataacttcaataaaaaataacaattttgaatattagaattcacaaaacttagcctttctttacgacagataaatgatgtatatatgaaaatgatcacttccacaagcttaataagtccattctcgatcaattgtttaaggaacttgatttttccctatacataggaaattttgaaattttaaaatcagaagtgtatttgctgaaaataatataatgaagcttagtgaggaaggaaatggacaactcatggttgacacattagagaaatgtggacattaaaaatttaagaagcattcttaatggaaaattaaaaagagacatagtaagagtaatgttgaaggaaatagattgttgagcattagaattttcacaaagtcgatatgtgtccccactaaaggattccacttgaatagaaaatgaaaatcgaaatgtatacatgtcatgaaagcaacgtaaacataattattgaaatgaaggattctactgctctgggttgccattgggtttggtgagtgacgtctgtccacccttaatatttctcttatatgatatctgttgatgtagatttttcaattgtgactagtggaaaagtagtgatggtcatcatactagttaatgtcaactgttgcaactttggtgcttctcctcaatgttattgcagcgaaatgcacaatttgattgtctgatccgtttctgtatgttcaatacaataacagagagattacacttactagacagttatagcaagttaaatggcatttacatggatttagtgtttaggctttagggtagtggccttctttttccagttttatttcatatttttctttcttgcgaacattcttggtcagttttaaggacatgacataaacatgctggaccattaggctctgtgttttctgaagggtaatctattgtttccaataacgtatgtatattaacaatgcttacagatacaaacttatgggattcttgacaaggaggtttacgggacctcactcataaaatcagagttaggaatgttaatgtgattatcatgatgaggagattgcagaagggaaacatcaatgttcacttctttcttttgcatggtgttgcttcaaaaggacttttttccattttgctgtagttcttgtcatcagtgtctttgagttataggggtttaatttcatgaattctactgagaacacctagatttaccactgagctatattgccaaactacacaaagattacttgaacatgatgacaatgtcaacttccaaggacctttttcatgttcaaactcaaaccatcattcagtcgctgagccgtgcgtttttcagtgaattctaggcatgacttttcaaccagtactctgtctcttgaccgctatctctcatctggtttatcttaggtcaagcttgctagtcatgacttttcaaccagtattctttgtctcttgacctctatctctcatctggtttatcttaggtcaagcttgctgtccagtac

SEQ ID NO: 10203 - DNA, 3777 bp, Eucalyptus grandis
  Intron number 1 from transcript Egrandis_v1_0.034951m (loc us Egrandis_v1_0.034951m.g) derived from phytozome v7.0 (c hr-ID scaffold_1; pos 30758459 to 30762235)
agttcttgaagaagctgactgataaagctgttgaggtatgaatatctgtgcttgaatatgtcaagactttcctgctgcgaaattcttctagagtttaaatcttctcaaataattgatgccttatgcgattgatggatggattatgatgaaaacgtgagaaagcaagttgtcactgttatttgcgagtggggtttacttgacttttgttcagcctaatgttcaccttctgttgaatagaactattctattcttctcttttgaaaagactaaaagaaaccatttatacctgttcatactgttcttcaatagcaagcaatcgttcgatcatactcataccaaatgtttgatcccgctcagttaagtcttcacaacctgcagatagcattatttgtctactgcgtttttcatttggtttaactggcaaatcaagaataaattccagcgggtcctttctaatgaagagttgtcctagtaacaagtattaaaaaggtgctatggcctcgttccccctttagtttttttttttttttttatgttttcatcattgcaaatcaagctgtacaagctagacatgcaccagaagaatgttgtctcgttttagtagaaattagtcctctgctgctgctgtgttctttttttagaattccttgttcataatatggaatgtgttctttgctagaaagttgtgagttcattggtacacttcaatctggattgctttctatattttgccccttgatgagcttgtaattgtcagtaaaccgatatggttgtgcggccattggaagagtttttttttatgctcctttctagaaactgctgtcttctatcggttggggttagttgtttgaaacatgataggcaagctacaatttttgatttggttgtgtgtatacccaatcgtgatttgttcatttctttttgcgcctctttcgatttgatttgtgtaaatgaggtgtatatgtaatgcatgaatgttatatagtctcaatgtaagacatgaagaatcagcattgtttgtatcactgtgcttgctgccatctatgattgtctagctcgccacgaatatacatgttacattgtggtcaccttgttgtgtttgttgagaattgcgtcaattctttgtgtgttgcttcaattcatgacgatttgtcatcaaataatcacaatttatagtctcatgggttcttttacaattctgattgcatgctggaatttgtggattaagcattgattagatggacatacatgtagcaagatgtcatttggtcgctcaaaaacacttacaaagtctgttgattctgcagtaactgttttagaatgatttgctgttctgacttactgtgattttctgttttaactggactaagctagtagatgatgttattagggtttaatgtcttctagatatttgtaatagacttttcaagcgattcatagacatataatacgtgcgatttggccaccatttgccctgcctgatgcttcttgcaaagagcactaatctgctgatgtgttctgcttgttataatctgatctgaccacttatacaaatggctttacttgaggctagtttggttatggattgatgccattttgatcaagtagactcatacgtgcttgtgagaagatatagcttcaattcatgacgatttgtcatcaaataatcacaatttatagtctcatgtgctcttttacaattctgattgcatgctggaatttgtggattaagcattgattagatggacatacatgtagcatgaacacgttcaatgatgcatattgttttgtgaatgatcttttgtcacctaattcatttgcttgattgattgagaaccaaggttatatgacttgaatgtctgtcatattatatgccttgcatgtgatcatttgatgaatggttttggtgtgacacatatcaatgctgaactttaggatatcactcgaaacttgattccgtattgtacttcttttaaacaattgtttttgatacgatgtattgtttttggttgcttgatgtgtttgattgtttcttttatttgtacgcacctagttataggttttcttagattagatttagattagaacctcgaaggtgtaaggcgtgaagatggtgaaggtcgatgtccattccgaccattgtcatgtactttttgttttcccgatatatgtctcgggttctatgcattgtataaaacccgacgagttgcgggtttcctttctttctcgattgttttcttttttatattctttagaattgcatgattaggtttattgttttctattgattgtttacttcatgtcttgtgctttcaatttcattgattgtttcctttttttttttttttttagaaatagaatagaatgaaataaatctgctacgcatgatcacttagtttaggaattgatgatcctaaaaaaatgtaaaaaaaaaacgcatggacatgttaggaacaacacaacatgctgtttaggtaccgaaagggcgttaatagcaatattagcgtaacccaagtccccgaacctggatatctggttgcgtaggaatcgagggaacactcccgaccctcgattgggtttctagccgacccccaaagttgaggctagtggcgactcccgtctatttttaggttgtcataaataagtagatcgtataaataaatccgttgtcacgcggggtatgagtttcgatgaaactcactatggtttagcatactcgatgtgggggtagcccaaaggatgaagtgatgccatcctaatgggtggagcgtactatcgagagggctaccatggtaaaagtacccttagattcgatatccacattcgactcccttttttaggtgtgtcgcttatgtgggtatggatcgcgacattccgctgtcacgcggggtacgagcttgggagagctcgcgatctcgtagagggaactcatgagaggcttgatccaaaaggcgaggtgatgacgttgtttggaatgcaagccgtgagggaactttcgtgatcatgtacccctaaacccgacctttcccaaccttggataccatttcgaggggcggcaagatcgggtcgcgacaggcttggcgactccgctggggactggttactaggttaagaggacttgaagccgtttaaaaatggttgttgtgttttaactgacatgtctcttgaaggatcgtctgcatgtcaaagtcacgtggaaaatcaggttagtcgctaattttttgttaaatggttttgtaggtgggagttataaggggaggcgtgcttgtaaaccatttgttttgcaggtggtgtaaggatgaatgaatgtatgtgggtttatattgaagtgctggatgtttaaatttaaatgcatgtttaccagctttagcacgacaccgcacacacaaccgcggtctaaaaccccgatcgcccaatttaggaccttaggagggtttatgggtggaatctgcgagtggatgctcgtggtaatccattacttacataaacccgctcattccaaccgataaaaatagcactgaccgacgatagtagcggtgggtaaactatttttatcctttggaatgaggaccttgagcctttagtaccctcaccttaggcgtcaaaacctcacaagtttcatgcgacatgtgatttctgcttgccatgtgtttggtgggtaagtgatcgttccttttttatcgtccttatctttttacttttcatatttcaattgtgcgttttatattccaacgacgatatgtttaatcatgagtgcccctttaggtttaggcttag

SEQ ID NO: 10204 - DNA, 1438 bp, Eucalyptus grandis
  Intron number 2 from transcript Egrandis_v1_0.051050m (loc us Egrandis_v1_0.051050m.g) derived from phytozome v7.0 (c hr-ID scaffold_4; pos 35371820 to 35373257)
ctttcagactgcaggttgagaagcgccttcaacaggttgttcgcctcttgtttactattcattatctgcattattttccagaaaataaaatttgaagaatatctcttatagggttttttacttgtattggagaaagacatcggctgttccaatcattaatgaagaccaatacttgcatataatatcaatggatatttcattcatttgtagaatggaactatccttcactattgaaaagattttgtgttctagtttcagtatggttacaactcaagaaccatggttgtgaatcaaatttttctcctcttcagtctctcaaaaagcttatcctttcagtttcagctgttgtctatgctcagtactggagtgtattccaacaaattcttcttgatgactattatcatcatcgtcatagtcaaacttggtatttatttggggagtgcaagctacttcctttcttttgactctgcagtttgctcttgcgtgtattcacaggacaaacgcggtggttagaattcacctttgtgctttaatactgagttttcaagtatgcagagtagaatgtggttgatcaatcacctgactcaaggcttaagagcttataaacctttatttgtgctagcacgtgtagatgttgcatttcttcttctatttagttctgttacctttctgttgtccttttaaagtttgaatagaattatcatctccaccctcataaagtcaactgccttcctctttaggagttgttttttactgagggtaactccccaaaacggaggagttatgttttggagctgtgcctcccaaaacaagagctgagaaagtatttcatatttctttctttgcgagtggtctgattttctcttcattctctgaatatatctaggccccacaatgccggattttgggaaacccttggactgcactggaatacatcagtctatgataaacaaccttaaaaattgattttttttttttttttcaaatggttacaggtagattttcgggaagcaaatgacattatcaattttatttgcatcgaaaggatgtcaactaattttctgcatatggactgctgaatttctccatagtccatttttggttcttcttttcttttatttttgatctctcttggggggtgaggggatggtgctgtctcatatcatgctgcctgtaacttgcatattttgtcttggcggagaggattgtctttagtatgacaaaaatgatagtttaccttatgatgagcaaaattacatccgaaatgcatagcctttatgccacattttttaacatttcttcacaattgaaattctgttaggatcctgtcagggaatttcggtgccaatgcatccatttgtcattatactagtctgaattttgttggatgttatcctctgtaggctcaagaaaggaaggcaaccttaagaaaggtccc

SEQ ID NO: 10205 - DNA, 1841 bp, Eucalyptus grandis
  Intron number 6 from transcript Egrandis_v1_0.017278m (loc us Egrandis_v1_0.017278m.g) derived from phytozome v7.0 (c hr-ID scaffold_5; pos 18693681 to 18695521)
tacttaagttaatcagctcattttcatccaaatcggtatgccattttccttatcagtctagaggaattatttaaagcatacatcactgtaatttgcattgtcagcattagttggttgttcttgaaatagcttgaggaacaactggttgggggagaatcatatagtagagaagtggtctttgctcatttgggtcagtggtatatttaccttatgcagctgtatagtggcctaatgacttgtgcagaaaatcctagggaaagaacactgtgttaaaagactacagaaaatgatgagtatgtggggctgaccactatcagcaaatgaataatggcctttggtggaggggaaaaaggaggctatgcaggacttaggccataacttgttgcctaaagcatgaagtggcaaaattttaaaaatggtcaagataaattatttggtggatattattgatatgatgagaggaaatacattgtcactagcttgcttgtgcattgcatggttttttagtttaaaatttaattagaaatacatttcacatataagataatgcagaatcaactatattgccatgcactgggttgtagcgaaaaaaatataatatgttcattaagtattttttgttatcttccagttctcctatgaatgttttcctgagttattttccttattcagataggcataaattagtcatgaatatttgattatgtattactatgaaatgtcatatgtaagaaagatctggtgataactgttataataaatgattttttatttgctgattttgttttttggtgaagtcatgtgttgcttgctaataaatatcaatttctcttctggctaatgaaatgaattcatgcatatagaatttgcaggtgaaacatttttttttaatatagtaacatcttgcactccataaaaatggtttagcacattattaagaataattagcatgagtttatagttaaaaaacaaaatacgaccaactctcaaataagcttttttgatagaaaaggcaaagccttaattcagtgaatgatgactgattagatagataaaggcagcatttatataccttagaagaatgtgtgaatttaaattactatattcaacctatatgaaaataatattgctactgttgtgtatacctaatgaaatactctttgtatgtatattatgaatcatgacagatttacatatattctgtaaaaaaaaaagactcctctaattaatgttttaatttcttaaatatgctgaagtctcgttttattacttacaaaatttttaaacttttatttggtagaagaaaggctcctctcattaaattaaatgcattaaatgtccaaaaatcaatttatgagatcagattagatgtcctgtgctttttacagtgaccttttggctgcacttctgtgcttgggtttggcagggtcttctatcatattgtcgtggctgacattcttatagcagttcataagttagaattcccttatagcagggtctcctagaaattggatctttcaaaagtcaggcattttatgtctaaattaacgtgcacggcatttgtgtccatctgacagcttcagctagaaatgaaaaccttcaattttggttattttgtgcattaacctatggttctcctttccattaacttaatgtttctctttatcatgaatgactcagccattaaggattctgttgaaatcctgccaaaggaactgccaatcagtggtcaaaatacctttttcctttgcgtattctgttgagagtctatgatattatccctagccaggtttagtaaatgaatgcactctcttggttgttatggcagatttttgagggag

SEQ ID NO: 10206 - DNA, 2754 bp, Eucalyptus grandis
  Intron number 1 from transcript Egrandis_v1_0.037412m (loc us Egrandis_v1_0.037412m.g) derived from phytozome v7.0 (c hr-ID scaffold_10; pos 20195816 to 20198569 reverse strand )
aagtgagtgttgcgctgtcttttccctgttttccgtacccatatgttgtcgatgcttgttcggatttattgcttcgtgtttgcttagtaatctttaccgtggaattgaaatgtttggagtgatggtagcaatttaaggcacaggggatggttttcttgtttccattaagtttgtagcgcttgaaggcacaagtgatatcaatgccgaaatgccactgtgtgtgggggtttgtgaagggcttaatattttcactcaactgtcttgttctttcaatgggacatttgagtactcctgtagtcccttgatacagattaacataaggattatgggctcattgggtagtgacgattatgcctaatgattatcggttgtgaagggcttaattattgagctatttgttgtggctgcagcttttagtagagatatttaataaaaatcaagaattcatgggtgatgtaatgactagaaacagcaaactgtctcttcagttcattggtttatctgtgtcatcagggttggcacgttaggatctctgaagacttcacgttttttttaccccaacaacttagtttgatattcattttcttatttctggtgttcaaacctacaaataattgggtgagaataactcaaactaatgaagtgatcttggaagaattaccatttatgaaatttgaccataactttgctaaggaatagcctaccactttggtttaggttatcagtttctcaattttgcttatgaagaataggttgcgccagtaactacaattaattgtatgctttggctgatcatagtctatctatttaaggccttgttaaaatgtttgtgttgttgtattgtgaattcactgaattatgctacttgtgattgctctacttatttgttgacaccccattttttgaaggaacaaaccttgttaaactatgcaaggcagtcaagttagagtgtatagggattcctattcccaaagaaaagcccttttagaggctatgctcagactaagctggactttctttattgctacaatgtgatttgtattaggcattctagttgcctcttcccaaggatcagtaccaatgctttgtttgggaaggaggggaggggaaggaaaattggggtaaagtttgaaactttggcgcagagaggacagaaatttaaattttctttccattttcatcccatccttgccttctaaacgaagtataagaatgatagactggagaggataaagcagggcaggtaaggttgtcaatttggaatagatggtaagatatgctcaatgatagttgctcctgtcctggggttatatgtgttaatgcttggggtggttgtggatctagagtagcagaagcaactcctggtttagattgtctcaaaactatgatgacgtgtagctttccccgaattctagacaaggcatttcataaattttatcgacaaagtccttattggttgcttctttgttggttgtattgagtgccaaaatctagtcatgcaatctagtcctaaaagatctcctttctagatcaaatccctgagacttctgagtaggttgatctaatggtatttctgttatgagtgattggaaggagaggaattaaattgataacttttggggttagcttgatctcaaggccggtttcaagcaggagtagaataattttgtttctgcaggattctggtttagattccattttcaccaaggtgccatactctattggcttgccatagtcttcacaactcagccagaaaaaaagtagtaccatgttcattcgtctcgtgtgttcttctcactcactgaattttggcatataatgatcatacaagacaattgcatgctgttttccccggtctccctgcagtaatgtatttaaaattccttcctgtccataacagtgtcatttgaccagataaattgcgtttgatagcacaatacttttctttctggttggagaacatgttccttcttttcatcagcacttgaaacctatcttattctatggatactgcaaatatgacttattggcttgtcaatgcttaagactggcttagagcattatctaactctccttggagaattatatgcaaatactctggggatgtttctttatcgctattggtacttgagttagtctaaactgacaagatggtatccaacaaaaattgtcttgaggtcatcgtcaaagtacttgaatgttcttacggctgtgaacatcatcatttaggactggttattaagtagatgggatttgatggcatctgttgtttgccttatgtatgtacatgcattttacattgaccttcaggctcatcatgcaactatggtctcatgaccagcaaattgagcattgtcttctaattttaccatggttaactgagattaaaggtagatatatttattgaccagttggttttgttgtttggctggccaataagtccgattcgaggagagcagagtttccccatgtattatttattcctcatctgatcattaccatcttgcttggattaccgttattgttaaggcctttgatggagttaaacatgcattccttctctagtgagtagtaagagaattcagtgtgcaaatgctatcgctgttgtagttcgtgtgtgctacgtttcgttcgttaatgccttcttcttttcccacatacagcatatctgtaaaaccagaacctacctcattaatttgatcctctcgttgcttgccagatacttgtacagaggcttgtctacaggggatcgcc

SEQ ID NO: 10207 - DNA, 7705 bp, Eucalyptus grandis
  Intron number 2 from transcript Egrandis_v1_0.012690m (loc us Egrandis_v1_0.008019m.g) derived from phytozome v7.0 (c hr-ID scaffold_1; pos 10057676 to 10065380 reverse strand)
gggtgccaggtttttatctctctctaacttataatgggaaaaagaaattgacatttcgagtatcaactatcgattctgattctctggttttgctttgactaggttctgttgttgatgatgttgttgtgggaatggagatgtatatgacgcctaatatcaatctaatagtaccataggcagccaaagccctagtgtgtcgctaacaccagattgctcgctttggtcttgactcacccgtgccctttatggcttcaaattgcattcttttttctaatggtgaggcctgtctactggtgcaactagacaatgtaagagtttttcctaatgtggactaaattaattgatattgtaatttattgtttttacggttaccgtaaaacagggctggtctaaggtgagatagaaggtttcttaattagtctaatatgggctggctagtgtgggccgagttgagcctggcccgtaatgagagggactggctggaaactctataaatagtgctcaagtctctcctctaaccctaattctcacatgtatcctcacctaaggggcgtttacctaacgctgcacgtgaggaggccgcctcattgagccagtgatacggagggcaatagaggagaaggacttgatgcgtggatccccttgatatatgtgggtaatccttttatgcttccgctttatgttcgatggatcccaaatcaggtgcgttaatctttctactcaattacgttcttgttctggttatggagatcttgggattgcgcaatttgtgtctaacatgtggtatcagagcaaccataacccaagaactcgaacgcaattggttttgccctaatttgtacggattagccccaattagtgcggatcttgccctaatttgcgattttcgagactttttgttcaataaaaattaaattaaattatatattcggactgagctcgacgaggcgaagaaaaccatgggcggcgcgtcaccggaggaggctgcacgcgcccccacgcgcggccacgcgcctcctgcgcgtcgaacacgcgccgcgcactcaggcggcgcgtgcgggcgcgtggaggctctgtttggcgcgtgtctggcggtgttggactcgtatggtgatttcctatgtcgtgatatatttatttgatatgtttgatgattttatggatgtgaaaatacatacggaaccctaaatacgtgtatttttgcgtatttttcttatattttctgtgattttggaaatataagtgttgggttatacgtatattatcacataatcattataaaggtgtgattcatcaataaaaatcaaactttattgtgaactgaagctggcttaatgagattcaatcattatgagatagtaattgaatatatcttgagataatgagaaacagtaaaagtcatgaaatttttattgctcatgcatactcttttacacgctggtaatctttgaatgatagacgtcttaagaactcgtgaccaaactgattgtactaattaacatatctgctgtatgtgggtaatgcatgtcaattaaattactgcatattgtacatgaactcatctggtcacttgttaatgtctatcaagttgaatatttttatggtaaaggagtatggcaatatttacgcagagcaatagtatctactgttaaattttagatatttggttctctggtttgactcaattaataggccactggttgattacaatcataatttgttgcttaaaattggctaataaatcagatgttggccttggagtcatgttttgccgtatgaaattcatgagcaatagtgcttgttgatttggtgtaccctatattactattgatgttaatttgtgagagatattttagatcagcattatttttatgttgttctggtaatatgtaatcagggtgcataagagatgttttattctttgttatgagaagtttcttgtgttactgtaatcaatgatctcattagaatctgtcaaaacaggttcgctagagatgttttagattttggtgatatgctgcccctatcactaaagttaaaatcacatgtatatggtgtatgtgatgagtaaagtttatatccctggtatgagagaatttcaatgattcaattgagtagtgaccgccaaagtggcacgcttgattgggtttgagaaatttcggtctcgtatgatgattgggatgtctcctgatctaatgcgtggtcatactcccaaaggaggtgattgtgtattagttcatggagggatacatgatagtgtggtggaggagtgaccaatcataatggttcatatgcccaaaggtgatgaattcacgaagattggaatatattctcataacccttatcatgtggggagtatacaactgcatgtcatgtattatgcccaaatgtgattatatgattatgcatgtaactctttggatgtgtacttgtacgtcaagttacatagtactcatatgatgctaattatatatatattgcttggttttcagtcacattttctgtaattaataactccactattattgagatttttattgcttaaaattttaagttatggacatatgatttgttgcttgagaaataagcaattgaatttgcttactgtccatgaagcgttccattctagaacacttgaaaagaggtttgcctacggactgcactgctataagatgatggaagccttaattgcttgaaattatgtcttgtctgatattgaaattaggacacatatgcaaagattgtgtttaaatcctaatgacatatacatctcgtatatggttaaaaggttatttccgaaagttttctatttaaagaaattgattgagataaagaataaactggttcaaattagtcttgaaggttgtcaggcctaatagtagcagtaagtattttgacaaatatgacaatactaaattgcttaaagggtcatttgtcaaatatttggtaaattctatggtggtaatttaattactatatctgaaaatcctgacaaaaagatttggctgaaatgcataaatgcaccatgttaaacatggtgatgagtatgatggatgttactgtatctttatctttgcctatataaacaattgtggtacagacaattgtggaatctcctgtaccatagactaaacttattgaggtttaaggtaccattcttgatatagtttataatgaaatttcttaaacctctcaagtgcagaatgaagtgattgcagctttattaaagagatttgttaaggaaagacgatcagttataccatcagactatataatctatttgtgagagcatgattacaatatccactatatggttgatgtaatgatatatttttaaatgtcgtttcttattctcaatcaagtatgtgattagatgccataaaaggccatatacaatctatgaaatatcatagtgtttggaaactaacttacttgcctaaagattacaagttcattagttgcaaattggcgtacaaaattaaaagaatttcaaagaaagattgtggaatttaaagccaaattggtaactaaagttttcactctgaaagaggggtggattgtttatagtgaagaaataaatatttctttctagtattttttttttaaaaagattctttcagagtgaatgtggcattaataatttattttgatatggagttacaccaaatagatacaaaatttatatagtgcaattggatgattttatagcagatttaggtaaacttgtatgtagactgaaaagttctaattcatggtcttaagtaattttccagacaatattattaaagtttcatagtgttattattttgttcaattaaggacaaagtaattcaatatactgcaaggtcagtgggaggaaatttattttttctcatactttatgtacatgatgttttgcttacaagttgtgatctcgagacatcttatatcatttgtactgaggtctgtaagaattgtttttgccatattatattagattttctcggaggacatttgctgattgtatattgaaaatattcaatatacatcattgcaagccaggaattgctcctgttgttaagggtgatggattaaatcgatcacattgtccttatttagatattgagaaaatctaattaaatggtgtaccttatgtcagtgcacttaaaagtataatgtatgctcgaatttgcactagactaaatgttgtctttgtgacgggacttctaggcagatatcaatcaaatccaagacgcaatcactgggttgctgtcaagaagatttaaaggtacttaaagaagacaagagattatatgctaattatagatatgttcaattcttgtagttagtagagtatttagatgtaaactttgctggctgttctgatgacatgcaatcaataatagaatacatatttatgttagcagtaagtgcagtaaataaagttttatgtcatcttctactatgtaagcagtgttagtaacattcttttaggctgttacttgggcttttaagctctagaacctcatgaaaggagttgattgttttaactttatggatagacccatacggttgtattgagataacaaatttgtagtattatttatttactacagaggtctcaaggggtctaaatatatggtgatcaaatattttttaccataaagaaacggtacagaaatgtgacttataatataatatatatttcacagatgatgtgattgtagatccactaactaaaggcctacgctcgtgtgtatttgagtgacatattgttagcatgggcctatgagcatcatgagatgctgttgtttaatgggagctattttggttttactctgataagggtttcatctgtgttcgttacattttgtaacggtttgatatgtatcaacttttgcattcaataaaatatttttgaatgtgttattattatgttgaatacatattgataaagtctcaagggattatataaaccttgagtgaaggctaggggcatccgggcatccagttattagccttgtgcatatgtcttgtgatacataaagaaaggttaaccataagaacaagacatatgtgggttcattggaaccataaagcattctcttgtggcacaagtttttgtgacacctaaggtaagagaatggtgactgacaaatgtgatctctctatgagagacgttatccatttgacacactaccatattgaatccatatcaataaagttgagaacattcgtgaccatggaaggctctgtgtgtatacatgcagttaccgccatgattcggtgtttaagactttatgggataggattgactattaagaattatctctagaccaaatgtgcgcacatacggtacgatttcaattaatatagttcaagtgggagaatgtaagagtttttcctaatgtggactaaattaattgatattgtaatttactgtttttacggttaccgtaaaacagggttggtctaaggtgagatagaaggtttcttaattagtctaatatgggctggctagtgtgggccgagttgagcctggcccgtaatgagagggactggctggaaactctataaatagtgctcaagtctctcctctaaccataattctcacatgtatcctcacctaaggggcgtttacctaacgctgcacatgagggagccgcctcattgagccagtgatacggagggcaatagaggagaaggacttgatgtgtggatcctcttgatatatgtgggtaatccttttatgcttccgctttatgttcgatggatcctaaattaggtgtgttaatctttctactcaattacgttcttgttctggttatggagatcttgggattgcgcaatttgtgtctaacagacaagtgtaatgtgggatgagagatttctcgacgcacaacagatggagtcacgttgagttgcgagatgcgccagattgctttctttagctgagagggtatctacatcatgcacaagtttctcaatcagtctttcagtgttttgtttcgtatctatcctttccttgccattctctgcctgtggtttattagaaaatgtttggggttcagtcatagatcacgtcatcagtttctggtatgagatgaccaagaagaacaagtgagatgaccacatttcacaaacaggagttttgccatattcatggccggcatattatttttgccgtacatgttatatagcaaacctcgaattatcttcttgtggtttcattataccccgtagcaaacatgcggtaggttacattaaattaaagcagcaaatagcacgcaatgaaaattagggaatctattatataaaggaaaattgtctaaattttttaattttgctaattcaattctaaacctttttaattctttccaattgagtctatccagccaattttggccgaaaaatgctgacgtggataccagtggtgccacgtaggacctttggcactaatgaatttttaataatattttattttatttttttccatttttttctttcttttctttcttttctttcttttctttttggctttcttcttttgccttttccgatggtcggttgaccacaggcaacagctggccactagacacagccagccagttggcctcacccgccacaggcgaggcccgacctagtgagggctagccccgaggagggaggccctcgcctaggcgtgacccagcaagggtcacctaggcgactttgacctatgcccaggttagggtggcctcacctatcatcgccgttgcccgatagatgctcgccgaggccgccttggcctaggtgaggctgatcctcgcctaggcttggccggcctcgcttggtgttgccgttgctcaaccaacactcaacaaggccgccctagcctgagtgagggctagtctcaccaaatctggtttgggcgaggctaacacttgcctaggcgagggtgagcctcagtgaggccggcccttgcctaggtcaaggcagccgtgcctggtgtcactgttgcccggccgatgcttggtgaggccgccctagccttggcacaggtcggcctcgcctaggcgacccttgccgggccgcgcctaggcgagggctcccctcctcggtgctagccctcgcccagccgagcctcgcttgtggcaggtgaggccaatcggctggctatggctggtggccaactgtcgcctgtggccagccggccattggataaggcaaaaaaagccaaaaagaaaagaaagaaaagaaatttaaaaaaaaaaaagagagggaaaaaacagaaaaaataataataattcaaaaaaatattaaaatattattaaaaattatccatgttaatgttagtggtcctacatagcaccatcggcatccatgttagcattttccagtcaaaattagccaaattgactcaattggtaagaagtgaaaatgtttaggattgaattagcaaaattaaaaggtttatgattgaattggcaaaagtgcaataggtttagcactttttggacaattttctcattatataacagcacaaaacttctaactttccacgagctgaatatctgtgatttggtaacttttaacaggcggtggtaagtttttggaatgtcttagcagtttgatgttcttaaattccattattttgtcataactttagatagaaggatagtcagattatcaggaggatgtgcggcttgtgttccatgctcattgacactagtcatttggttgcagg

SEQ ID NO: 10208 - DNA, 1520 bp, Eucalyptus grandis
  Intron number 1 from transcript Egrandis_v1_0.011975m (loc us Egrandis_v1_0.011975m.g) derived from phytozome v7.0 (c hr-ID scaffold_9; pos 208674 to 210193 reverse strand)
accctgtcttgacgccgatatttgggctaagcttggtattcttcttcttccatttcttttcccagtttattccatggagcatgttgtacttgttgaagatttcatttttaccctctgttcacttcaatagcatgccgtgattgttccccggccttgcgacaatggaacccattattgtctattgaaattgaatagggaacaaaaaaaaagaaaaaaaaaaggaatcctcttttccgtcagttgccaaggctgatcctttcatggtttaattgggtatcagtctttgtgggatatctgtctgtaatgaagaatgaactgcgtagtgccgtataatcgcgtgtgttttctgggttgtcatgcgactcatcattctctttcacatgccctccgaaagaaagcttacagacataaagggaatgtgggttaagtggaaccaaaggctcattgaaagtaccaccgagatggtagtcggaatcaaggaaagtgacactggttaactgcccacgcttattcatgggctccgagttattggcactttgctttatcaccacatctatttttgtctcgagaatatgatcaagagtccgaacagatagtcgtttgagttaagctagcgaaagaagaggaagagctacaagcatagccaagagagcaagcccacttaataggatggagcaaatgaacttttctaaacttgagaagttgacacatcttgatttttaagcaacttagtcaacataccgttgagggaaagaaatttgcctagatgaggaggaaagctcactgacaaaacagaggaggagaattgaggagctgattcagagaaattgacattatcagctgaatgtcacctgagacctttggaaagtttacttattcactgttttctgtcagaaattttgaagggatgagctacataaacctcttatatatggaaactttttgtacctacggatttcaaatatctactcttctagcaccatggccctcaagtatgttttaggtgggcactttgatggggattctgtggaaagtctgctattgggcattattagtcaacttcttaacctcgcttgtggaaatgatttgtgccatagttgtgagaaaagcaagtttggcgctaatttactatgggaaacatctcttctccaaataggccaagctggaaaatgggacaaataattgtaggaattcgtgttaccacatgaaattgtccatagaattcttgtttagccataatgagaacttcgaatgagaatcaaattggagattgcagtcaagcaaaggtgctgcatcttggtatttaagatgctacttgaaaagccttggcgttcttaacttcaggccttttgagaagcgactcttgaatgtaaaagacccaattgaaaaaaatagtctgtttgacatttgtcatttacttacagagtatggtctctttatctgatgccagatgccagatttgacttgctctgttccaaattgcagttccagcagattcaaggtactcagttgttgacatt

SEQ ID NO: 10209 - DNA, 8324 bp, Eucalyptus grandis
  Intron number 2 from transcript Egrandis_v1_0.012303m (loc us Egrandis_v1_0.012303m.g) derived from phytozome v7.0 (c hr-ID scaffold_8; pos 30752926 to 30761249)
cgtactcaccgcaaataccgggtatatatcctaattctacatgctttgtctctttcaaacttaatgcctgatacatagtaacatgatgaaattacagtattggtttgcctggggaatgacaattttctacatgaatcttaggtgtgagatttccaggtttgactcaccctggattaattggaactgcaccatctaaggaactcctgaacatatggaacgacagggaaagagaggttcaagaaaatggactgcagacgttcaagctatgtgaggttttgcattcaaggccactagcaagcttaccatcaaccaaaggctccgtcctcggcaaggtacagtacagttaacttactcgtagcaatcgaagcaagcaatagaaagccattcatattaaagcatgcatatgataatctaatccgcaaaatggtcatttatgaactgcttacactgaagaccagtcctgacatcaaccatcctttagattaaacaaggcactcctgaatgggaaaggattgcaaaggaagctgcaagaacaactccgggaagagagaatgggggaaactgcgacatcaaaaatctaggaaggggttcaaagatatatctcccagtttttgtggaaggagcaaacctcagcactggcgatatgcacttctctcagggtgacggtgaaatctccttctgcggggcaatcgagatgagtggctttttggagctcaagtacagtgcatttctcacctcttcacaagacctaacattatagttcgatagaagcggtgattattgatttaaaagcgcaaaatagcttccccagcaatggtgaagaagcaaaattcataaactaactgaaaagtaacaaagtactctgttacagttaaaacagttgaaactccacttacttctgaagaaatttgtgttagtcacatggaatttgagacattggcaagcacaaattcttatagcttcggtattgaatgctcaagatccgatcacaatgctcttggcaaggactgatatctgcaggctcaggatttatagagcatctataacctatgggatttcatttcactgtttcgactgacctttttctttccaaatttactctcgttcatcgtgccaacacattaatgttaagtcttccttactttttgggtgctaaacggaattcttggcttcaacgtcaattaggtgcgaaatcatcagaggagggatgaaagaatacctgacaccaatggggccaactcccctgcatgtgaacccaatcttcgagataggaccagtggagccgagattttcagaatggctagtgtttgaagggatcagcgttgatgagagcggaaggcagcatttccttgatgccactgtcgcgtacaagcgagcagtactaaatgccatccactacctctccaaattcgggtactccaaggagcaggtttgcacatctctcatagaaacctaaatcacttctcagcacatgcctgggtcacggttaaatcttgcagtggttcccacttgggttccacatcattcaacggctgtgatcatgtgatgcatggtgaatcggatcaatacagaatgtgaaaaaaaaaaaaaaaaaaaggactaccaactgaaacccattcctcatatttaagcaatcttgtatagtctttctggcgtgactaacagaatcacacgtcctggcagatgtatcttctagtatcctgctgcccatgtgaaggaaggatatctggaattgtggattcccctaatgctgtagcaacacttgcaatccccactgccatctttgatcaggtacttctgtcagaaactaaggctgcgtttgtttgtatttctttttttggtttttaaacactttttctgtttttttgttcttttgttcccaggaacaaaaaagaaacagaaacaagaaacacaaattttgtgtttcttgtttctgaaacacaaatcagaaacacttttgaaatttttcttatttttcttcttattttctttcttttttctttcgccggtcgccggcctcggccatggccggcgaccggccaaaagaagaaaaaagaaaaaaggaaaaataagaaaaaaatagaaaaaataaaagaaataaaaaaattatacaaatttaccaaacgtgtttctatttattttttgttcccggaacaagtttaccaaacgcgtttttttgttcagaaattgttcccaggaacagaaacacttttttctatttctgttccctggaacaatttttaaacagaaacgcaaacaaacgcaccctaagctgctcctcattttaatgatcaactcagcacattctgataaaagaccgcattcagctagaatctacggatagttcgctcataaagtggctaatgacccaacaagtagaagctagatgagacatgctactccactggtacatattagatcgataaactaccaaataactttgatggctggatgtgtattcttttccatcttccaccacctttttatccatcaaagtacattcgatttccctgttcttctttttgctttagtcaaccataactaataccaccattgcacaaagtctatcttccctagagttttttcttgcctatcaatcggttatcagatctggatcactttcagaaggtccagatagcataccgtctaagaaagtctatttattgcaggatattcgtccgaagaacaagattccagtcgggcctcggctagtcaggaagccagatgtcctgaagtgcacttatgatgggaatctacctataacaaagaaccttagtgccactatgtagtcttcgctcaggtgtcgtagatcacaatagttaaggaaaacatatgtgcttgcacatcttcctattccacgtttacgaagtataagtattgtgaaagcaaacaatatgttactttggacaatacaatttgggtggcattcgacacttgagcttgagacgggagagagggagacagctgagatggctgggcaggggctcagcgacgtgacatgacaatcgcgggcggcacaaggaggagaagggctaagttgtacgcgttgggttgggttggttcggggtttaggataggtggattatcttggtagatagttttcgaatggcgagcagaggggtaaacttggaaaaagatgacaagaaatgaaattgcaaatctgtagattagattaaaatcataagtgatgttggatgcaaggaatgaaattgcaaaagcgattatggcttttgtaggttttcaaaaatatggagggtatttgattcgcgcataaaagttaggatggctttggaaattctcaaaaaaaaaatgttagaatcagtccaattgccatgaagaaagggtggagtagacatcattttccattatcactaaagtcggtaggtaaaactacaacctcaatgacaaattaccaataaaaaatagttccattaaacaagtacaataaggagtgaccacatctaatataatataattaaaagttaatatcatccaaaacctcaaaattgatagactccaaacaaaaattccggaaccgatacaatcttaaaaacgtcggcacaaatgccagcatagtcctaagattccgatcttcagggctcgctagtggggaaacaaatcaggattagacagaagcatctttccgtcgcaaaaggctaaggtgtggaacgaatgtgatcgtggcgagtttccatccgattgatcggagcaaaaggcttgtcgttcagcttttcacaagcactaaaagctttctggcatctcaagatgaacttgcaactaatcaggagggggttgcatcagcataaatgtgtacgatgttgaatcgaattcagacaaccgagtgaatcgactttagcgatgaagaaatgatgaagccttgtcgagtacatatcacccgaccatcttggtctttagcctatccttttctttggagagagaatcatggagagccaccaatgtcaaaaagtatcattgaataggtattcgattcgctaaagatgatgtcatctctaaaccctaaattttttttttcaattaaaaatggaaaatcttacgagttttgagatcaaacaatccctaaaagactgaatgctcatgatgtttccggtctatgttgcagatgaatcgaggaccccacgttttgtgcgatgattctaatatcactcgagtataaggcgacatttcataagatgagaataaagtgaatgatttaatgcagaacgggtttctccaaccatcaatttatcaatttgtttctttatttgatctagttattttgacgttgtccttgattaaggatatatgtttctactaaagtaccttatttagaattattttcctagtgttttattagggtttgcttctagacagcttatactttatgatttgattaatgaatatcgtgcatttgccctttcttctttcccacatgaaccggcgtttctctatttctcctccaactttcgctactttcttctcccctttcttgctatccgattttcttctctttctatatgattctaaacctatcttcaccgcgcacttcctttgttcgtcaattggtatcggaggtagaccgatttatcatcacaatcctcagtggcacattgtactgggccatcaaaaacctaccaatatataaaaatcagtgtagtggaagtgaaaagcctcagctcattgttgtggtggttgctgttggcggcatcgttgtccaatcgcatcgtcatggtacgtcgtgtcttgatagagcaaggtaggtggtggatgttcgctcgatgcagagtgacgacaattgatctcccatcatcgttttcccatcccaatctccatcggtatagagtggaccatccactcgtagagaaagaaaaatcaaacccttggaggtgtcaataatgtccctcaatatcttccacctaattctgcatatctaaagcacctcttcttgagtccttgtgccatctcctgcttaccaagacatagccacacttccatgaggttttggctccccaagtaatcttatcaattcttgaactgggagagaagacagaaatggctcaacgacatggtccgaggctggtcatcccaatagatgtgaagaagaagccccacgagcaggcgctccccctccacaaccggtggcacccggagatcccgccggtcgcggaagtccggaccggcgagttcttccgggtggagatggtggacttcagcggcggcgggatcacgcgcgagtataccatcgacgacatcaagcatgccaacatgtccatcgtgagttctcggaatttggctattaattttcccgttgcgtctctcgcttgttttcttatctgatcgaatttacgaagttcatcattataatgaggccttcatatgatgagagagagtggggaaattaaggaaaatagtaagtcattctacagttaggaacccctttaatcttcttttctcaagctgaatccgagtggatcattcccagagaggcatcccaagttcagaaaactcttcttcctgttggggttttcaggagagagcttggagtgtgaatatactaatttgacacaattgagacgcttggaacgttagttctgctggataatgacgaagtgataggtcccattttcgtcctgcgatgatttttccttgtggggaccgtcagagctgaaggaggagtaatacataactatgttgatgtgacctagtcgatctattatttaattcacgtaatatgtatccagactttcatattaagattttaaaaactcataatctcgtcatcaaagcgtttgtgatatttgaagggtcgatgtgactatgatgactggccattttttttaattttaccgtgcgtgtacatggctaatggcacaactattttctctaggaagttatttccgagttcctctctttcacatcccaaatcaagggaaaaggaagcctgagatcagcattaaacaaaatcctaacttacaatcaacggcaaaacccccgtgtcgtgcatccttttttttttgcagaaatgcaagcccttctcgcatgatttcgtgaggaatagcgtgagatcaaacctccattcacttcgagaaaaataaataatttaaaatattttcttaaaaataattatttatatcttttaaattaattaattaattaaagacattttttatcataatatttttatatttaaatattttcgtgaacgataaaaatagtttttgtttgtttatttctataaacgatgcacgtgatcatttttaggaaaatatttttttaattactcattttgtttcatgaaataaaggaagcctaaatgaatatgttttactattgccctgttattttccttcccaaagaactttcttcgtgtcttatccaatttgagaatgtactgcgacttagggtttctagggttgtctcaatgatgatttggggctgtaaataactaatgatgggattttggagggtaattgtgtcacttttagagcatacgaattgcatcacttgtcacagatgcaccgcgacattaaaaaaaatgcaacatcgaagtcacaaaggattttcaacatcgaaaacctactcacataaagtttaggatttgagtatttaacgcacctattaatgggttgacgttctctcttgtttgctccaaatacccaatacaatcagagaaatccagccttcccagtctcattattgaatacctatctcaagactaatttctcaaaaagctcaataccatggccattcttgcaatatccgctcacaaagttagggagaagaataatgggaatgccaaaattactgtacagcactcacttgagtgtcaacgccaatttatctcaccggaaaatccgacgtgacttcaccggcgtggacatggctttgcatctactaatgtaaacaattttttaatatttgtaatattttgtttttttaatttttttaattttttctgcttttttttttgttttgcttttttttctttagggtcggcaagggttgagcaaaaaaaaaaaaaaaacagaaatattcaaaaaaaaaatccatgtaatatgatttgtcggaattggcactcaagcaagcgccgtacgaaaattttgacaccaccactgttcttacccctacaaagttactaaaacagagatatagtactaaatgcaccaatatagttactgccgaattgaggaaattactgccgcggatactatccgcttttcagcacgggtcggacccgttttgtgaatatactaacttgacctaattgggattctttgcattatattattctgtgatgacaaaataaaggtggtccttttcaccctatggtgactttttccttggggggggaccatctgaaatggggtcactccagttttgtcatctcctgccaatcttagaggagtcaaacctcctctatcccgatgaatcacatacttcatctggtacaaaaagtctccccatcatcgcttctcaaattctaaactctctgcaactttttcatccacacccccatcaatggctcctcggaccccaagactagtagtgccaatagacctgaaaaagaagccatgggaccaaaaactgcctctccacaaccgctggcaccccgagatacctgcggtcgcagcggttacgagcggcgagttctttaggatagagatggtggactggactggaggggctataaaagatgatgactccgcactcgacgtgaaatctgtagatctctcaacagtaagtgccagccactcctaagaaagctaaagaacagtttccacctcttggattataaatcaggtgaagcaataaaaggacagctgaaaattaagggaggagtcgagactatgtgctatgagagactttcttaagggagctttttaagtcttgtgtatacctcggtagagttgttgatctggtcgtttacttctgatgcaggttcattacctgagtggaccgatcagagtcctggatacagatggaattcctgcgaagccgggtgatcttctcgctgtcgagatatgcaacctgggtcctctaccaggtgatgagtggggtttcacagcaacattcgacagagaaaatggaggcggatttctgacagatcatttcccaagtgcaaccaaagctatatggtattttgaaggaatctatgcatactcaccgcaaataccgggtatatcctaattctacatgctttatatctttcaaacctaatgcccgatgcgtagtagtatgctgaatatatcattggtttgcctggggaatgacaatttcctgcatgaatcttaggtgtgaggtttccaggtttgactcaccctggaata

SEQ ID NO: 10210 - DNA, 1005 bp, Eucalyptus grandis
  Intron number 7 from transcript Egrandis_v1_0.006358m (loc us Egrandis_v1_0.003806m.g) derived from phytozome v7.0 (c hr-ID scaffold_10; pos 3790712 to 3791716 reverse strand)
atcaagaaaagaaaaagattcttcctttccaggtaatagattctcaaaaggctgttctcacttataggtgctatatcaattctggaacaatcttttttgctttcaactttttagtgacgtttatagaaaaaataatccttgttcactaactggtctacatgttcaggctgcctcttatttatctgctcaagcataattggtgcagtgaccctgttgcgttctctcattgcttttgatatttgtgcgtaagatagatcagctagttgaattggcttgttggcatttgcagaatctcctagtatacgttgagaatacaagtgagccaagtttacagagaatgtttggcaatcactcaaagctgaatccttgtcaaccagcttttcaatcagggatattgtggctattgatagccattagccattaaagatactaaaacaataatgacacaagataagttgccagagggacctgtgcatgtgggatttattgacttcaacaattatttctcttacttctaacttttcatggtaccttacttgctcagtgtctttccatcgccttgaattagttgttagttatgtcaatgtaagtaaaaaggtgatctttttgttgcttcttgttgagattttattatctatatatttgttaattgtaactcctgacctagtatgtacctgtgtgatgtgagtcaccaatagatctcactcgaatctatactcccctatgttctctttttctttctcttaacaaactttctaattttttttcagtagttacagggctaacaagatttattggcatcgatatattcacatcctgtttgattgcagttgaacctagaattttagcctcagtgctcaacttactgttctattcactttgatatctatacaccttgatatctgattgagaatttcttattttgagatggttgcaagggctaattgaaacaggtcctaagatcaaagtttctgttgcagatcctcagtacgcgagctcgcaaaa

SEQ ID NO: 10211 - DNA, 1329 bp, Eucalyptus grandis
  Intron number 6 from transcript Egrandis_v1_0.011264m (loc us Egrandis_v1_0.011264m.g) derived from phytozome v7.0 (c hr-ID scaffold_11; pos 42308063 to 42309391)
cacttttcatcccagaaggctggtaaggttcccagttcatacttttagattttaacatggccattgctatatttggagcatcttgttatattcttctgcttgatattggtctccttaacctgatcattttgggttgatttatccacatgaatttggccaattccttattttggcttattttttcttactaaatctcacttgattatagtactgcaactagtttcgcttttagctcacaaaatataaatgaaatgtggatggaaatcacaagatctgaattatatttgagcccattttaacatcatcatgtcctctctttctctctctctgcctggacatagcaactctatagcaactttttaacatgtttggttccataaattaattggctgtcccaaacttttttatcagtctatggattagttatcccgttccaggtccaatctcaaatgttcatttcgtcctttggctggaaaagagccacagcattgctattcctttcagcctggatcaactgaattttctatctccaaagatttccttgaaagaattatagatgctttggccaacatcttaggtaaattttttagcattactgtcaccactgcattgcctgttgtccctgttgtccctcctccgtatccaaaacccttaatctgatatgatacaatatgattcatatgacttctttcctgctttccctccccttttcccactcaaaatatcacaagcctattgtgatcattctttttttttgactctcctctccctcttataaacatctcatccaatacctcagaagtttggcgaataaaaagctcgatatcaagtcatcgacaatgttctttcttttacgaggaaatgctttcttaatatgaataaagaaagtatgaaatttgtatttaaatctccattatacttcaacaactccatctctctctttgaatgtcaatagcttgttttttatgcagttctgagctattatatttgcagttcaagtgagatgaagaagagaaaaatagataataggttttccaattagcgaaataaactggaatatttcctacattcttgtttctctcttccatttttcggggtttcatttagctgccttcttgcgtttgtctgttgtgaaaagcaaatgtccatctcttgtgttagaatacctcttaagaaaatgacatctcaccccttaggaggtatgtgctgcgtgcctttgattaagtgcaactatttatgcttttacgtgctattggtagttatccagttggttattgtcctttgtttgcttcaggttccaccaggtcgatagtgacaatctgagcattg

SEQ ID NO: 10212 - DNA, 523 bp, Eucalyptus grandis
  Intron number 1 from transcript Egrandis_v1_0.046264m (loc us Egrandis_v1_0.046264m.g) derived from phytozome v7.0 (c hr-ID scaffold_7; pos 3888479 to 3889001)
cagagtttgagcattcaagggagcaagggaccgcagttatgattgtctaatatcattgccgcttgatatataaattatgaggaattagtctacagaatctagacagagcttaaatttatggtttttaagcaaaagtagctagtagttccagtctgtagctccagaaaagcccctgtaagttgaacatgatggtcagaggaaatttgctcgagagagaggacggtcgtgcttaattggtactatggcttcacttcttttgttattaggactttaggaattttggtgccatatgggtgtacgaatttgatagtttttgaattaagtgtagaattaattgatccgatttttcaccgatggaaactttcatgtttttggaagatagtattttccgtgtaaagcttttcctttaattagatttgccacttgtgctgatggagggattggttgttcaagtaagtttacttgaacaaattattttgctatgatgtttagcggcctcagtttgttcttctgaagatactct

SEQ ID NO: 10213 - DNA, 4709 bp, Eucalyptus grandis
  Intron number 1 from transcript Egrandis_v1_0.013206m (loc us Egrandis_v1_0.013206m.g) derived from phytozome v7.0 (c hr-ID scaffold_1; pos 1859875 to 1864583)
gtgccattatacgttcacgacgcggtacgtacctaaatctgcttatatggaaatatatttatctatttctggactgactcgtcccaaatctgtgcaataactttttgctcttaccagaaccccttaccggtttttacttaaaattccctaccctgcttgttaaagtagttggatacccatcggtttagccgcataataaacaaattattcacattagagcataatagatcggcttaaatattacaaatacaaccatttcactagaaactcatgtgttgtcgatctttgattagaaaggctataaagtgcaaatatttaagattgatgaccatgaaaatctggaatctaacaatgatgccatgtttaagcgaatgagagccatgaaccaaaatgaacaaatgaaaatttagggcatgaattatgaactggtagcaaatctgtaggttgcgcaagcatgctatattcattggaaaaagaggaggtgaaggttccgtcactctcagcaaattgatggaacatcgttgtttgtgacaaacagtcaataggttttgaagaaattaagaaaaatggatttaagtaaagaaagaaagtttgatttttttataaatgaatacagttatcataatctttgcagaaaaagccaatactgtaatctagcctaaattaccttgaccattaacaatattgagataaacttcatcagacacacgataatcaattatgtagaattttttggctgctaacgccatggatccctagtttactacttgaaaagcgcatgttcattgatcattagattggtggattgcattcaggtgttacagtcatatcaaatagggagaattgttcaaaaacttctagacttattgtatggctgtcaattcagtcctaaacattcaattgtgctaatttaatatccattttagttctaaacctttcaaagatttgccaatttagtcattccgatcaatttttactagaaattgctgacatgacgatttagtcaaagctagctgtcctacatgatgttgatcgcttatgtggctttttaacaatattttttaattttttgcattttttcctttccttttttttttttttaatctttttttccctctgccagcctcaagtgagggttgccctccgacccttgcatagggcaacccttgcccttgctcaacctccaccaagcatcaaccgttgatggttggggaggggaaaaaggaaaaaaaattagaaaaataaaataaaaaaaaaggtaaggaaaaaggaaaaaaaattagaaatataaaaaaattataaaaattattcacgttagcgttagccgtatcacgtaggatgaccagtgctattagactgccatgttaatgatttctaaaaaaaattggctggaatgactaaaatgacaaatcattaaaatgtttataattaaattagcacaatcaaaagatttatgactaaattggtaagttattaaaaattttatgactaagttggcacaattaaaaaatttaatattgaattaatcgtcatataatagatttaagactttttggacaattttccctatcaagtataattccaaccctagatgcagtgactttatttttatcccgtcgcaatttattaatccaagcacatgttattatttacattgcacgacataacatgtttaaggctctctatttgaactgaacatgcaaaaacaatttcaaatagacataaagtgaaaatgcgtaacaatgtattatgtgatgcaaataataaattagcatacccaataaatttatgtgtctaaacttatgttgcacccgttgaatagattgtagaagtcgacccgcacacacaacgttcatagtccatttacaaacggcttaacttatttgtgatgatacgattaaacctaattctaccatattcaaccacgtagtgaacatgtatgtaaaagggtcgtttcatagtttgtcagctcataattctaataagcactttagaaactatacgaaagttcccattgaaattggatttattatgtatatcttattcttattatccaatatataaaaatcctttatgaagtactactgattgaaatgtcgtaataatagttcagtttattcttcattgaatgtaaaagtagatgacattgtggaatgaatcgagccttgccatgggcttttgtagataggcactttagttaggttatcatagtaggcattttttttttttttttaaggttcatatcaactaaatgaggtaaggttatttctttaaatctagtaatattctttcacttagaaaaattatccaaaaagttctaagcctattgcacttttaccaattcaatcataaaccattcaattttgtcaatttaatcctaaacattttcacttcttgctaattgagtcaatttaactaattttgatcaaaatttgttaacgtagataatttttaataacattttaatattttttgaaattttttatactttttttcatttttttttcttttctctttctttcttcccccctttcttcttcctattattagtggccggctaccaatcacaggctatggccaactaccagccatggctaggtgagcaaaacttgcctaccataagtgatgcctggctgggtgaggccaagtctcagtgagggtcggtctcgcttggcctcccctaggttaggcgagaccaaccctcgccaaaactgggcgagggtgagccctcctgctcggccaagtcttacttggggcatgtgaggctagctggcttggccatagtcagtggctggcacaaaaagaagaagaaagctaataagaaaattagaaaaaaaaaattttatctttaaaaattgtttacattagtgccgattgcgtaggactcaattagcaagaagtaaaaaggtttaggactgattgataaaattaaaaggtttatgactaaattgacataattgcaataaatttagaattttttggacaattttcactttcactaatgtacctagaatgtaaccggttgcccatattgcttaattgaaatttgtggcctgaattgctctgtcaatttcaagaatgacggcatccatcattcgagcattttttttttaaatttgtgtaaaactgaaatatgtttttttattataaataatttgtaaaatagtattctatttcatataaaatttcctcatttgaatagaataaatgtgaaattctttattcatgttatatattaatgtaaaatatagaggactcgacaacagttagaaaattcctaatttgtgactcatgaaatttgtatttgtacttaataatattattagagtatattttataggaagtattatagaaatgttagaattttcaataattgctcatttgcagtttttgaaactcattagaactaatttcaataaaactaatgtctgaacaaaagtcatggtatacgaggcaaacataaatcctaatttgaagcaaaataaatggaaagtggaagaaaaacactctttgtgaggaaaataatcaatcccttacacattagagccctaaaaatcacttttagagacaattcttaaagaaaaaatcattatttatttatgtatatgttacaacggtctagattaatttgcaaagttcattgaacttttagtattatggatgtaatttttctggcggtaaaatgagactcgttttgttttgtgttgtgtcatcacagcttaaatatgtggtcgttatagctaggatatatatgactccatgcgatgcacctacaagatagaacatataatgtgatttattgagtaaaaatatctgtcccagaatcactaaaatttcacaaaatatatttggtccattcacaagatataatgggattgagtagcacaatccccaaggatgaggttatctctaaatcactctcgcctgtctttgaagtccaatggccacccacaatcctcaaacaccgttggaatattctcaaacaattgaagcacctctctcacattattgaacctctttactagcacctccaaattttcatagttggggccaaaaaaaaatttcttttggtggagccttttcctttctgtaatttgtgatttataagctctactatcttagaaatagattctggtcacaaattttacttagattttgctcacaagttttggtaaatacataatctcttaattgagctgaataagtgccatatacctttacgaagaagatgacgttcaatctagagagggtggaacaattttaagggggatttcggtacggtgttgtggaggctattgcaatgttctcgacaattaaataagtttgcttgatacttgctagaattcgatggacataatatgaaaagatcattttccttttcttgatcttgccctagcttgcattacgcctgccgactctatagatacttcatggcgtggaaatgccatataaattgctatgtcatttagtaagatttttatagtgaaatcttaagcacccgtcgatgtcattaactagttttggtattgcaatctaatcttgcaatctaatatgttattgtcgactatcaatactagtagtgattaaggcacatcaaagatgtccttactccaaaatgggtttaaatatattgagaccaaccaagctccaaccatcctaatttggagctcctgatcccagatttattcgacctgatactcaagaaaaac

SEQ ID NO: 10214 - DNA, 954 bp, Eucalyptus grandis
  Intron number 2 from transcript Egrandis_v1_0.009724m (loc us Egrandis_v1_0.009724m.g) derived from phytozome v7.0 (c hr-ID scaffold_2; pos 19442870 to 19443823)
aaatctcttcccagaacataaatataatcattctggtgagtttgctcctctcttccacgtttaacatgaccacactttgagacattaggtcgaattcggttgattaagtggcgcgacaaacttaagtgacctttatttcttcgtagattaacaactagggtcacatcacgcattacggagaagttttagtagcttacttaataaatcaatcatggtgctgtctaagcactgatttttcttttcattaaaataaactaaaatcaatcttatgtcttcgtcaagcaatttaactagttattataaaattaccaggttagtcaagtcaatgtcaatcaagtcgagaaattttgacattggcttacaaaatttggctgaaatcaaattgattgcaaggataaaaaccagtgcaaataattattgcaatcaaactcttaggcaggaataattttcaaagccgttgacggacaattgcagtaaagcaattattgtagctgagactataagaagcgcacatcttaatggaacgcgcagacataagaagaacaagctttacttatgttaatccattttgctctcttgcaaatctttttcagttatttcccagcaacctatttcttgccattccagttgtttatttccttttgtcaatcaagcacttgccccatctctttcataaatacttctgttgtcactggtggattcatttcgtcaacttcaagttcttgttcctttctttgtgtgccaatcatctgccaattcgaagaataggaactgctgtgtttgatcaggattgttgatcaggtgaagcatgataatttttactattgagctgacgattcgagggtgaccttttccagccaaagagaatctcttaattataggacgaaactcggacacttgtggtatccaagacctaatctttgtactaaatgggtctacttgatggtgcaggaa

SEQ ID NO: 10215 - DNA, 5826 bp, Eucalyptus grandis
  Intron number 3 from transcript Egrandis_v1_0.032193m (loc us Egrandis_v1_0.032186m.g) derived from phytozome v7.0 (c hr-ID scaffold_3; pos 13201892 to 13207717 reverse strand)
cagcgccactagcgaggagtgcacggttgcttggggtaagaatccagtgaaactgttgttttgttccttgttctgtgattcctgtacatcgattatacatagaagggcccaattgtgtcaatcggatcggcttttcggagtttttatatgttttgtcatgctgtattgtttttcacccgtagccctgttgcgtgtgctgatggtggaaggaggttctaattgggctatcaagtgtccattgagtgcttttcctctctcttcctagaagttgattcgtttgactcataatgcggacgtttatcaaatttcagtgagcaatttataggagagacacattctcattttgaaaaatcttgacttgaaaagagttcctgttttaaatcgaggggttagagaggtcctttctagtagaacagatggatgaacaagtctgcatgcgctatacttagcatcagcaaaatagagtacccataggagcaaggtgaattcttatcgcttagcagtcaaagtagtgtgcaaaattaaggattacattttgacggtcagagctggtaaactttaggggacaattctgggaatttttttttttacagtgcattgagactgcagtttcgatcatctcctcgaggctttgatcattatgaagggtcaatctgtcaaatgttctcttcctttcctcttgcgatccctatcccacactattaccctgtctctcttcttttctagtgtttgggtctctatctgtctttctactgtaggaggcttcttgatgatggagttttcatggcttcttcacaaattattgttttcttttcaattgattgaagtagcctgtttgtttccttgcataatgagtaatctaagtgtacaaatctcccttttgcattatacaaatgttcttttcactttatatgatggaggctccttgatatgctttatcatcttcatgaataacagaagggtagttttgttttcacatagatttatatgagtgccttgtttgcacatagattcataccaagtatagagagactttttctatctgagaccaaaattatgggagtcctcaaagttttctgaatgcgctctggtctatgatcatgtgacttctcatctttagttttctgtcattattaagtcttagtgcgttctgaatacctggctcgttaattcgtagattttagtgatgatagtcaagcccatctttagttttctgtcattattaagtcttagtgcgttctgaatacctggctcgttaattcgtagattttagtgatgatagtcaagcccatttttcacttataagtgagaatgttgctgggggagtttagagcacatctcctaatcatttgacttgcgaacatgttaacttcaactgcacgatacggtggcggtaagataagttgaaaggccttagaagaaattcagtggccgtacttctgaaatttccactcactgttatctgtatacacgaagcacaaacaagaacaattgattttacaaagacgagtggataaaagaaagagaaaaagagaggcttgggcttagagtccgacctagtggacatacttgacgagtcttcaaccaacgactgatgcagtaaaagtgaaatgcatggttgcacactcctataagatcaaaagcacattattttgtacttttaaagccaagcatactaggtgcaggagacaaaatgtgacaatatgaacccattatacgggggagtagatttgaattgcgtccgtggtccaaacaagttgactttcggatttgaagcgaagccgctcgattttttgctcttcaatctggtcattcttagatgaattttggggaaagttgggtgaatatcatgttacatttgattaagttttaagtgatttttgatatgggaaactaaacaaatggggacgaacggacgaatcgttgggccgattggaccgagctatgtctattgcgactaaatggaccgcgacaaatgaagtctcggtacttcttagcaaaaggacatccatttttcgggctctccgcttccatggattcgttctgagcttggactccatagcccctcatccgagagagagacagggaagctaattaccacctgaaaaaaacgagggggaaaacaaagacaaaagagtgaaagtacaacaaaaatatggctatctttctgttacttgttcttttttaattacctttttggtctttacatttgtagcgagttgatattcctactatttcaatttcctaatttatagatttgactaaattgaattaagaaaacgtgagatacaaaagactcggaaactttattttaaaaaaatcatggacaatatttatattaatatgagcacgagaaacctaagcataaattaatattgtggttaaatattcttaatgaaaattcttatttttagaataaatagagcatattgatataactccaaacgacattgcacgtcgagctaggatttaagaattaatctatatcattttcccttactttttaccgcaagccgtatttatattaatataagcacaagaaacctatgcataaattaatatattcgttaaatattcttgataaaaatacttatttttaaaataaaaagaatatcaaatcaatatggcttttaacggcatagcacgttgagctagaaggtaaggattttccatgctttttaccgcaagccgtactcagaaagccaagtccaaatttgctttttctttacccaaaaaattaattgcgtcgtgccgataatatcattacccactaaaattttcttaatcactcgcatataatgagtgcacttccattttaatatcaaaaaattaacgactgaaatagggggagtttgaaaaaaaaaaaatagggagaaaaaaatttaaaaaaagggggtaagaaaaggtaaaaaacccgaataagttggcggacttccgtcgaccttccagaacggcacggtaacgaggaaaaaaaaaaaaaaaagcgaagaactgtctctctctctctctcttcgcttcgcagttcccgatcggcgatggcgactctcgattccgacgtccccatggtccccgccggcgagggctcgagcagcggcgccgccgcatcctcctcctcgtcgaagaagccgaagcggttcgagatcaagaagtggaacgccgtcgccctctgggcctggggtaagttttccgtggaaagaaaacaaaaaagaaaaccctaatccgagccgatggtgatcctgccgcgaagcctcgagcgctccgagcgcccgcggtttttctttggaccgtcctcttgtggtcggatggcgtctgatgtgatgcggcgtttctcctttgcagatatcgtggtggacaactgcgcgatttgccggaaccacatcatggatctctgtcagttgctaacctgctcgtttctttattttttatttttttacctcgatttgtggatgttggtttttcgttgatttcgtttgtggcgatttggattttggatggcctgtactgaagattttttgagcaggcatcgagtgccaagcgaaccaggccagcgccactagcgaggagtgcacggttgcttggggtaagaatacagtgaaactgttcatttgttccttgttctgtgattcctgtacatcgattatacatagaagggcccaattgtgtcgatcggatcagcttgtcggagttttatatgttttgtcatgctgttttgtttttcacccgtagccctgttgcgtgtgctgatggtggaaggaggttctaattgggctatcaagtgtccattgagtgcttttcctctctacctagaagttgattcgttgactcataatgcggacgtttatcaaatttcagtgagcaatttataggagagacacattctcattttgaaaaatcttgacttgaaaagaattcccgttttaaatcgaggggttagagaggtcctttctagtagaacagatggatgaacaagtctgcatgcgctatactcagcatcatcaaaatagggtacccttaggagtagggtggattcttatcgattgtgctcaaagtagcgtgcaaaattacggattacattttgatggtcaaagctggtaaactttaggggacaattctgggaattttttttttttttttttaaagtgcattgagattgcactttcgatcatctcctcgaggctttgatcatcaatctgtcaaatgttctcttcctctcctcttgtgatccctatcccacactattaccctgtctctcttcttttctagtgtttgggtctctatgtctttctactgtaggaggcttcttgatgatggagttttcatggcttcttcacaaattattggtttctttcaattgattgaagtagcctgtttgtttctttgcataatgagtaatctaagtgtataaatctccctttcgcattatacaaatgttcttttcactttatatgatggaggatccttgatatgctttatcatcttcatgaagaacagaagggtagttttgttttcacgtagatttatatgagtgccttgttttcacatagattcataccgagtatagagagactttttctatccatgaccaaaattatgagagtcctcaaaggtttctgtatgtgctcctcaaaggtttctgtatgtgctctggtctatgatcatgtgacttctcatctttagttctctgtcattattaagtcttagtgcgttctgaatacctggctcattaattcgtagactttagtgatgatagtcaagccctattttcacttataagtgagaatgttgctgggggagtttagagcacatctcctaatcatttgacttgcaaacatgttaacctgtcaagtctatttttatatgtgcattccaagtagctttgaagtagatcctggaactatatttctagttaacttgtgtgatgttttgttcatcagtcatataaacttcaccacttagctactttaggttgggggttaggtctgggtggctatccatggaacgtgagatggagatgaagaatcacctgtttccagaagaaattgaagttggttatttgtccctgcgattgtgtctaacctaaggattaacttatcttgggaattcaagctactgttgtcttcttgtcatgcatttgtctagttcagaatctgcaaaatgttcaaagtaggaccacttctttgatttgtcttcttcttacaatcttatttgatagtgataaatcgatgaaaaatatctcattgattattttttaatgatagagaactttgatttttttttttttttataaataattactcctttccatgaacaacctatttaattaatgccttgagttcaagagtagaagtcactcaagctcattggtggcttagtcccagttttatgagcacatttttaagctgttcttgtttaatgtcagttgctaagatttgcgtcgatattgctagtcttttaatgggtcaaatcatttttgcaatttcacagcttagtgtatagttttttgctttgtcctttttcttttgcgtaatagatgtagttggttgagctcttgctttgtaaagaaagccggtcatctttctgcaagacaaaaatttgcgaagtcattgaatggcctctgaagtttagccagaaatgccgttggtctttgacatacgcgtagatttcttgggtttatggctctgtttcttagtttatgttcacatgctatcttggttgtgccatgatgaagcatgggttcatattgtcacattttacctcctgcacctagtatgcttggctttaaaagtacaaaataatgtgcttttgatcttataggagtgtgcaacc

SEQ ID NO: 10216 - DNA, 1096 bp, Eucalyptus grandis
  Intron number 6 from transcript Egrandis_v1_0.006884m (loc us Egrandis_v1_0.006864m.g) derived from phytozome v7.0 (c hr-ID scaffold_5; pos 5701163 to 5702258)
tcgcccagcgagttgaaggtattctatctattgttaagttccagtgttcatattatcaaactggatggctagctttatatatgccaatatgtcaattattggtaaaaaagaaatttccgttcccaccaatagcatcatttaggctcctggttgcatctagattggcctataaactctagttactttgttttttgtagaatattattctttatctttgttcctatgcaacaaccttcatgtggtaatttgtttcttttgactcttcagatggacaaagtgagggctattatatgaagttttagttttcatgaattgatttttgcacacatgcagctctaataataagtgacaagaatttttcacccttgctttgaccaatgaaatgatttcaggagctgatatggagagaaattatcttggaataatttgattttgttatatggatcctgtatgcattagtcagtaaatcacaagtggagtaatgcatgggagtatcagtttaaccatgtctgtttcactagctcatatttcttttctattacacctgttcttgacttcataatgttgtgctttagtacttattttgatgtggtccgcttgatatcatgtgcttgctatttttcagaactagaaatatagcgagatgttgttatggaggaagtttgcttctggtgcttatccaacttgctgtgataaagtcataaaaattggtagttgtggcttagaagataaacattttttttctaggctgtaccttcagctttggctctttgaaaagcttcggctttattgaatttactattggcgttctacaaagttttgaattgtttctgttatattatgattattatttcatgaactaatcacctacatcgtggtcacagctgttttaccgtggaaatggatattgttagtggttgctaattcacaagtgaattaattagcatgtttgtatctgatatcacatggtgtagtcaagttcgtgctttatgattaccatcattctatgctctttcaaactagacaagtgactgctcattctccccccttaaaaaccacaggagggcttgactgcagaggagacggcaagaaagga

SEQ ID NO: 10217 - DNA, 1447 bp, Eucalyptus grandis
  Intron number 5 from transcript Egrandis_v1_0.007141m (loc us Egrandis_v1_0.007141m.g) derived from phytozome v7.0 (c hr-ID scaffold_5; pos 7427833 to 7429279 reverse strand)
cgactaccattaaatctgctgtaaaaggtaccctgtaatagagttcaatttgatttgctagctggtgttctataaatagctgtttttattcctgttgattctttttttttttgccttacctcctctcctaaagtcttgaactgtcaattgattgtcaacattttctccctgattgtttatattcccatcaatcctatcattcagctgctctgcaaatttatgtaactaggggatgcttcgtactcaccaaactgatattttaacacaatgtgattcggagctttaaggacacaaattcatgggatgtttatgatcatggaatgatttccacaaattctggaacttgcagatgcaagagtcagtttgttgtttttatatgtagctaacactttcttcattgaccaaatatagacagatcacaattgaaaatcatctctgttatttatatcatcttctccttttctgttaaggagtgagattcccttctcttcatgttttgcatgatctacgataattacctgattctgcaattgtgatgcactgaaacatgtattcattagtactctttcagaagaaaaaaatggccagatgcatcagattcgggcaaaggggagtatattagatgctgcaaaatcaggcgtaacaggtcagattttgcttgtatgcatgttcagtttgctaagagtgtttgctagttgccttgtttctacatttgttgcacgttcttatgtgattatgaactcacatttttttttcttggtgaaatcaaagttgcccgttaggaaactttcgcacttgtcataggcaaaactctatactgcttaatgagatggatttttgaaattccttacatatgacagatatcgcacttgagttaaaatggaaaaaatgttcagtagatagaagattcaccaaattaaaaactatgtataaaggtgctggctttgtgcttcagaggtggtctaaggttgtcctttcacttggaaaatccgcaatttaccttgtcaggttatgttcttgatattttcctagctctagcaccatgctttaggtattgaaaaatgagtcccatttaagagaaccccatgcaaaagaggagggcatatgggctaagttacatggattcctcagtgtattcctttatgatttttacattttctattgaagttttcattaacgagctggttgctcgttctacttcccgatagattttctaataaagttttcattatgtagccagttattgtcttgatatgactttgtatttactgcctccttttagcttgaggttactacaataatgaaatcaataacaggtccactattgtccttcagccatttttgacacccatgagcatgtgaatgttcttttgtgggctatgtgctcccgctgttttgtattattctgagcatgtccttggaaattgacattttcctgtcatgtaga

SEQ ID NO: 10218 - DNA, 2632 bp, Eucalyptus grandis
  Intron number 1 from transcript Egrandis_v1_0.041780m (loc us Egrandis_v1_0.041780m.g) derived from phytozome v7.0 (c hr-ID scaffold_5; pos 40983973 to 40986604 reverse strand)
agctttccgagaagcaaatcaacacattcatcctggtacgaccacagcctatttctagttccataaggattgctatgcccaatcaaatgcgtggtggatagattacaggtgtgtcgatatgtctctgcatgcattaactgaattcttataatttctgcaatggaaagaaaaacttaagtggagggtcgcaaacgcttgctttctatgcatgtcctgagatagaagatcaaaagcagttatgttagtatatgtaaagacgcggtctgaagagagcaagagcgatcgccaaggccatagaaggcccggacatggtgtagctccaactctaggatgacgtggggcaagaatggatcggatctcacattgcctggatgtagtgaggcgaaatgccttatatatgatggcatatgtcataattcgtaatgaggtgttttatggagaaagtctagaagaacaaaattgtgtgagctttgaccccaagcagataaacaggccttgagcttaacagttagcaataaaaaaaaatagtgaatttcactaagctaccataataagtaaagaagctgctgaagagagagagatatagagagtaattagtatatattttatttgtgtcggtaaaagatagttaacgtaaatgttttcaaaacgagatcaccgaccatttgttgggaggagcaagtttcctccgaccaaagactttgagaaacacgaggcccctagaatgaaatgaagattatctgccatatgtggtgctctcctcgatactttgacaaattatggccgttgataatatcattttcgtaaatctatagccgggatctgatgaaatattatgggagtaccgtgtggagtaaagaatccatatctcatccgcaggggaatatgatgtataatacatcatagaatgatgacataactaatagtaattgacaatgttcggcctgattgcagaaacatgaaaactaatcttttctaaataacaaataaacaatttagtatcatatatacttatttgtcgcttgaaaactttattatttaatagctatttattcaataacgtgtggtcatccttagttttataaaccaatttttatatgtataaaagataatatctaaacattttatcatcaaatcccctaaattattctacggtaatgttaatatttctttttttttttgtcaccaaaagttctaagttatgtcgactatgatattaatataaaagattttgttttatgacctctctcaaacttgcacgtgacagaaatacaataatatattggatgtaggataaggaagaccccataaatagataacggatgcgcagtggtgaaggctctgtggagcgcattatctgcgcttggcctgattaaattattttctaactatgctctaaatattattcattctcatacgtgggaagagggtcaacaaattcggcttccatttgaatggaaactgttgcatgatgcatgactaattaggcaaaacgacgacgggtaatggtagagtctacgatcattcattataaaattacacttttgctgttattggtaacacgtaaaaaagaagttcaggacattggtgttacagtagacaacgtttaggatttttgttgatagacaaaaagtatatctatatcactactacaagttttggatattgatgaaacaaaaaagaagtttaaggtattggtgtcaaagtagatatggtatttgtgtcacaataagaaaagtttaggggtatttgttgtaaatagggagttttttttctcatgctaataattcaagtttggaagttttagtgacatgaaaaaagtttaagatattgaaaccatgatgggcaaaatttaggtctttagtcgtattttccctgttcatatctttacttgaaataagatagtcttccatcaatataaccatttagctttatggcttgggttcttagctttgtgaaatattagttgagaattcgacagaaccttcccgagaatatgcaagtttctaagtatgtgattacgcaaataaatagtcgttgatgaaattattcaataaagaattgtggtaaattggtaggctacttggtataacttccccacagtagctacgtctataaagagggtgttgtaacttttatacggggttgggaaaactccttacaatcgcagcacatccaaagcttcgacagtttatatcagcttttacgaaggaagctcacatgagctttaaggaagcagcccacctaggtttgagctgcggtagtttcgagataatgtattgccaaacacatataaataccttacttcaaaacacggatcaaaacacggatcgactctctccactgatgtatcctaaccatttattttcgatttcgtgcattttctattgaatagaataaatcatatctagtcttaacttacgtgaccaccggatgatgtttctttgtccagtctataaatggtggtgatgaagaaaaggcttaaaaaaactgctctcgatgggactttgtaatttgagaatgcagaagtctttgccttactgtagaaaaacttatggatatggctccatttcatgaaattttgccatccttactctcacaaactcgcttcttgacatcacaggaaatattc

SEQ ID NO: 10219 - DNA, 834 bp, Eucalyptus grandis
  Intron number 15 from transcript Egrandis_v1_0.005417m (lo cus Egrandis_v1_0.005417m.g) derived from phytozome v7.0 ( chr-ID scaffold_7; pos 37412025 to 37412858)
gagacaggtatttggtgttttgggggaaaacttaaaatgcattgacacatgtaaattgcatcagagcatattctgcagcatccaacttgacatgtctatcttagttttttgtatgcctaacatactcagaaattaacgttcctgataaccttcctaaaagaacagggtgtgcatggagttctttccagtttggaagaaaccgagtcaactaaaaacttgaaaacttcatgttggaacccaacctattttacttgtaacatgacaacaatcggaatactgaaaattaatattttagtactgttaccccaggaatcacgtaatcatataaattgtcgccccttgttgaaataccgtatcgcggaaatttctgcattatatttatacttaccactgtgatgttcctgtaattttcaagggtccacaggctaatgcatcgcaggataaatcctttgactatgtgcttggaatattgcagaaaataatggtttctgctcatattatattagccaaatccaattcattgagtctgggctgggtgctccaaaatccatatatagctgagaactgagtcgcgctgccggtttacatctaaataatcaaattatcatttgtagaatcagcttttattgtccatcagagcaactttggtattcaacagctttgattggacaaatcatttttgatatatctgatctcaacttgttttttattttattttattttttattttatttattttgaatttgctatgtatgctgagacgacctatttcttctcctgtgcaactaattatggacaggtacgttgagatctgggaccacggtgttctgctaa

SEQ ID NO: 10220 - DNA, 7846 bp, Eucalyptus grandis
  Intron number 1 from transcript Egrandis_v1_0.036608m (loc us Egrandis_v1_0.036525m.g) derived from phytozome v7.0 (c hr-ID scaffold_5; pos 72682659 to 72690504 reverse strand)
acggtttgtgaaatctgcttctgtgattatgtttgggtgtccagatctcttgtttctcctctttcatctctttgagttagctggtttcgcgtgttgacgttgtctgtgcactgatccgcagaagaagatcgtgttgaaggttcagatgaactgccagaaatgcagaaccaaggctcttcagaccatcaccgaagcagatggtaacgaccctctacttcccatgaacttggttttatgcttaggttaatcggcctcattcggtgatgttttcatcgcgtctgatcttgaatcatcacttctgctcaacctcaattcctccaaaacgaattaataattttcacttcgactgttgccgctgttttaaattacacaatcaatttccctgacaagctatgctgtcaacatatgcaggtgtaaactcagcggcctttgaaggagaagacaaggtggtggtagttgggggagttgacgcagtgcctctggtcaaccgtttaagaaagaaagtcggtccaactcagattattagcctcggagaagggaagtaacacccatgaaatgaaaatactcacatgaagaaaatgacatgactcagatttttcttttatgttcttttcgagaaatattgtcgagtttcattaggaggctgctgaaatttttttgtattacttttcttggctctttttacaattatgattcgacataaataacaatatcaaagatgttaatatatttagtgagatattacatataaagtcattttttttatatgcctatgtgtcttattcctaatttttgttggtaaatagatcgagaatctacatatgatcctggaagcgaatcaatcaaagtaaatacttcgttttttatcttccttcttctagtcttattaatatgtttgctactaaactttttacatattcattcgatgagagggagggggagagacatggtcatgtaaaaggtcaacaagtcttaagatttctggtcaaaaagccgactagaattgtccttaccaacggattgaatgggaaaactttttgcgagggtcttggtcctcttttaataataaaaataaggtcttcgttccttctataaacagagaattcacctaatttctaggtgggtcaaatcagtacgaagacctgctatcaactaaaaggtggtaaaggacaagtgcactgacgtttgggccgcggtttcatacttcaattaggcgactcaaaatttctattaatcagatcaaccttgaatatctacgactcaaaatttctattaatcagatcaaccttgaatatctacgacttttttcaagaatataccgattaaagtcattttcaattggcaataattgcacaaggatgaccaaatattgttccaagtccccaaccccatgaaatgttacatctacgaaccaaatcgaaatagccttcttggtaaaagaatcgagttgagctataaacattatttggtaactcccaaatctagcattccaacgtccaagacgtatgttgagtggtctagcatttaatgtggatccgctgatcatttgttcaaatcatgtggagcggctttcaacttagaataagtgacatgtcaactgtttatagagggcctccttgaatgctccttatacctattacttataaccatgcgacttgcgagatgcacgggttagatttagcaatatttccatgtaatataacccagttagaaccaaattttactttgaccttctatgtaaatataagtgttaaaattaaataatgcaaataagaagtaacatgaatgaatatactaagtatattacaatcaaccacatatcacataatatatgtacatatatatacacacacatgctcatgtgcgacgttcactactaagggaaaatggggtacagacaccgcaagtaccaaaagttccataaggtacatgttagtgtcaaaattggaaaaaattgggacacttaggctctgttagtttcgcagaaaataatttctggaaaaacgttttccagattttccgggttcgtttcacagaaaatgaattccttaggaaccattaaaagaaaaaagtcttctaaagtaggggaaaatattttccacttttaaaaagtgaaaaacagttttctcacttgatttttcttatcttacacctctacaaatcctcacttcctcctcacgtttcttcttcttcttttctttttttatttgaattattttttaatttaatttttcttttttaattcaaattatttttaatttcttttttttgtttcccatcttgctagtcgtcggaccaggtgaacctcaagctcatcgatcttaaactcgcacttgtcgatctggcaagcctcaagcttgacattcgcactcgccaatctggtgaacggaaaatattttccttaccgaacaccggaaaatattttttgaaacattttcaggttttagttgaacaccggaaaatattgtcttctgggaaaatactttccggaaatggtccattttctgtgaaacgaacggacccttaagtgctaatggcaagaaattctggccaaatggctaacgtggctttttccggtgactttttctactgacgtggcaatttctttttagaaaaattgtccacgtggcgctataattccccaaaattaatttttaatataaatattaataaaataaataaataaaactaaattattagaaaaaagaaagagggagggagggggggatagcgggttcggcgaaggcctcaacagccctagccgaacttgctgttcccccctttttgtcttttataaaaatttagtttatttatttatttataattaatattaaattaacaaatttatggacaaaatgtgtcgttttggacgttcattattaagtaagcattctgacgagccatgtagaccactttaaattattaaaataagccacgtcgaatttctagctaccctcgctaacgttgatacttaagtgtatacctgtatcaagttttggcacttgcaatctactttctccaagagaaaattaatggattactaagcgtgatgctcagcacaggctcttccaagccttatcaatcgtaacttgatagtttatcttattttttggagctaccactaattggttatggttgattagacactaaagtaaaatgcgaatgaagcagagattcatcggatttgagaatttaattatgctagattaatctaacatttttttggtatcttttctcaatgttttgcatgtagtctttaccaataaattttaagccactaacttgtgaagggtgatcatatgggtatgcaatcaagaaagggtaggaggacctcggttgtgaggttgattggccgatcatgcaggttgcataggttgtagccgataacaattagatgcaagataaccatgccaacactagtgtttgcaaaatgggttgtgcaaggaggaagaacttgaagtagcaagtattgcatttgttggtgtggagatggacagaatagtacatggttctttcaaggtagccaatcaagcctcctcactcaataattccaatacaactgtctcaatacaggaaaaaaaatatccctatgtagaagggaggccctcataggttcaaactcatcattcagggtcatcaaaaattgcatgacatgcatgccatcacaattttcaaaaaaattgtgagcatcactagcccccttgaagcgaggtccagacaaggttaactaatttcaaatagcacgcataaaggatagaaaatcattactagactggcttgccttttgatgcatgtgatataaattccctaacagctgatatttgtgggcaatatttgaattggaatgacgactgacgataagattccaagcttcctttgttgtattaaaaagacaaatctagatttagatagatgggatcgaagtgttttgaaattatatgagaacatgatgacttttactatcccattcttccaaacgatccacaaatttagcctcggtttccttagaaattttagttagcacacaaatatctcgggtgacataactccaaagtcagcgtcctttcaagaagcttaatattcttgagcccataaaacataattaaaaccatttaaaataatctgaatgggtgttgagacgtccaattatatgtaataggcactttaccaatataaaaaccagcagaattgaatacgtcggagagtaggtatggacaaaacaagcccaaaaacaaatttaggatgtcaaaataccttgagaactggttggaaaacaccaaaaccaagcagaaaacgatcgaaccgattagaaatgtgacgaaacttgtctggtcgatcttatatgaaccggtcaacggtaaaaaaattagagatgacttggtactaatgtagtggatgacgttagtattgcgaagggccgttggtgcttgcaagcgagtgtctcagtcaaggcgcgtgagatggcgaggtgtggaggtgtgtacagccgtggttggcgaaaaaagttcataagctgcctcaatgaggggcggttaatcgtgggttggtgtttgttttttgaaataggtggcagaaggcatccaaatcaccaccgaacagaggcgacctccctaagtttaagacccggcagcgcgtgtggtggcattggtcgtccgttggcgacaaaatttcaggacttgtctcatttaagggcggcggaagtatgccaaataatagcaactaaaggccttggcctttgcaaagaataaggagagaggaagccggtgtgactggtatagtggcagccatcatgtaatagactcaatgaatgctttttaaataataatggctctgatatcaagttgagatttgtaatttgggatgaacgagaggaaagcatagtatattcacattacaaaatgaagactacaagcattcccttatatagagggtgagaaggcaattaagttcaattataattaatgttaaattacaattaacctaatctcattatatataagtctaacatctcttttcttttcatcttttttttttttaacttgagtgcggggggaagttggagtatctcctccatgtacaagaatgagataacaacatggaaaaacagctcacccttgattttagtgaaccaggccacattaaatgccgttgacttgcagttagttccggtcgttcattgtttaaagtttgattggtttctttcttttgtcaaaaaagtttgattggtttatgagtgaaaagagatgatccattttctgagtaacgaagtttttaagcttattatcagcctgaaggtttaattaataatataagctcactgttaagtgatctggagtcccactagtcacaggtatgttgcccctcgatcattcattatgtcccaacgttttggttggttcctttgtagcataagtttgatcacgccatggtgtaggatcacaactctagtcgtactagcacaatggcatcacaataacgataaactctttaagatgtagcactgatattttatgatgaatgtggaactccaatgacaatgtttgaggatgtcatgttgatgcctgaattttttttcgacaatttaggtaatctttatgtgaaaataataaaaaacatatctaataaaacatacataaataaataaatgataggaggcttacttgggtcttagtctagtttgcatagcctacaaaagctatccgatgatcattcgcggcccaaatccatcaaaatcagaaatggtctaattgatataaaaagaactcatcacgtaaacaagtctaggaaccaggctatcatccggattttgtgtcaataagactccatttatttcattaaagaaatagaaggatatgattcagaaaatatatttcttaaagtggtcgcttgtatcgcttgaattaattagctaatagaaaatattttactatcaataataatttatgtatccaaatttttgttattaatgttttttttcattcatttttataaataatacaagcaatcaatttaagtaaaatacttttaaaattatttatttttcatgaaagaaacgaaggtcagagcccgactaatgccccacgaagtaagaaagcagaggcctctctctcttttccccctgtcgcggatcactgaagtcgaaagagatgtcacagccgaaagccaaaaaaaacacagaatcgcgagattcgtttggagcttcttctatgcggacgccgatctcctgtgacgctggcactttttctccctactttgggactttttgtaccaaagcaatggcttgatctcccgtcgtacacggtacgcctatataacatgttcaacatgaacgactgactttagctgtctttctttattgagaaaaatagtaaagccaaaacgcatctcatcattttgcaatatttttttgtaagtttgtttggtgtacctactattattattgacgaaagttcatagaagtcaataaatttttcatatacattgtgccctaaatataacgcctacattgtcatcgttttggaatttatgttaaggatttgctaaaacgttttccaagagcaattgttaataagtgtcctggagactcctgcgaacaagatttgttaacagtttccatacacaattctttttagtgtcgtgtgcaatcaatgcttaggaaatcataatgtttccattaagtatgcttaatgactgttcagggcacccattaatcggacctaaatatgtatactaaaaccaactaaagctttttctcatgtttataaggtttgtaaaggtcaaattagtgccttcattttaggagaagttcatgaaggcttttcattggctcaaagcgaaaccaacatgctcgcttgctgcatggataattagagatattgaaaattagcagagcactataaattaacatgtcgagagaaaagtcaacttgtacaagcaatctttctatagttttatatcatactacaatttttcccgatggaaaattggaaatatatattttaaaaacatatatatctcaacattaatcatgcgtaagctaagccttgcatgtagaaaacaatatgtacacacgcacgcgcgcgtgcgcgcgcacacacacatatatatataaacgctatcaaattgaacaaatgatgatatagaagaaacacattagattaagcaaagaataacaaaaagagtaagcaacataaaggacaactattgggcactcattttcctctatggtattagagtacaattttcaagagtggtttgactttcttattgtacatccaatcgatcgtcacatatcaaatttttcgttttgatggaactggaccccagataaatagtatgcacccataacctaagtaggcggccggatcacaatttcaatgcaaaatggcggaatttgcgaggaaccatcgtaacatttctgacgtcaattcaccggaagcttctcttaaaatgcttttctttgttcttttttttttttttgggccttccaacgtcaatgctgccttgcccgagaaggcttaaaaaaacgcgtcgcaaacgtgtgtccgtacaagccaagtgctataaagccgttcatcgccaccctcgtcttcccgcagcttccaatcagtattcgctcatttctctagggcttacgcgcgccggctcgtgcgtaacattcagcttccattgatttgatcagagcatacctaaaaaaacatgacggtttgtgaattctgcttctgtgattatgtttgggtgtccagatctcttgtttctcctctttcatctctttgagttagctggtttcgcgtgtcgacgttgtctgtgcactgatccgcagaagaagatcgtgttgaaggttcag

SEQ ID NO: 10221 - DNA, 3253 bp, Eucalyptus grandis
  Intron number 1 from transcript Egrandis_v1_0.022558m (loc us Egrandis_v1_0.022558m.g) derived from phytozome v7.0 (c hr-ID scaffold_4; pos 20044178 to 20047430 reverse strand)
cgtctctgggaccaccattggcaaggggtttcaaggtttggtgccctctctctctctctctctctctctctctcatctctctccaagatttgtgaagtgttgtctgtttgaattgaatgtgaggtggcaatgcgtcttctagatatgtgattgcagcttcatgaaagggtgtcagtgtgattgtggatgactgaagctgttggtttctcatgagtgtttttttcttctgggtagttttttcttcggtctctaatgagtgattgtcttgttcaagaatcagcgataacagctgatttgtattcaataaggtcttatgaacttaaaattactttaggaaatgtaatcatgaagaggaattcagatgcaattcgctcacaaagattacactgtggaacaatgtgctgttgttggttgagctcttgaatatgttactgccggtttaagcactggcagtgatcatcatctttctgaaaagttacagaaaaagttgccgaaagtcgcaatctcggctaaattgatttcaataagactaatacagatttgacaattccttaatatctgtggatgcaacctcccacccaccctactctacatgtcaaacgatgtctcttgttcagcaacctcttgaaaatgagcctcctcagttaattactaatggagtcatcaccttcaccttttaagtgttagcttagtggggaattgagcaagacattttactcatctatttggttgtgaaagtgcaaaaagctattctgaactgataggcaggaagatgcctgggctttttagatgcttgtgaggaacagggcagggtgcttttttagtcattgcaacttttaataacattgaatgtgagcctttgatctaattatgaagaaaacagatgtccaagcatatgtctggtccatttctcctaagtttttggcttcagcttcactgcttttgcttcagttagtgacacaagggaggggcttttgatcgtctacctcgcagttgtctggtgaggtttctaagtggttctaggttgttactgttgtgtctgctcctttttgtccagttattagggattggaccatcttccagtagcataatgtagttgttcttgcagtactgtagaagataccagtttgaaagagcacataatgctgaatatttaaagagtgccatgtaaaatctggattttgggagtcgtctcatcttttgttgcggcgggggatgcaataattaggtaggaaagaggcgaagaaaagaaagggtggggggccatttgggaagataagtttatgggaggctagatgaaagctaatatgcataagatttacttgaaaagaatttacaaggtaaacttagtacgcatcaagttgttaatgggggcagcagcggcagcggccatcaccagccccctttggatccatcactgttttcttgaaattagctttgacaaagatactatttgggagtatatagtttatgtggtgttttagttcccttaatttaatatctgttggttgttttgtgaatgaggacttctttcaatctaccaaatttccatgaagccttttctggtggctattcttgatgacagtgcattggatctatctgtacttagagccagaaaggttaagataaaagcactatgcctttttctgctgccaacttagacagcatggaagtttgttataacttgtcccaacaaatccctttataggagaagtcgttactgattctagtaaaagaaaagactactgtttcacattgattttgcatcagtctttcgtcttgtggaagaggtgcaggaaggaatcataacttgatagatactaacatgtgggtgataaatatgatttaattttaaccagtaattttcttaggtatatgctcagtgatgtgatagtatacttgaaagagcatatctaagtttacatcgtttgtcagatggacgccagattcaaattgccgcactcatgtctcacctgtacaattacaatggcgcatcattaactcatcggttctttgattgaaatgtttgctttgatgtttagtttcatagataaatgggggaaaaaaaagagagtcaaaatctctgtctgtctctgtctcattctctccacatgggtgaataggagcatgcactgcacttacgtaacgtgcatgtatccatgcattcgacctgtgtacatgaactgaaatgcatgagctggttgagccaatccagaatgtagatgactcaaagccccagaattcacccttttcacctaactaagcatattttttcttactcatgttagactcactggttgagacatgtctatctccagaagacaaaattttgattgatggtggttttagtttaaataatatctcattgagaggatttatggcagtggatttgcaactccttaaagttgcataaggccttaagttcattttgattggtgttttctgtgtggtggtccctgtgttttgttgtcagctaatgtgattcaagtggaaatgaattggatgctctgtgtttttcattgatgtggatctagtcttttgtgcaaaagcacgtgggctgtttgctggagtatggaagcttggggcttgtttgtaccatcgcaagtttgttcaggtgcaatggaagtagtttacagttgtcgatatctgtactccataggtctgttgatgattgtatgtcttacaagcagattaagcaattttcagcattaggcatgggtgttcttgtccagctatcaaaaggaaagtggatccccatttctgtaatgacacatcagactcatgatgaataagatccctcgagctagggcgtgagctttgacatcaatgggcttttaccctttgcatgtggggagagcacctaaataaggggatagacttctgatttattcctcagacataaggttttctctagttttctaaatggtatcatcagtcttgacttcttttaggcttcagatcatgagaacttctgtgagtgacatctatagctgtagaattagtatgttgcctttctttaatccttaatttcctgattcttgctaatatggagtcaatcgattgaggggatgcttctttttccctgttctgggggtaaaattcttgatatgggctccttattattcaggtcaaggaaacatggaaatgcttcatatttactcttttctattaaatatatcagacaggctgaccttgagtatttatgtttttcctgacaggtgggatcaagcggcatcacttcaaaagaggtcta

SEQ ID NO: 10222 - DNA, 3710 bp, Eucalyptus grandis
  Intron number 2 from transcript Egrandis_v1_0.047714m (loc us Egrandis_v1_0.047714m.g) derived from phytozome v7.0 (c hr-ID scaffold_641; pos 14807 to 18516 reverse strand)
tcgagcgaagtttgagcagcattagggaaagaaaggtacatgcgtctttagcatatttgtccttttctctgagcgaatgagatgtcttgagaactttcgtagagtagccgctgtatttggaggcatggatatggtgagaaggggaagaaaacaatgagaaacaatttcccttaaatgaataacaggacttatcatatccatacaggagccgaaacaccaatttcaatagagactgcaatcacatggtaagattggaactgaatagactaaaaatgttcaacttggcatgtgaaaggagagaatgaatatttctccaagcatacatggcgttttctcccttatatgaaagaacgaaagcacattcagaaatcaccccttttcttcatagttattgacctattcttttttttttcccgataaacaagtaaaagatcatgattattcttctatcagtatttttcccgaagttatctggacgactctattgtttgtctttccaaaataaattggatagttttttataaacctatgaaagagttgtaagtgacaaaaaaccgtgattaaaaaaagtattcaattacctgatttctaagtgacttattggtaacttacacttgtatgaaatcaccgactcttttcaacaatgtgcaattatcaatatctcttattttttattaacttttatttattttttcttgccattcctttaaatttaatagctcttatatatatttgcaaatatttatgtgaatagcttatagacctatttttcgctaaaattactaactctttttgggttactaactctatttgactaactttatagacttatagacttattttttcgggactaacttaccaacgcttatttggtctttcttagtgcaatttttcctactctaacccttcctttgactactcttgagatagagtggaaacattgtgttatggtggagagtgaggtctactctttctcttctgtcttacgcgccaacaacttcagcagatctttcttctctttatcactttcctagttataaaataatttatgttgataaaaatactttcactcctcttcacccttcacgaacccaactagaaattaccaatctttctcttctatctctcttgcagctcttccctccccttttcccttggccccggcccccttccactcatttggatttgttgtccttctgagtgtgagctggtgccgggtctcctccctttgctgtacatctgtatagctttttgtgcaaaagtctatatacatattaccttttaccaaaaaaaaaaaacttttctctgtttaagtaaccaactaattctgtgttgccaactcttatttgattagttaataagtttattcggtttggttaaataactggcttttcttctctgacaaaaaaaaaaaaggtcatcggtcaatttttaccaatggtttcttgacacttattgacacgagtggatacttatttacatgaaacaaaaaaatagtccgcactctttggcatgaaataatagaataccgtgagttttttattatattaaccttgccgatttccatgtacaacttttcacttgaactatgtttctggacaagttgcaaagcatagtcctttcatttctatcgtccgtcatttcaacttattttctctcttttattattttttaccttgtactaagaaaggtttcgggacaacatgcgcacacacgaaagttaaaatatttctacggagctcttttacaggcttaattattcaacgatcagatacggcagctacaagcaaaggtaagtggacaaatatgatgaatgcatatcccatctcatcaggcattgttaatttcctggttatattaatctagcaacttctgaaagaagagaatgcaaagcttcttgcaaaggtgtcgccctctttcccatcggtgcttttatttccttcctatcacttgccatgcatcatcactcttctgtgcatatattaaccactaaccacaaatttgtgaaacctgcaatagaatctctcaataattttcatgtatgatctaacaatgcagttttatgatctgctaagaccagagagagaggtctttaatgattaataattttttttgccctaattttctaataggcttgtgtagtgaagtagcttttgcttttgtccatcaaaccaatattaggagattgtgtgctgtacagtttattgtgctggtcatcaatttgtcctgctctctgttagtcctggtgttaaaacatttaaagagtactgcaacattatcagttttcatgacaaggacaatacataacgagagatacttaatttcagggttatgtactggtatttacatgaacctttctctatccgtgagaagtttcgtttttgatagggtaattgacaatgagcagataggttgaacatcaccgaagaattctatgatcttgagactgtatgatctgcttgaaacttattactagctcaaagctactaatccaagttgagaaaattatcacctcaccgataaatttactgtcataatattcaattctacttttcttttttacatggaattgtagacaaactcaaatctccgtgtccttctatggtcccgcacttgatctgttaagaaagtgattgactccgtaatggaagttactagtacagagttacgaactcatgttgggaaaacaaattttagatacaactgtgtattggactatgggactgtaggactgtagacggacccaaatctgtgtctttttttgctcccatgaccattacttgatatgcttggaaagttactgactggaaaagaaaaatgttactagcactaagttagcaacccgtgttgtgaatatcacaattttgagaatatttcacggaagaatatattgggaattccaactggggacatagatgcagccaaagttcttagtgatcacatttggcatacctaatcacttttcgagcttttttgttttttattcctgtctttttttagaatggaagagaatcacttctagagttgttgggataaattcaactttcccggtgaaaatatcacaaagttagtaattgccaatatggcaataaaaattagtagcacagtgtttctgagtaattaattttgagaaaactacaacccaacttaccatcatcatgtacaattctatacttctaacatgggattgttgaaggactgaaagttttgtgtatttctatgattttgtaaccattagtcaatctgtttagaaattactaactcgataacaaaaactgatagctttttaatatgaccactgttgaaaaaattacaacaacatagagtatattactttcatgagatgctagtctatactttagacattgactataggtggaaccaaagcttgtagtcatgtctggggtagctagccacttttagagtttttttttcccgaccatgtaggagagagcctcttctagagtcagatgttgggaaaagtttgaaatttcccagtgaccattaatagatctgagtgcatagacagatgcttcgtcacctaattgaaaggcttgttcactgcgtgtaaatctcaaattgtgttgaagcatttttttcattttaattgagtgaaggtttccaggttctccatccaccattcaattgcctttgttatttaattaaatataaaagcattttgggtcctttttttctttcttccaatttca

SEQ ID NO: 10223 - DNA, 4295 bp, Eucalyptus grandis
  Intron number 1 from transcript Egrandis_v1_0.007996m (loc us Egrandis_v1_0.007996m.g) derived from phytozome v7.0 (c hr-ID scaffold_3; pos 6476150 to 6480444)
agagcctccccttcggtgaggacattgctgcaaatctcctcggtgcaattgagcgctctaaagtttcaatcccagtcatctcggaaaattatgctgctagcgaatggtgcctccgcgagctcattcatattatggaatgcaaggaaagtagagaacagatagtcttgcctgtgctttacaaggtgaaacccaaggatgtgcgacacctagggggcagctttggagaggcctttcgaatccatgagcatcattttgatgaggaggtcaagcaacaaggaccgacagctctgaaaaaagcacttgatctaagagttttcgaatcagaggaatttgctgatgggtattttgttttccttcttttaacagatcattgtccaaagaatttttccgtttatcatccttaatccttgttttgtggagccatttataagttctcatgtattgtgttgtttgacaggtgtgaagggaaattagtaaataaacttgtagaaataatagtgcgtgagcagcaacatgattttcaaccacatcttcccgtgaacctggttggaattgaggatcgtgtggctgaggtcatgaggttggtggatattgcttgcccagacactcgaattattgggatttgggggatgggaggtatcggtaaaacaactctggctacaataatctataataagctttttaacaaatttaagtgccgcagctttctccaggatattagagaaacaactagaagcaagggcatggagtatgtccaatctctaatgatttcagatataacaaaaaatcctgaaagtagagtgcatgattctaaggcagggattacaatgatccgatcaagttgcgaaaagaaggtacttattcttcttgatgatgtagatcgtcgagaccaccttgataatttgattggagattgcaatttcaagtcaggaagtaggatcattattacatgtcgagataagaccctcttgaagtctgaatataaaatgtatgaactcaaagaaatgaaccacaaagaatctttccttctatttagtagatatgcacttgaagaggaacaacttcccacaaatctcgctactctttctagtgatattgttgccaccacaggagggcttcccttagccctaatggttataggttcacttctcaatggagtaagagatcaaatggtgtggagagagacgctcaagaaattgaggaatgcacctgataagactgtaaaagaaaagttgaggataagttacgatacattagaatatactgagcaacagatgtttctagacattgcatgttttttcattggaattgacaaaagaattgctacttacctatgggaggatcttgaatttttcccaataattggattgcaagtgctaattcaccgttcattaataaaaattgatgacaataatctattgagaatgcatgatcaattaagagatctaggaagagctatcgcccgtccaaaagatgtgaagccttggcattggagcagaccatgggacgtggaaactacaaaaattctgggacacaaggtaacaattatgtgtactttttgtgtctccccatgttctctagtggcagtccctgaaataattgttgttctttttctttatttcttggaccattatcaacatgttgttagcattttcttggtaaaagctacatccacttttggcctttagtccatgaaaagtttgcactcgtgattatgaggctaagaagagggttttgctcttttgtcgttttaacattttttttagtagatttgttactgcttcttactatatcacttgttgaaaacaagcatgggtttgaaaatctgccttatgccacttacaaatccggttcatcacactctaaaacgcacgagtctctataactgtatgccgattgatttatgttattcaaccaaataacaaaaactttattgccgatcattactttgttgtctttcattttatcttcccaaaatatatcagcaaataatttttgaagtacatcggcgtgaggataaataaatggatcacatgttatacacctttttcattcttgaaattttacttatgtatgatatatgtggtaatctccttctccgagaatcaaatacattattttatattcaatttccaactgcgaatatgtgcaatttgctcatgtgtaggttctactttttatcaaccaaaagaaattaagttatttgcacctcaactattggctatccacttaagattatgttcaatttcaagtaataagatgttatgcagtggttttatatgtacaacgaatctatacaattgtttgtaggttttcttatgcatgttcgtgatgtaaatccaatatgacaatgtaaatgcagaagtacatgtgcttaatacaaagaaaaataaagatttagcttaaattgcattacttagtgaatgttaaaaacataattgaagaagcacctctaaatatatcaatttttttagtcatctagaaatgcaccattatgttattaacatggtcgggttggttaataacttgaaatgacactacataatttggatgcctcttaatcaacaataaatagaaaactcttattttcttttcacttaaaggactaataaattttagagaaaataaattcaaattctctattgcgactttggcttttcttttattgtcgcctataccaagtaccaacttgtagtcaaattaacaaattacatgaaaaagattgttggaagattgttcaagatacattaattataaaggaagtgacataattcacgttttttttaattttaattatgagttctgcacgtgcatcatggatcaattgtgttcatagaactcacaatattatgataagtgacgtgacaacgtaaggctattctaccagttttcataatatgtcctagtatacatattggtgctatgcatcggtattttcggcacataattcaacatggtgtaaaattaaataacagttaattacaacagaagaaactaaataacaactgacatatgattttgtaggtattcatacaaagtaattttcaaccaaaaattgaaaaagcaaagatcgaaattaagaaatcaaattattgtaggaagtacgtgacgaaatagtgaaaggtgaaagaaattgtaatctcctcatatctgcccttagtgtaataggatatccacctctattttgtaatgtaaggattaattgtgccttcacgcgcgcgtgcgcgtgcacactaacaaagaggagagacaaaaatctattgttaggtattagggaagaaaaatcagataattaacttatcaaataagataactagaggagcaaaaaataataattgctaacctttatttactaattcatatatttttatatgattgggtgaatgcataaatgcactaacaaattcttaaaatcagctcgaattttacgattgattggggaaaattcaatgatgactaattgaatagtacactcatctcaaaggaaaattgttcaatcagtcataaacttattgtacgaatcttaattcagtcatgaacttactaattttgtcaatttagtattaaacttttgcacagaatttaaaaatgtagtctcccaaatcaattttcgcttgaaatcaccaacatggcagtccaattagtttcggctatcctatacggcccatccacacattaatgatttcccaaaaaaatcggccgaaaagactacattggaattttacgcaaaggtctaagactaaattagtaaaattgataagtttatgattgattagacgatttcttccatgtctgaggattagttgttgagctttgagcttgaatatccaagaatgaaaacttaagttcaaaagaccaaattcttgtttctatccagccatatgccaaaccaaaaatattttatgaatgggaagttgtcatactttataaatgcataagtttgattagatactttttgtttttgaaatgtgtaacagttctcacatatgtcaaagggacaccatatttagtcaattgtcaatactacctatgttacaaaatttaatttcaaaatctataagaatacgagactgatttcacttaggaatttcacataaaacataaaaaattggggcatacgagtgaagatcaacatattacatgatcatgtaattgtagaagattagatatattgcttttgccctctaagtgtagacaaaatgcatcggccacaataacatgtagactatactaacaaaaggaggttggatggtatttacaatcttcaaatttattttattttttgtaggaggaaa

SEQ ID NO: 10224 - DNA, 928 bp, Eucalyptus grandis
  Intron number 6 from transcript Egrandis_v1_0.000463m (loc us Egrandis_v1_0.000463m.g) derived from phytozome v7.0 (c hr-ID scaffold_6; pos 26951027 to 26951954 reverse strand)
caagagaaacttaatcaggtaaatgcaaagccaattggactagggaacattcataggcttgtgagcaaaattactgttttttctttaccatatttcttttctgacgttgatattttcactgctttaggatcttggcttgcatctgagggtttacatagtctttttgctatatgtttgagttttccattgaaccttgtgctgcttttgggatgattagaggttttgtaaatattctttggttttcatcatagacgtccagtcaatatgtgccaatttagctatgtactttgaaagcttttttgtagcttgtgtttgtcaaatgtgttaggtcccaaatctgatctgttttaaagaggaaaaaataagatttgaatggtgaattgttttggataggagcaagtgaaccttttggaatgcattcttttcacttagatgcttgacatacttaaatggttaattaaaggaaaactaccaaaaatatacctcacctctcatcagatgaccacttgcatacctcaacttttgaaaatatgagttttacctttggagaccaatttgcacattcacatcaaatagccagtgaccatagttatgaaaatatcattccataaatgcccctccccaaatcctaaattatcacacccacccacccaaaacactcaaaaccaactgaaagaaaaaaccacaaaaccccatgcaagattttaaaatgagttttcaaggagaggcaatgtggtcttttcattgtggggtttttgcttagaggtatgtgaatgttatttgcaaaaatagaggtgcataagcagtcattaggttaaaagtgaggtttgtttttagtattttttttaatttattctgtagtgagaagtcctggagaagattattgtactaattctaaatctttgatatgatcatcctgctgtagctg

SEQ ID NO: 10225 - DNA, 1706 bp, Eucalyptus grandis
  Intron number 8 from transcript Egrandis_v1_0.039623m (loc us Egrandis_v1_0.039623m.g) derived from phytozome v7.0 (c hr-ID scaffold_1; pos 5307559 to 5309264 reverse strand)
attgcactggtggagcagaagagtcatcattaaaggtgcttactaaatcattttttgtgtgctctgattggtaaaatcagcccacttttttaggttaacttgttcttggaaatgaagtagcataagtgatcaaaataagaaaaacacaagttctgccctctttctttttaagggaggcctgaggttgtcccctcctgtcaatgtatccttgtaggtccagtaataatatgtttttgaagaatgagttattgcttgtttaaggaattagggattaatcttttttgatggagcttctgtttcttgtgtattcaaccccattattgatcatatatatgcctttaaccgtagatttgcaggtgccttttttagtcattctttgtgtttaccctttcatattctttgcatttactcttagattgatgcacctttgctataccatctgtagaaaacatgcagcaggtactgcaattgaatgtgccttgtaagctttttatttaacaagggaaaatgataggattgaaaaggtgaagtttgatgtaggcctattgctatagagagtttcttaggaatccctttgtgctttttaatgtaacggttcaattacatgtgctccatggcttgcttgattcgacttgtatgcctttcatccaaaatccttgacataatttttctctgtggtccttctcaatatctaaaaataacatctgctgtaactgtatatctcctcaacctccttgtttgatagatggccttttcagtcaactttccttgctcactcatatggaattctcttttgtggtttgagatatttgaaagcttcatttagaagttgctctcctatgatggtcattgaagacagaagaatatgttgacgcagaatgcgctgctgatgttagaaggttcacatttggcattggtggtaacctagtttattagtgaagtaaacttctagatcaagtgcagatgctgagtatacagttgtgacaggagatgttatcagacttattttgcctgagaaattagttgaagttgtaggactaaaagttgagcaactgatcttactctattgtgatgaaaaagcgactgctattggcgttgatcagagtctggttcagtgtgttagagcaggacatatattgaaattaacaagaatttctcaagtgaaactagacaacaggctcatttgtagatctttcgtgaaagtgactggtagatattttcaccttgggctaagagtataatcatttttattcccttgtttgcaagatgggcatggaaaatatctagcctccatcatgaggggggaataccaagagggttttttctttttggtgggtggctgacatgtaatattaggtagtgtcatattgataatcaagacatatgtattgggtgtaacttgtatcatacaacttacctttctacgctcttctgtcttctatcaatccccaaatcacgtcagaaaagtattcattttgaagctcccatggcatatgcagatttagtggtctattgcaaatttttagaattgttggtgtatggacagacctgtatgtgcaggatgttccccgatgattagccttccagtttatccttcacctcaaccaacttcaaaattcattgcaattatatctgtcttaagtttcttttttcgtagttgcagttgtttgacttgaacttggtgattgtattgcaggtagagggtg

SEQ ID NO: 10226 - DNA, 7481 bp, Eucalyptus grandis
  Intron number 9 from transcript Egrandis_v1_0.004158m (loc us Egrandis_v1_0.004118m.g) derived from phytozome v7.0 (c hr-ID scaffold_7; pos 18392094 to 18399574 reverse strand)
gttcacctctggttgaatcaaaagctagatcaaaggtaatactctcgagtactttttggagtattgtattggttggattgatacaatatactaaggttttagagtgatacaatatagtcacagaggagaaagcaatgagcacagggaggagactgaaccagccagagagatatcaatttcagctactccatcggctggatcaacaagcaaccacgcaaagattagtgccaatacttcaaccttcaaaattaccaaaagattcatgccttggtgatacaagcctctcgattaatttgtgtatatagtgaaggcttttattggtattgggcttaaggcccgtccgcccaagttgggcccagaaagctcggcccacggaaatgcggcccgtggaaagaagggggtataaaagggaggagagagagagaaaaacaaccgttggtaaaattgtacgtacggtgttttttctctcaacgctctctccctctctcccgttttctccaaaagtgaaacagtgaagcaattgaaggagtttgcctcctcggatcgaacaaggctcgatttctcttcctctgacggcgtcggtgtctaatctgtggctaacaaggtacgctcaactcagtggtgtgctttacgatcggtgatacgtgtttttcctgggcttcgtcttccgcattgatttaggggttcgattcggtgtcgaatccggtttttcggggatcagtaattcccaacattggtatcagagccctgtttcacgtctttcccgatcaattctgatgtttttgattgatttttcgcgaaatcccttcggccgtacggaaccgggcgaaaatcccgacacccgagcgcttttcgcccttttttctgagttttcgtaagtcgaaatcaaattatgaaggcactgggagaaaggcgacgtcgagacgagtccgaagagtggtcgcacgccgccgtacgacgccgcacgcgcccacacgcgcggccagaagccgctgcgcgtgggcgcgacgcgcctggaagcgctggcttcgccagcgcgtgcgccacacgcgccggtggcgaaccggcacgtgcgcgccggcggccggcgaaccgccacgcgccggtccgcggaccgacgcgtgctgacgtcacgagatgacgtcatcgtgacgtcatccaacggtcggtaaccgttcggatgacgtcacctatgacgtcatcgccgacgacgtttcgccggaggtcaccggccggcgacccgactcgaccggtgacccgacctgactcacggacgaggcacgcgcccggcacgtgccggatgacgtctgcgtgacgtcatcgcctgcacgcgcgaggcacgtgcggtcggtccgtgcgagcggtccgaccggcccgtccggtccgaccggttcgaccgtcgcgaccggtccgacccgcgcgcccgttgacccgacccgttgacccattgaccgttgaccgaccgttgaccgttgacttgtccgttgaccgttgactggcagttgactttgaccattgacccggaaaaaaaaaaaaaaaaaaggaatttgttttgtttttcaatcatgcctatatgtggattataagtaatccatttttttaattctgcatttgttgcatgaattatggaaatttatgtattttccattttatttattgtggattataagtgatccattttagttctgcatttgttgcagaaactatgatgcgtaatgcacggatacctgcaatcccgagaacggacgaaggaagagctagactgaaaaggctgatgaaagagttagctgattttcggtggcttgatggtgatttagtattacatatggtcaaggtcaatcagatgatacaggaaatcatcaataatggttatcttatgccggattttgagaaggtgccggctttgttgaacactcttccacctgaatggcaagcagtattagatcggctatgggaggtcaacgtggtcccgggttataggaggctggtggaaacttttgtaagagagtactataggattgagttggccaaaatttcaacccttagattgtgctctacgtggcgcagagtgaatgcgccttggtggcgacatgaacactctccaaaagtttttccatggttggcaaatgtaccttcagttttctcagatgttttgactgatagattagaagggacattccctaattatttcttagattaattatgagacgttttatggatgtaaatatctctttccaagttgatattttttctttgtatatattgctcagtgtaatgtatagttgtattatgtgaaagcactattattatattgaatgttagattatatttgctttctgttactgctgattgctgtgggtagttagctgtgggtagttatagaagtttttgtaacttcatagaattgattttgcatatgacaatcatattaatgatagttttaagttaggatttttggaggatgattggaaacgtagtgaccttttgattctgaagccttacttaaaattattcattaatatgatgggtctatgtaaatagggatgcataaatgataggcattaattatccgtgcatgtatgtctgatgtgttcagaacgatagttcagcaactaagaatataattgctgatatgaacggctacaattgtgaaatattgaatatgaagattcaatatgtgctggaaaagcaaaaagcactagaagctctcgaccatgttatggaagatcttgagaatgctgtgcgccaccttgagctggtagatgaccgcttaatggcatgtgagctgagaatagatatttgcaatgctggttctagctcataaagggttttgagctctaagcgcaagcgtattgattcgttcaatatgtgggaatgcaaaggatcaagtccttgttgcaagaaatcgagagttaaccaacacaagagaggaaaacatcctcaagtaaagaaaatgtcaagggaagggtgttacaattgtgacaagagaggtcactatgctcgcgactgtcgtgagctaaagaatgtaaacacctcttgtacatctgagaattttgcttatgtgtcaagttctgctttattggctgaatccaatcctttgtggactgtagattcaggagcgacagactatgcagcgaaggatataaaatccttcgtggaattttgacgagtaccaactggaattaagtgtatctatgtaggaaataactccagagatgaagttaaaggaattggcaccggccaattgaacatgcgtggtagacgcaccttattcctacacgatgttctatatgcttcggagattcgtcgaaatttaaatgtctgttttgatgttggttaagcttggttttagaatgaacttccataataaatgtgtagatttgtgtttagatacaaactgctatggttgtggtcactttctagatggttttattgtactaaatgttgactgtgttgatgtcaatatgttatccccttgtttcacgtcttctatcttatatgataatgatgcgaatatgatggcatgctagacttggtcatatgggccaacaacatatgaaaagactagccaaaaagggcttgttgggcaatattgaaaaagttgatttgtccatatgtgagcattgcctagtagggaaaatgacaaggagaccatttggaaaaggtaaaagagctgaatttcctcggcatttaatccattatgacgtttgtggttcaatgaatgtgagaggaaggcatgggactgtttacttcatcacttttaatagatgattatactcgattcggatgtgtctatttgatttctcataaatctgaagcataagttgtttcaaaaggtttatgaacttggttaaaaaaaatcaattagacaagaaaataaaagtattgagatccgatcgaggtcaagaatatttatctgatgagttcagaaaattatgtgatgaaaaaggaatagaaagacagttgtctattccatatactcctcaacaaaatggtgttgcaaagagaagaaacagaaccctactagaaatggttaggtccatgatggcgtatgctaacttacatatcacttttatggagtgatgcgttgttaactgctgcctaaatacttaaccgggtgccttccaaatcagttagttccactccatatgagttatggataggtagaaaaccggacttaagtttatttaagccatggggttatgctgcctatactcatatgtcctctcacaagtttgggaaattgagtcccagataaaagtagagtattttaatgagatactccgaacactcgaaagtgtatgtgttcatagatgagcaggaaagtgggagaataactgaatttgaatcacgggatgtcacattcttagtggatgaattttcctaagaagggcgaaataggagaagatcactccctatttgaaaccttggatctagataatgatattggttgagttcatccaagtgggagtaatatgagaagtgatgaattgaattcaactcattctcaattacaaccacctgatgtgacgacatcatcattacctaatccaagtgggagcataatggggaatgatgtgctaagtgtacaatctcccatacggtgaacaagtcgccaaagtattccccgtcgacgttttgacattgaaggggaaacttttatgattgctccgcaagatgaggatgagccaagaaatattaatgaggctctaaattgccctagtaaggagaaatggatttatgcaatgaaagaggaaaatggagtcaatgaaatcaaaccaagtctgtgaactggttgatcttccaaaaggacgcaaagccattgggaacaagtgagttctcaaagaaaagcgaaaggctgatgactcgattgaaaggcataaggctcgccggcgaaggggtataatcaataggaaggaattgattatgaagatattttttctcctatagtaagatttgccttgattcgcatagttttggcaatagtgtttagtatggatcttgagttacatcaaatggatgtaaagactgctttcctcaatggagaattagaggatgaaatatatatggaacaacctgttggtttcatagtgaaaggccaagaagaaaaggtatgtcgactttgggggtcgatatatggccttaagcagtcgtcaagacaaggatatatacgttttcataatgccataatggcatatgactttacaatgatagatgaggatcattgtgtatatatcaaaaagatccaaggatcaatttgtgatcatatcattatatgttgatgatatactaattgccggaagcaatatggagctagtcaatactgtcaaaagttggttgtcttccaaattttgaattgaatgatatgggattgtaaacccattgacgctcctattgcaaaaggtgaaggattgagccatagactgtgtccaaggactccacaagagaaggaacaaatgaaacatgttccttatgctagtgctgttagaagcttgttgtacgctatgatgtgtacaagacctgacatatgttttgcagttggaatggtgagtagatactaatccaatccaggtcaagcacgttggaaagccgttaagtgaatactgaggtatctaaagtggactgctgattatatgttgagttattatagaaaggatctgcgactctaaggctattctgatattgattggggaggagatttaaatgaaaggaaatctacctctaggtttgttctcttaccgaataatggcaccatgtgttggagcagtaagaaacaaaagtatatagctttgtccacgatggaattgagttcgtggtattatcagcagcagtataagaagatgtttggcttaagagattattggatcatttaggtgttattggaagtgctgcagatttgttattagttaactatgataatcaagcagcaaaagtgtacactaaagatccaaatatcatggcaagaccaaacatatagataccaagtataattttgtcatggatatgattgcacgaaaagatgtgaacttagagtacatactacgcatggaatggtagcagatcctatgacaaagtcaatacctagagatgtgttttgtggccatatgaaatctctaggattgcgtagagactgatgtactgaatattataatttttccctaagtgttcacatatgatgaatttatgtttttatcattaatgcctatgaatctttgtttgatctttatgcatcttaatgctcagtgcattactttaagttagaagaagtatgtcggacagatgagattagcccactcacacgggtaatcgcctctatttactgtgtgataaatagagatgagactgtttttaagcttattatctaggtgataattgagagctcaagcttaaaacacgtatgtcgccttaactaggtgttaagatgaggacataatacttactatgtctgaaagtaaaataccccacatattttactttatctgtctatgatgccagatgtgagttctgatgaatttagtgaatgagtagatacgtgaactcaagttagacattgggtatgtctgaactatcatctgtacggtattgaaaggtgtagacatacgctccatgggaaaggagttaataccgtaatacgtatttcatactacgtatgcatgagacgaccaataagagtggcaaaagtttgatctcaacttttatgtcgtatgagactcttgaggaaaagagttcctcaatttcttagtcccctcaggactcttacttattctcaagatttctatttagtgtttgctatcttagggtgttgccaatggtcaggagatgattcgatctaatggggcattcctagaaaagcaagctggactgaaattgagagttttgaaggaaagaggaagatcgattttggagaatcacattgtggttttgtattcactggtcgaccaattatgactgtctttgtgataattataattgtgaatacaatatatatatatcattgtttaaaaagagatcaaaagagagatataaatgtgattgatcgatctagggtactgcatactaaatctactcggagtgtgacgcccattatgagctgctatatattcctaacagatgtatagcaacgagctctcaaagtatgctggtcgcacggattattcaccggtatgaatgttgaagagaggtaaagagaatcctgttcggcccaccttgtgcgagtgggagatgaaggcttttattggtattgggcttaaggcccgttcgcccaagttgggcccagaaagcccggcccacggaaatgcggcccgtggaaagaagggggtataaaagggaggagagagagagaaaaacaaccgttggtaaaattgtacgtacggtgttttttctctcaacgctctctccctctctcccgttttatccaaaagtgaaacagtgaagcaattaaggttttagagtgatacaatatagtcacagaggagaaagca

SEQ ID NO: 10227 - DNA, 8039 bp, Eucalyptus grandis
  Intron number 3 from transcript Egrandis_v1_0.020009m (loc us Egrandis_v1_0.020022m.g) derived from phytozome v7.0 (c hr-ID scaffold_8; pos 68244679 to 68252717)
acatcgcatatcacactactggggatttccacaaggtactcctagcttttaatctcattgcaggatcatcctgtcgatcaaatagatatgaagtcaattttctgtagttgcactgcgtgtgaaagtatatgtttctcaaactgatgccttgaatacacaaggccagaagcttggagatttatgaagagaaatactaaaatatctttcaagtttgttaggtatgcttctaatggcaacttgtaagaatcacagaaatgtgaaagtcttgtgcttttctatgctattctgtttggctgtgtatgacctcatagtttcctagagcttgactttgttgtttggagctcaacaaagcatgcttattgctcacgcatacactgcagctgcttgttcctctggcaagtacctttcggtatgaggggcctgaggtgaacatgacattggcaagatcagaggctaagatacttcatgagaagattcacaagaaggcttacaatcatgatgagctcatcagaattgttactacaagaagtaaagctcagcttaatgcaaccctcaattactacaacaatgagtttgggaatgccatcaacaaggtatcctacttattttctccatacctacatactacagtattgccaaatttataatggtgtcaagtggatcttgatctggaacttgaacttaactaagcaaaggattcaccttggactctctgctctttggattaccttcagaatttgtgaagttgcagtttataatgcaattgcacatgcgtctaaaagcaagatattgaagtgctcccacaataatcctttacttctctggatgtttggcattgcaaatgtatctagagatctactctgctacaatgagattcttgaatgtgaccttttggagagtggaatgccacgattaagattttctcttgataccggcagcttccccccacattttcctgtactgataaatgaggacagatgaaagatctttttcatctgatacctagatccgtatccatcattatcataagacaaaacttgaaaatccatattctttggtctctaatgtaacaagattgatgttttgatagtagtgaatcgtcctcagatagtttttattataaaagagaagctgaaacctccctacataaagactaacttgggctgatgtcactttgatctgcaagttgcctagttgatttctcctgatatatgtgtttatgaccactctaatggtatcgctagatatttttcatttatatatgttcctattctgtatgtcagttgttagctgttgaatttctttcaatttcttagtagagatttttaagttcattttaagacacagcttactctgggagattgctttggtgctgtaatcatctggaaacctctgtatgcaggatctgaaggctgatccaaatgatgaatttctgaaactgctgagatcagcaattaagtgcttgacttatccagagaagtactttgagaaggtactgcgtctggccatcaacaagctgggaacagatgaatgggctcttactagagtagtcaccactcgtgcggaagttgacatgcagcggatcaaagaacagtaccacaaaaggaacagtgttcctctagatcgggctattgcaaatgacacatctggggactacaagaagatgcttctcactttggttggacatgaggatgcttgagtgagacttgtgtctcagtgttccgtgcgaggtagatttaactggctgcgagatgtattgttatggttggagttgagttgagagcgtcttgtttaaggtttcgtgtgcgctcgtgatttatgtttggggaactttttgctggtttgctatggttttaagatagccatggaaaggtgcatttagcatcagtatggtcatgataagctggtggttttgcacatttatggtgtggaatccaactaataactgggaaaaacgggactgagaagtgattgtcgaggaggttatgtttatcaatcttaatcaacttgcttgcttcttctcaactttgaagtcgtaaaacataattgtcttcgctacttatgtgaggggttgtcttcagagaaatgacgagagatgtgatagagatagcttaatcctatcccttgaaagccacactcaagtgtcacggtcaagaggtttccatggctaaaggaccgtgcatcttcaaggaggacctccgagatcaccatgatttcccgcaagagagcttccaaaacattccaagggcgggcgatatgataattgagtcgaagtctagaactctcctatcattagtgtccatagttggtagattgagtggtacaaccttgtctgctcgatgaaaactcgattaacggttgtaatgggagggcttctagtataagaaggttccctccccctcatttgtatccatccaaccatttcagtaatcaaaaagttctcaatccgaatgaaccgggtgagcaagcgagcgatcaatccgagctggcttaggtgccccaatgatccgtaacacaagcatatgataaaaagaacaaagttgtaacagcaacatggtattattgatgattgctatatattgctctttatttctcaagaatcccagcaaaatgatcctctaaagatgtaaaggaatctgcaaatacctccattggtcaaccacacccagacaactgaaaattgatagcgttagattatcccaatatgcttgaagccgaaggggtacaaggaggaggcggagtactcgaaagagatgataccaccggagggagagctttgcctccgtttgccaagcagtcgtcctcggcattgccaaaccgctcgactatttccaggtctgggaatgtcagagctaaatgagagtcacggttaaggtggacactacagagcaatggacgggcacaggttctttatttcaaccaagaaaaccggaattcctattttttcttggataaacaaagtaacaaagcgtgacccaagacgggccccctctaaccggaccagatggatttatgggccacttggttgggccggctcgacccaacagcaggcttaagttctattttggagagcaccctagtgatggaaatgcaaggaaaagggcccaaaagttgtgttcgtttgagttaaaaatatttccgcgaattaggctccatttagaaaccttttatttttttttggctctccaaactagaaaggatagaaattcatttagtaacatcaattaatttttctattccctcgaatagaaaaacgattgaggaatagatttggaatagaaataagaaatagaaaaaagtaacttcttgaatttatagaaataagtcacttttttttttctttttttcccgtcttcttccttgccgcttgtccccccctactaccgcctcccctcggccatcgggcggctgtggccggtggacggcaaacaaaggacaggatcaacaaccggcacatagtgaagaaaagaaaaagagaaaaataattttaaaaaaattattaaaaaattaaaagaaatgctacgttataagaaaatttatggattgtactaaacgcatttatattctttttctatttcgagaatataaattttgtgtagttaccaaaaatgttcttttacttagaaattattctagagaataaaaatagaaaaagactatttcttaaaaaaaaaaaaattctaggaacaaaaatgttactaaacagacctttagtttctttgactttcatgtgtttggtttattgaaaataatttctatagaaaaccatttaaggttgaacaaaatattcatacttaaaataagaaaaatgaattctctaatgaaaatgatgttcacccgtattgttatataaagtaaatggccttttctatttttaacatatcccaattgttccaaccccccccccccccccaaaaaaaatacttgtctcataaatattctattcatgaacaatcaattcgtaatttaattttaatttaatctctcacatatttcagcattcaaatttgaatttttttttcccatccaaccagcaccatcttaaaaaaaataaaaaataaatctcaatacatttttctctttccacgtctattgattcatttttttttttgtgttgtctgtatttattaataatttatttctcgttcctaatttatttgttgcgcatatgcacattcgcgagtgttatataccgaaggtgcttaacattatttcaaaaatcttatataaatgattatataatcacttaaaaaatttcacatgctttaattaaatcttttccttatatgttaaagaggaaaaagcaccaaagtcctacattttgcttactgtgatatatttacctttatgatgtggacacatagtggcaaacaaagctaagtgactcaaatgaaataaaaactgcgctgttttgactgggaagtatgctgacttggtgcaaattttagggctctttgttcatgttcttgttgggaaataatccagctgtttgtgtttgctgtgtttctattcaagggacagaacacacatgactagacatgggaaacaagcacattcaggccaaccaaaaaattgacttcattaagtggtaatttctctgtgtgattctcataaaaaacgtcagtagaaagaaagagaaaatacatgaatctgggcttcatttggttacgatacaaacggatatgctcatggtaattcgtcgaatgaaaaattctcggaaaaagaaagagagagagagaatttagttaagtagaatgttcgagcccattaattttttgagttgcattgagaatagtcatctccatcataggaaacacttaagccctcatcgttactcaccgatcatcgctacagcccttgaggggcacatagatgccgctggaatcgtgacctacggctaagtcttaaagttgctggtatggtcacatccttcaactactgactaccgtttgtcatccatgctttagccataatactctccagcaccatcatcaaatcaacgagataatatttacattacgacgtggatcttttcattttaagttaagtgatcgtcatatcaactttatgttgagataataattgggatgggacgttgtctttttcaattttaagccaagtgatcactacttcagctccatttgccatcaacatcccgtaagtctttaagtccgaacccttaacatattcaatcggaccgattttcctgcgtaggacgctcgatttgttattgtcggtgcgagggaccctagccatgcccgatctctcccaccacaaaatatgaacgcgataaaatattttcttccgggcgtgaggaaagggagagcgtgtgatccaaagtcagaatagaaaaataattcattcagaaaaatacaaatgaaagtttcttcttttgaggccgggcagaggcagatgggcatgatgcctccaaatggaaaagcaacaggagagtagtcatttactttttgacaattggcaactaattaaataattaataaaaggaagtcgaacaattcaaaccaaaagttggtgtgtacgtgggaacacgctttcagatccgcatttatagcaatcaaaatccgcccccacctgtcccactgtcctaataaaagaaaaaaagaagaaaataaaatcatatcctaaagctgaatttggcaataactttaacttattcatatcataccgagcatctcctcttttaggttcaataattctcattaattaattttctaaaaaatcccaactttaagttcaatccaaatttaccccgaactttatttatcaaaaaaactcaattttaagttcggttccaaatctactactctaaactttaactttaatttcaaatatgtcattgttagtcttttgtccaaaaataactatttaacgtctctctcaaagaataattttattttggagataatttccacgttaccttattaatgttgatttgttaccgatgtggaaatatcacgccaaaagcctcatggtgattttggacggtcggttaacaaaagtaaatttgagattaaattatacgtagatgattgctttttcaaaaaaaaaatttgagataactttaggattatgctcaaaattaataatttctttagatcaaaaaagatccaggattggatataaagttgtagacttgtttttagacaaaaaaaaagaagaagctcaggttagaattgagacatgacataaagtttgagattcttttttgaggtagaattagattaaatctaaagggttaatccggtaataatcttgatttcccttaatatttctctgtctgtctttgtaaaagcccggcacagcatcgtcttcggctcctcgcgatatcaccaacttgcttccgcacagagagagagagagagaatggcgactattacggtgccaccgtcggttccgtctccggctgaggatgccgagcagctccaaaaagctttcgcaggtctcctgtattcatcatcatcatcgtcatcgctaaacttttctctttccatctactttcgtgttgctctgaacattcgactacgtggatcctcttcgagctgtcgtttcgtgcttcgatcgtcgtcggtttcgggagatcggatgctcatctgggtgtctttatttttttttctttttaatcttagcacaatgcatgtccttctctgtgtttgtttcgatggatctatgatcccgtgtcctgctgcggagtctctttctgatctgtgtcatggattgttagttccttctgatcaagaatagtttttagcgctagacgttcctttgtccgcgttgatctgatcagtcttgtcttacatgtcccctctttgcttctgctactggatgagctaatcaaaaacacagagaagaggcaagagccattgcttccgagttcatttgactggtgttaagcacttctacacatggagtttggtagtgattattgattatgcgcattttgtaggacgagttcagtggaaaaaagttcaaggatgatgttgaataattgataaaagttctgagaccatttgtgtcgtaatcgccatttttcttctgggtttttgtcaatcacgcgggctgctcttctagcgtatgtatccgcagcgcatttttgtacgttctgatggttgtttgtttgtggtgggcgagcaaattgtttagctgttggaaaatttgtgtccgcaggatgggggacgaatgaagatctgatcatatccatactgcctcatagaaacgcagcgcagcggaaagtaatccgacaaacatatgccgagacatatggggaagatcttctcaaagcgcttgacaaggaactctctagtgactttgaggtcagttttctattctgcagtgtgaaggatctctccaaaagccggttcttgctcagctgttgtcctctttgtttcccgtctcttatttccatcaaacgtttatcagagatctgtgcttctgtggaccctggatcctgcggagcgtgatgcgttcttgtccagtgaagctaccaagagattgacttcgagcaactgggttctcatggaaattgcttgcacgaggtcttcaatggagttattcatggtgaagcaggcctatcatgctcgttataagaaatctcttgaagaagacatcgcatatcacactactggggatttccgcaaggtactcctagcttttaatctcattgcaggatcatcctgtcgatcaaatagatatgaagtcaattttctgtagttgcactgcgtgtgaaaatatatgttgcctctactgtctcaaactgatgccttaaatacacaaggccagaagcttggagatttaggaagagaaatactaaaatatctttcaagtttgttaggtatgcttctaatggcaactcgtaagaatcacagaaatgtgaaagtctcgtgcttttctatgctattccgtttggctgtgcatgacctcatagtttcctagagcttgactttgttgtttggagctcaacaaagcatgcttattgctcacgcatacactgcagctgcttgttcctctggcaagtacctttcggt

SEQ ID NO: 10228 - DNA, 1159 bp, Eucalyptus grandis
  Intron number 1 from transcript Egrandis_v1_0.033981m (loc us Egrandis_v1_0.033981m.g) derived from phytozome v7.0 (c hr-ID scaffold_4; pos 37725877 to 37727035)
accttcagtccaccagcatctgcattgaccgccccgtaatctctctctctctatcgcgttggtattgctgtacgaaaattcgtgatgggctcattcccctccgtccaattcgtctttttttccatgctttttttgagcttgtaatcgcgggtaggtgccgattcatcgccgctcggaccattcgtgtcgtgggtctgcccttagaaattgtgggtccatggcgggattatccgccgtcgcccgaatcgaaactggttttcattgctgggctgtagaaagttcgtcagttgaaatgcaagatgtgggttcccctttgattgcctgctttcgccgcgtatctatcgtgccggtctcgggcagtgttgttggcattggattggtcataagggccagcgaaacgtttctgatcacggggagcttatggttgccatttgacgcggctaatgtgaatgttattttcataggttgcgtgctatttagcctgcggggcgcgggttgattttgttaaactgcgcttggtcgttgactatgattgggtgattgttttgacttccgttggggcgtgcttggatgaagttcttttttggctctaaggtgaatgttgtcatcatcaggaaactactgtgccccacgaaatggatagtctaggatgattctgtattctcctctctttgttgtaggtatggtattgcctttgtatgctaatggtgaaataaatgatatgcgcattgctggaagaaagatagcctcaaagcaaatcgaatttatacttgagacgtgtgtgtattctgctgagtaaaagattaacctgctttcattgttataaatcagatagcatgaaagtcagagattgaattgtgctagattgaaattgtggactgcatgggctacctcttctgatccctttccatgctgaggcagcttcatggtggccaaaggccaagactagggatgctatgtttgaaatttggatgtccttgcatacttggatttgaagattgtgactatgatttccttcataatttgaatatgctaaaggtttatttttgcaaaatatttactgcgcttctgtgtttaccttatttaggctttggaaataggattatctttcgtgcatagtccttgtaactggtgactaaaatatatcttttttcttagt

SEQ ID NO: 10229 - DNA, 2925 bp, Eucalyptus grandis
  Intron number 11 from transcript Egrandis_v1_0.052039m (lo cus Egrandis_v1_0.052039m.g) derived from phytozome v7.0 ( chr-ID scaffold_11; pos 21349337 to 21352261 reverse stran d)
gttcagttgcaccttatcagaaactgattaacgtacggtattcctcattacaggacatatttgtgtagctttggtggaaattactgcttatattttaagacatgtttgatactacatacattctagaacatcaggaacatgcaaggaaaacaaaaatagaactttagaagaatgggtacatgagaccataggcagttgaaagtaacaataatggaagaggttgaagcagatccttctatcttgtctgatgtacgtatcttacaatggtagatcctatgtaagtcgtcacctggaggggctttcatgttgtaaataattggtttctgctctggctcacgtaacatccatagatgggggaaaagttgaaggagaatgtagtttatttaaattcctcttctttggccatgtagttcctgcaaaattgggaaacagtggactgaagtcctcatggtcttgtgtatactgcttcctggtattggttaaaatctttatgagtaagtatgtgcattgtatatgaaaattgtaagccttgtatggctatgaattgattcacaggcctcaaaacatatttctattctaaaagaataaagctaatttcgtggctgcagtatggtcgagtcacaacatattccctcatttattcatgtctagctgcttctgccgagggattaggcttcgcagttgcagccaaaggagaagatgattaatgccctccaaccagtagaaaaacgaagaaccgaaatacaagtggcaaaatttaaaatcatgtggtctggatcttgtggatgccttgttggcccctaagcctattcaattgaagtttgcatttgtttcatctgatgaaaaaattgagaaattttaagaagccaaattggcttatcaaggggcagtggagtccctttctcacgtgttattattaaagcttgggttcctcgtgtatatggttgcccaaagaagttttatatgcactgcacagatgtacacttgagtgtcttgcgaacatcggggaattttatttgcctacaggacttcctgtcagatgatcaggagaacatacttatgtagaaattgtctaacctaatctgcgattttcctttctgcttgtagttcttaacagtgatttattactggacaattgcaattctcaggattgtaattttattcaagcaatagtgttttgattctaaataatgttctttcagattgttatagtgtgagggttattatgatcattaactctgatagggttattatggtcattaagtactatttaataataaaagtgtgagatgtgtaaaatcctaatcagttttacacgttctcctggttccttctttatcaatttctacatggtatcaaagccacatcaacaagcatcactcaacccaagctggtgttggctagccctctcgagtctaagatttgatgccgacaagcatagtcggcttagatctagcctcattgggttagatccgatgtcgtcaggcgtcacactgtcttgtccatccattcaagatctgacgctggttgagctcgcgttcctccgtgcaagctgatctgattggtgtggtcctctaaggttcgctcgtgtgttcgttgttatcaattttacacaaaaaaaaaaaaaaaaaaaatttgcagcaacttgcttgatggagatgttgatcctgttcaccatgaaattgatgttggatgaggtggtttctagttgggcataatttatgtttttgggaatttgtcttgatgaaataggagttgattgaagtattatggagatttggactgtttgaaacaaatcccagtagtatgttgaattgaattagttggagggatttaaatttgattattgtgttgaaagttcttgcgttatattggtacacattgaattatggcggagaatagaggtgtagtagctgaggttgtgtttacatcctctagtcgtttgacagagaagaagctagaaggtatcaccaatttccaacaatggaagaaaatcgtatcgttagtgttgactggaagagagctacagaatcatctaaccggtgatagatctgccttcgatacaaattgggatactgtgaatgctagaattcttggtcaaatgttgaattccatggaatctcatattgcggttttggttacacatattaatactgtgaaggatttgtgggactacttgaatgtcctttattctggacaagataatcttttaaggatatatgaagtgtcgcagggattttataaggctgatagaaagggtcggccacttactcaaaattttgctgatttcaaacggatgtatgatgagcttaattctctactgcccattacttttaatgtcaaggaaatgcaggagcaacgggagcaattggctgttataggttttttgggaggattagggcaagagtatgatgatattcgttcccaaatacttggaggagataaggtgagttcactcactgagacatttgcttgtgttctaagagtctcacgcgaaccacctaaggatgcattttctataggtgagaactcagccttagcagcccaaggaaatcgtggtcgtagtcgaggtcgtggtggtgatcgaagtggtggcgctagccgtagttttggtagaggccaaccaccctctgctagaaacacttatagtgacataaggggtaataccggtttggttcgaacttgtcattactatgatttaccaggacatatttagagattctgttataagcttcatggaaggccctctcaacaggctacagctaatgttagctaatgcagcagaatctagtacctcttcacaatccgctacgggaggaaagttgatcagaatgtcgaaagaggaatttactagatataatcaactccagatttcccagctggtttcacagtcctcctccacagctacttttgtttagacaggta

SEQ ID NO: 10230 - DNA, 1136 bp, Eucalyptus grandis
  Intron number 2 from transcript Egrandis_v1_0.003072m (loc us Egrandis_v1_0.001909m.g) derived from phytozome v7.0 (c hr-ID scaffold_3; pos 20050471 to 20051606 reverse strand)
atcgggacttcaggttagtgaagcattaatcacatagacttttgtgtgcaaaatgttgtccacatgcatgaggtttccatgattggcatttgccctatcatttattacgagtctttatatattgtgtgcctttcatttttccattatgagctgttttctattgtatcacataaattatgacttctcaaagatggagattggataataagcatacttgtcaaactgaaagctggttttttgccattgcttttctatctgctacccttcactctcaagagtgctgcaagctcttttttgataattatattgagggccatctccagtgctaattaaccgaaataacattccatatatccttttctacattgtagtacagcattgttaggttcctttcacatggaatttggtaatttaggagctacatagactagtgctcagttagagtatagccctttcaaattgcaatggtattcgtcgtgattaattatataattccaactgtgtcatatagcaatagaaaagtatgagcaacaacctaactagatattagattattattgagatttatacagtacatcctggaccattatatattgtaccaatggcaactgagcctttgctttttaatggtgactggtgacatggatccttttaagccatcacgcagtggcatatgccatgtcttttttggccttgtatcctaatatatgaacttatgaaatgatggtaaataagttgaatttgtaatttatttgtatccagttacattccttcagagcctaatttgtaactatgaagaagttacagtagtaaatcagtatggatgatcgctatgattgttcattatgtaccaaaaaacgaacataaaatgagtctgttctacgcacgaccagcttgacggtgtggctggccttctcccttttccagtttcaccatgaatgaatggaactgttgggtagagcaccatgggcatactagtttattctatgtagttcatgcaaaagtaggctaggtcattgtctgaatattattaattttatgaaaaccggaggtgtgtacattaagactgaaacactaatccataatatgtttttcctgcaggagtactattacccgtgagaagtttgaagagctct

SEQ ID NO: 10231 - DNA, 4815 bp, Eucalyptus grandis
  Intron number 1 from transcript Egrandis_v1_0.009958m (loc us Egrandis_v1_0.009958m.g) derived from phytozome v7.0 (c hr-ID scaffold_10; pos 1521422 to 1526236)
ctcaggttaatctatactttcttttcgattatcttaaaaatgatgagctgttccatttatcatctttgagatacgtgtcctttctttcagtgtgttgctgcttttttcacctattgctattttgggtgcttcatagtttgagctttggtacatagaccaatgaatatttgattgctgagtcagtaattttttatctatttatgacggattaaatctcaacattgattcttgtgggtattgttttcttgtcatgttctgaattttgctttctgatcaatcaatctatgtccaaattttggattcaatatgtcaaactggtatcttggtttcccagtggactatttgcttgcagccattaccgttcacattgcatatcaatgaggtttaaagatgatcctaactgtattgaatatctttatttgttagatccaaatgcaaatactttggcttgatgccctcatggccctgtgatcaaggagttaagtcgtgactttgagcatcctagttgattatagcatgccaaataagaaacatgtgtggctgtgatgagccaagattgtcgtcattaaagtaaagaactttatagatgtaaatacaggccaatgctagtgtggctgtgggaaatgcttagccacagaaactacaaatgatcatcatgtcatctagacggatttggagttgttaatgcggttgtaaaaagcgacagtatgaactcatggttaggccactatgagtttattacctcaaagtaagtctttgatggtaggtttcttcaacctcgaatgcataagaagcacaagtactagtatccagatcaggatcaaaggttgttacgatcatttgacctaaactttccaaataatccaaatctcaaataggttacacatttgttaatttctgtttccattctaattaataaagcgattgattgatatccgcctagcctccaatacttctaggtgattttatttccattcaatttcatcttatttaggttgaaattcatatattttgagattcctggtttgaaaataagttgtagttaaagttcccattgtaaagtggaaaaaggccttcaaatgaatattcattttgtgctttcatcttaaaaaagtctggatacttcccaattattcgtctttatatatattccttttgaaatttcgaggatcttactacctgtaatccaatattgacttatctttcatttaaccctatctgcttgtggggtgttctttgaatttcaaaaaccttgataatggttgatggtgctagagttggcaagctagcttgggattgcaatggaggcctctttggcctatgaaaaagaggccaagacccttaagcttgagacattgctcccttcttcaagagtatttgaacttgtatatttttctggtgcctcaatggctccgacatattctaatttatgcattaatgtcaacttccacgcacatgtcgtcataccaaatctgtcttgactatctatgacatcccaaatttgtttatatgcaatttgactgatctaaccctttttgatttgattgacatagggagaggttggcttagttatatttcaactctgttggtacaagtgggttgattaaattggattattagctttttatcgtagtcgaacccggtcaatttaatcacggtttttgaaacatgaacaataccagccactacctgtgaaaaatccaaattctggctctcatatggatgctgtaagtttggggaaagctcctattattgagaaaatcgtagttgctgttcttacaaccctccccttggtaacatactaagaacttgatgaagaaggacgaatctctttaatacccgagttgtgctcaactgggcatttgggagctttgtacacagacaactgtagcataggagaagcaggaatttcattagtgcttgatgatcacctccttccaagttgtagtatggctacctccccactctcttcaaaatcatatgtagagttcaatgggggagactaaaaggagaaagatcgtgagaagggttggcatatgtttcactttgagggtttaattttttaattgaataggactggatggtggacctttaaagcataattcatatcttaatggatgcccataaccatgtgagctattgtagtttgcctaaaaaacaagaattttggtagctctagtggcttgcacactcaattttaaggcttgatcttgtccatctttcttattaaaggggcatggcaattattttgttatcaaaactaaaagattgattgataacggctaagttatttatgccacatcatcctgtgcaattaattgtagctattaagtaggaaagtaagtcattcgttttctatctagaacttctgtgggctctgcctcactttgtttcatgtgatgcagtcgaaaagaagttacagaagattgttgagggatctagatctttggtttttttcattcgtattgttatcatcctgtcctgattctatatagtcttctgatgttctacttttatttttttgtttctctctatttttgtccacgtactttcctgatgtacttgattttttctactaatgaaaccctttatttttctataaaaaaaaggaaaagtcccacctcaaaatgtctattctagttcacattagcaaactatatgtaatgatctttgtcatatattggttccgttagctaaaattgttggatcaagggaaaccgacagatgttacggatctgatacaatttgcccaatgtggttttggaacgttgtatgctttttacttttgcttttacctatacttttacctttggtggttttaccaactcacaactatttacttattgagatctaaggtcatttaaaaccatgtagatttttccacactattttttggaaattaataacataaattatttttttcttggtggataagtcgctgagtacttatcgattcgttagaggtccctgtgaatggatcctaccgattagtgatttgagtgcttgtacctacaattttaaaattaggctatatctattacttttttttttttccaaattagaaaaggtgtcaattaaagataattccaaattgcgtactggatttttttcttggaaaaatattatgagaatggtgatgggacaatcagacaagtagaattaacctgtggtgaagtggccagtgactagtgaatggggtggttcgctgtcctatcggtggtgatggtgacaaagtgccctcgggggcagatataaggaagagcatatcagatggtgttggtgattcattttaatggtaatggaggtcagcttgtttgtttcagaggctggtggcagatggtggtctgctaaacaattgcgagcatggggatgccattaggtggtgaagtaattgcagattgatttaaatgaaagtgataattggtcataaatcagaaactccagaagcaaaaacaagaaaataataggttttctttaattcaactttttcataacgaaacctgtccattactgccaaataactggataaattacagtcatagaaagctacatctagtccttttacctgtatgttgtctttgtacttcagtatcatcatcatggacttgacccttaatttgactgtgtgctgtatagtctttgatggcatgttgactctactgtcgaggatagatcagctattgagtccgatatggtatagggtttaccgtgacagcacattggcttgctcttcgttggccataatgaggagaagtcgtattttgtgttgcggtggctaaattagtgcttttagaatatcgttacttggcctaatcaatctaatttcacagctgtctgattgtcaagagatgcccgagaatcaggaattagaattaatagtttaatatgggatccacctgtctttttcaattcttcttctttatctagttaaggagctgactgattaggaaattgtgaacattgattacaatgtcggagtgatttgaagtaggattctctcctttcctagtgatacgaatattgtggtcccttgttatactgaatagaatgacttacaagctggtacacttacatattgttatttgttgccagattaggcaagttattgttataaagctaaataagagcaagttagcagaacagacaattaatttctcatgcagatttggggccatagcatgtctattgtagaaattaatctggcatgtctattgtagaaattaatctgttatggacatccctttcttttgtgtagttactgatgggtcaagtaaaagactactattggaaacgtactaggaaattgttttgcgggagaatcacagtagcataatacctggaggaaagtattaggaaattgaaaaccgttgtaggaacatattttttgctccttttataggttcatttgtgaaagctttgatttaaatcatattgatgcggataatcagataagttataattcccaagttccagaatctagggtggcaagttcagtgaacctctcaaatttggagttttccttagcacatgcagctttccactttgctatcctggtagaaatggtcaaatctgttctcatagatgtaagatatgttgtatggatgatgattataatggacaagctgtactctccatatttttatcagagtaagcatgaagtgttttaaatcttcagttccttctttgctgaccaaacttctttcatcattctgtgaaatgcaaagtagtacttcccttaagtgaatgaaactcagattatctagtttgaacttgatgttcggtttcgtgtggcaggtaaagatcgtaaaattctgt

SEQ ID NO: 10232 - DNA, 1704 bp, Eucalyptus grandis
  Intron number 6 from transcript Egrandis_v1_0.014247m (loc us Egrandis_v1_0.014247m.g) derived from phytozome v7.0 (c hr-ID scaffold_8; pos 39674251 to 39675954 reverse strand)
gaaagagagagagaaaaggtaattctgttctttcacatatttttccaagtcatttcgtcactcttttttcttttttgcaatgttggtgtgtttactaacttggttcatatcttgatgtgcatgtgacgcagttccatattttgtagtaatctagacattcttttatagtgaaacattgaactaccattcgtcactttttaacgataaaatgtacaaactttaattggtcttagaaattatatttgttaaaatgattttagattgtgaaatttattaaggattaaaaattatgataacatgatgatttcaatttgtctgtgaaaatgaatcttgttttttttttttttggttgcatcagagcagtgtactcactaggctttcttttagattgaaaagatgaactgtaagcatgaaaatcaatttaagcaacattctggtaacaaattaatctaattcatgatctactgtggttaaagttcttttgacctaagctggatcatctagcttatattatacttttatacttgataaattacttaaggtgattgaagaataggaaaaacaaaagaacttggggtgcatgaagaataggaaaatacatgttcaactctgggatggtcttctattgtaggcccatagattttgatacgtttgtgggcctagctcgtgaaagttgaagctgacaatgaaactgcaaactccattccattctcttccacttgataaggggtaaagatgattactggatgttgaggttatcatagtatggcagttatcagacaaataatttatatatagtaattgtactgctgggatatgtcttcaaaatatgaagcaagaagtttcgtgcataaaatgactaaagaagctgcaatgtgtggtttttaatcccatgaaagttcacttatctttcaaatatttaagtgggcttttgagataagctaacaaaatttaaccaacagagttgaaaatttattgtttttgcttcagtaataatgaattggagagcagtactcttaatcagtttctatctcagtcaaggacttgaaagttcaacagctgatgattctgagtatttgggttttgccaaagcatgttatggcatgactatccatgcggcacatgtcactttgtagtagaggaaggcttaaaaggcttggaaaatctcactcaattacctttcttctcagtagaattaacattcaaaatttggagcatcattattatgtagcaaatttaaagggtgtatcccaaatgcaatctggattctgcttaatgcaatttggagagtacctgttgttaaggaacccatcatatgcttgtctgttaggtttgcttgtctaggggtttatgtaggccttcggtacatgtagtcttcctcctctaatagcttaagttcttcaattacatattttagcatttacataactcaatgttatactgtaatttaaccttaatttgaggtattgtatctgtgtgaacacataatcattaagcaagaagcacatcgtcattatctaggttgtacctttcagaatactctgcaaccgaccttttcagtggtttttaatatgagcttttaagtgtacgtggcaaggttgcctctgggagtatgttcatagttttcttgtcaactttcattgtgaaaaccacccgccgaattttgcaggaaaggattcgagtgggcaaggaactcctagaggc

SEQ ID NO: 10233 - DNA, 642 bp, Eucalyptus grandis
  Intron number 3 from transcript Egrandis_v1_0.022207m (loc us Egrandis_v1_0.022207m.g) derived from phytozome v7.0 (c hr-ID scaffold_1; pos 32317838 to 32318479)
acggtgcttctgaaaatgtaaaagggacatgctgttgccagacattcaaaacgttgttgcaaatgcattcagttaaatttcattgtcagtgctgcagtggcagccatgtgtctccatctcatggagttgtctgttgtttgattgcacggtagatacctaaaatctttacctaaatcgacaagagaaatttactgaatgataaaatctgatgcagagatgtctaactacaaataatattaagcccctcttcctctagcagtaggagtgcttttgggagaagactgctttcaagcagctgcaaaaggatggccaaagctgcagtgcaagccaaaacaaatttttgttagccctttataatttcttctgatgaattaaagtgttctatcagattttgccctgaactaccaattggaaaatgaaaatgatgcaagtaccctgttcctctgttacttccataaatctctactggcataagatgcagaattgcttattcagaataatcaaagaatctctctctctctctctctctctctctctcattcatgaggcacggcactttgagcctggaatttttgtcttctagataaaggaattgatactgatttcctattcatataggcaactgttcctcagtttgttgaa

SEQ ID NO: 10234 - DNA, 1766 bp, Eucalyptus grandis
  Intron number 2 from transcript Egrandis_v1_0.038501m (loc us Egrandis_v1_0.038501m.g) derived from phytozome v7.0 (c hr-ID scaffold_1776; pos 86 to 1851 reverse strand)
atcctcagatagtctggttttggaaggtatgtgcccgtgtttgtggattttattatttaatatgctaccttttgagtcaataatctctctctgcatatggcagtttgtttgaatgttatctggtttgtcctttcattatcttttttctcataatcttttcatcgctgtaggcctgtggcgcctcatattctgttttccgtattatgtaaaattttggatctcaaagatgaagctggacttggatcctaattagggaggatattgccatgagtgaattcctttggacattacacctaaagcttataggcagcactgttgggttcatttaagcatcatgagtgataacattattctatgacagaattcagaagcaaagaatgggttgaattcggtaaactgcattaaatcatattcatgaattctgctgaaatccaactctaagtagaaacaagaaaccttgaatttgggttaaagtagatatagcaaatttactaaaatcttagcatgcctctaattttcattaggttacttatctaaaattagctagccaaagcttgcaatcagccatgcacagtcagaatgcttcatcttcttggggacttgagtagatatgtttattagacataattagcttgtctaatctgtgggtgcatcatttcttcccactggagataacgtggccttgagttatggaagtggtcaattattagcttctttcaatttattcttattgtcattaaatttgcagctggaaccaatagttggtcagtctgagcatgctctgggaaaatttgctgaattagacttcttgtttaaaaacccttgaacttagaatgtatcgcagaatcaatctactaaaatttgcttagacattttacatggatgcaaacctctcttcttctgtccaacataatcttggaggaacattttaacccgtgtgatcaagttctccataccagaagtacatgttgtcctgctaggtgagaaggctatcacttgctcatgtccttagtatgcttgcttatgaatggtaagtcatccaattcctcgcgcaagtgcaaggtgcaatttcatggtacctgtcttatcaaccaaaacttattaaataagtaagaagcattcttatgttagcatggccctatttacatggctaggtttgtaggtgtgtgctcctgaaagataatctgtacagatgctctcttgactatctcaagcataaaaatggttctctgcatttcttagtctggactctgcggggaggaaagattgcccttgctttaaaaggcattggatttttaataaaaaataagaaagatgaaaattcctgatgtctaggctctgtgactcaaccacgcaaaatgcatggtggaggctagtttccatggcaatacattatggacagattgggattgttggatgcataatgtgtttgtactctggtatggtttttagattgcagttttctttgggttggacttgtggaaagtttcatccaataacactctactcatggtaatttagtgctgaactattgtagaagagtagtgatgagatgcatttttgcatcacaggatcaaaatgtaggtcctgaagatacctcattactgttggtgagtgatcctttagatatggctggagagacctagttaattccctaattggcataaaattatcttcactaattttatatgttgtaatggaaattctgcattacttttctcttcaaaatcatactcttggtaaatccaatgcagattgtcagaaaa

SEQ ID NO: 10235 - DNA, 1658 bp, Eucalyptus grandis
  Intron number 1 from transcript Egrandis_v1_0.046260m (loc us Egrandis_v1_0.046260m.g) derived from phytozome v7.0 (c hr-ID scaffold_9; pos 1695548 to 1697205 reverse strand)
ggtaagtagagtggagtccgtattttgtgtaagaaactaatctttacaagtaagtataaagattgttttcacaaaaataaattaattagttaatcaacacacacatgattataactttgtaagtatatgtatagatgcttcatcttataaatcctaaaaattcttaagttccttaagttaaagttagtaatttcgtacacgagttggtaaatctaagatatagttaaaaagataaacaaaaatatggcaaaatataagatacattgataattaaaagaaaaataaacttgacgagtaattcaaatgaaaattgatactcaaaattagttgataatttgattggagaaaaatatgtaagccactctaattaagattggcaatttttaaaatgagttcgtgagtaactcaaatgagagttggttatccaatagaaaagttgggaaattaaaagaacaaatagcattggtaattagtaaaagttggtactgaaaactagtaggtaattagttaatatgacaaaagttggtaagtagctctaatttatgttggtaatttcatataaaagttagtagattgaagaccataagtaatgaaaatcaaatttggtgagttagtaattggttatttgctaattataagagaatttgctgatttcataaatttattagtctttttccaccaacaatatttttggcactgaagaactcattgaaattcaccagcacggaaacaaaacatctatttttgagcatggaacaatattattctgcttttggctgttgctgaccctgtttcattcggtaaggtttgtggctcttttcttttggatccttgttgccctcctcgaagtataataaaagctcaaaatgttttgtttgtgggctctttgagttgtttgcattttatttggtcaattgagttaggcatattttcaattttgaccaacccaatgctaaaattgttaccggtggaatttcgagttcgaaaagtcacacatggctaaccataaaataggcaagacaaaaaaaaaaaaaccatagaatagacacgtggctctttctagtaatagaaaatagacattacgacaaaatgttaagtagtgttgttgcactgaaaaagataaaacattaaaacttgatcaaccaatggacacaatgttaagtagtgttattgcactgaccccatttcttcttcagcaggaataaaacagttcgcaacgcttgatacaggataattagtctgtacaggccatgtaaggcaatgccatcgtgcttgagtgttttttaataatttttggatcgaaatcttaattgctgttcaaagtctgtcctaaatagctcattttggttaagtgtaatcatatataatagtcaaaaagaaagataagtgaatcgtcttgtataaatcagaatgacatgaaccacttacgtagatagatacatgaatcggttgactaaaagtggaatcctaaacttgttttgattggtgctgagctctcggagttctaattcaactaagtgggaatacattttgttttggctgtaattatctaaaaatttggcacgctgctttgtccttgttggccagtgattgcctgttgattgcttattcaaattgctaaatcgatgctataacttctttttccgtttttgtcaggg

SEQ ID NO: 10236 - DNA, 1339 bp, Eucalyptus grandis
  Intron number 4 from transcript Egrandis_v1_0.020910m (loc us Egrandis_v1_0.020910m.g) derived from phytozome v7.0 (c hr-ID scaffold_4; pos 39050168 to 39051506)
ttttaatacgtgcaaaccaaggtcatacagtaaaggtgatagagcagagaccttcttaagtcgcttctttcttatttatttatttatttttatttttatttttggcaatcagaaaccaattgattgtgcatagattgcttagctttaggatgatgtctggtatctgttgcttcgattgtcagcaactttgtgaagagtcctcaatttcttcccttacatccatctatcagccagcaattccagaattgttcttttgtgcatgtattcagtagcaatactgaaacatttcaaaatcaagatcttgatttgacaatttcatttatgctataaaagctgtcggtttactgactcttttgagggtgcgatgttgcatcaagatttatccacattgactgggttgttcttaatgttggtgctatgttagctgcacggggcactggttatatatgttactgtaagatataatgtactttagctatttgggtatgttactgtcagatataatgtactttagcttagcaaggttctacattagcatgtcctgttgccagttctacattaaagacagtcaatacattttgtgtggggatattgttcgaagtaggatacaatgtaccttagctatttggtatgacatttttcctcggaattcctacaagaggtttcaatctataaatacagcaaataaatttgtagatatctagcttgcatctctggcttgtgtttttcctaattatgcatcattatgctctcaataacgtgagagtatgtggattgcataaagaatgaacttattaaagggttaatagctacggcaacatatcgaatttcaaagaatatgcagggttgacctccccttgattataaaggcgctgtctctcttgttaggatattttgacgttgcatattgatgacttgattgctaggctgactcacataattaatcttgtaagcattatatgaaccccttctggtagcatttctgactaattgctgccttctgatctagtaattttatgattctctgcatctgtgatatgacaaaggagaaaagttgatcttagctaatatctcctatgtggcatttaaaagatatttgcctgactgaaagagcaattagtaaagagtttgtggactcaaattgatctgagagaggagctggaacttttgagttagtggagatgtctattcactttattcatttttccaaaattcaatttgtcctacagcaatttgcctaggtattgattaagatttcccttcatgcaaagaatctgaatggcatcttgaactttttctggcagactgtcgagtccgatagcttgctgaagccaatcct

SEQ ID NO: 10237 - DNA, 246 bp, Eucalyptus grandis
  Intron number 3 from transcript Egrandis_v1_0.049222m (loc us Egrandis_v1_0.049222m.g) derived from phytozome v7.0 (c hr-ID scaffold_10; pos 15539224 to 15539469 reverse strand )
cagcagttgtagatatttgagtggggaaattccgagtgagatcggaaaactatcatttctaagaatcttgatgttatcgggcacgagaattttcaatatacctaagcttcttgaaagtttgaccgaactagtcctaaccaataatctacaaatgagatatgcccaaatctctcgaacctaataaatttgagagttttgacgttgaaattagagtatcaaagcccttcccatccaactccaagcctc

SEQ ID NO: 10238 - DNA, 1615 bp, Eucalyptus grandis
  Intron number 1 from transcript Egrandis_v1_0.005302m (loc us Egrandis_v1_0.005302m.g) derived from phytozome v7.0 (c hr-ID scaffold_5; pos 51255803 to 51257417)
atcaccggcagcagacgcaccgcctccactgccaggtttgtgttttttttttctataattcgagtggattaaaatcatctaaattattaattatgtgaatttcacatgacatttacaccttaaaccattcaaatatgctcaatttagatgttctttagatcatgtaatttttttggttggataaacgcttttttgccaaacacgggtgggttggtccatattttcgaccaaagaagaaatgggtccctaactctaatcattgatgcatctccaagctgtcatgagatttttaaaattaataatgaagtgagtccaggctagggcaatgaatcattagtagatcttccttacttctcatcagtcagtcacccctttttgtcaattaatataaacgcaaaaagttcttggacacagcgcaaaaaatggaaaagaaaatttcgaggccataattgaaacattcgtgacgcgcgcttgcatgcgatcttaggttattactagaacctttcagtggcagacgtcaaaggaaaagagaggccgaaacttcccttaattgagcttcatcgtctgaaaatgaagttaaaaagaattagattgattagcaatgttagacattctaagaagttttactgaaagctttttatttaaaaaacgtggcgaacttttattgggcgctgaaataaattggaccgatgatgcattaaatgatcggcaaccaattagaaattagcatgtcatttagtcagagggttttggtaagatctcttattacataaagcattcctcgagattgagtcagataagaaattcctctatattttttatatctaattatttggtcttaatcctaaagatagacgcatgtatcctgaccttcaaagtgttttataatcataagataggacgggccaagattttttaaataaaataaaataaaataaatgaaaactaagaccaaagcacgatggattcgaatacagctgctgtgagggcggcccaacccggcaacgaccggcgtgattgttgtcgtctccatcacagcaatagagcattgactcaaagttgtaatgttaattaggattaacattaatttttctcccttctcttttatcattttcgttggtgttcctcatgtatatagtggtcccgtatgtgcatatggggagcatctaataactcggcagaaatctttgacctgagcatttgcaaaccagcattggtagttcctagctccactcggtttctgtaaaccgttgcactgccattactctgatttccgtaagaaattcatgaaagtaatgaacttgtggttgaaaaggtaacctattatacccgaaaacttcaaattctggagaataatgtgttatttttcaagtgttaatgctctccattagacgaatcttggtaaaacgaaaaaatccagaaatccaaataactttccctcgagttatcaaagaatggtgcgatgtatgtttaaaatttgtttcgtttccacgttcgaaatggcgcttgagtgatttctccagtgtattactatgtaatcggtaagcaatgatgctaaacatgatgtgcctttgctcaagcagttggaaagagcaattcaacgaagactgtgatc

SEQ ID NO: 10239 - DNA, 5769 bp, Eucalyptus grandis
  Intron number 2 from transcript Egrandis_v1_0.018754m (loc us Egrandis_v1_0.018754m.g) derived from phytozome v7.0 (c hr-ID scaffold_4; pos 32407846 to 32413614)
tatcaatcctccgctcttcccttgaatctccttatgtaagaaatcttaatcatttcaccgagatgtgttatggctctaaacatttgaaaaactgtgacttaatttctcttgactgccatctagcaaatgctgaatgagcagtcaaatgctgagtgcttttcaatttcaaacttttacaaataagcatccacatgctcctgatgaattgaccttgagttgagcacttgttggattacttgttaggaatacagtatgacaatgtttctaccctttgaagtaataatgcaggaataatggcatgtcccttcacgctttccccagataacattgaactacagtttgcaacaaaccatattggtatgtcctatataggtttcactcatgcacatccgcctgttgaggaacttgtataacagtcattatttctgtctttgcaaagttgtgtgtgtcatacggcttgacttctccttaaatgtttttccaggtcattttcttctgacaaatcttttgttggagactatgaaaaaaacgtcacgggaaagcaatacagaaggaaggatagttaacgtgtcctcagagggtcaccactttgcacaccaagaaggaattcgttttgataaaatcaatagcgaatcagagtatgaaaagacagctctgtcttgaggatgattcatcgtttccttctatattcatgctaaagcagccatttttcagtctggtgcatccattttattcaggtcggattttgttgatgtcatacaagtaactgctaattgcagatacaagactatggaagcctatggacagtcgaagctcgcgaccatattatatgttaacgagcttgcaaggcgcttaaaggtgaggttcatacttacatattatattcttttaaagtgcatttgcataacaagaatgcttgtctttgttttttctcgtcctggagagtctgtcattaaactttgaagtgaccatacgcgttacttgactctgattctggtttttttctgctataacttttggtgatcctatatcgaccctccttagacctctcaatagaggagttcctttcactggaacaccctttatattttcttgagatttctctcgctcggtctcaatttccattgcccattccctcttgtattcgtgaatattaagctgtaatttgaatttttcttaattgaacaggcagaaggggtgcagataactgctaattcactttatcctggagctatagcaaccaatcttcttcgccatcatagcattctcaatggtaagtctacatgtagatccagtagcattgtcgatgccacggtgaagcaaggtgtcgtggtatcatgataacattttgtgccatgtgcaaactttgtaatatgaaggacttaaacaggaggcttgttctcaattgatcaaatggattttgcttattgagatactttgactttcagatataataacttggtcaaattacttgccgttccatccattttaaaccttcttatttctcactgatcctttctttgctctggcttatgcagcacttggtagttttttcggaaaattgttcccgaaaaatgttcagcaggtgtgcccatttctgcttacgtctgcagtcagcgcaaaaaaaattccttggcatatgagcccttaaatccgtgtaactcactgaatttggttgctcaataaaaatgaatgcagggagcggcaactacatgctatgtggctctgcacccacaagtgaaaggggttactggcgaatacttctcggattgtaataaagccgaaccaagctctctcgcacaagatgcagacctgggaaagaaactatgggatttcagcataagcctgactgatcctaaataataggggtgtgcaaccagactggttctatttgaaaactagactggaccacccaaaaaataggtccgagaattgattttcgatggaaccgatccaggaacaggttttgagtgaatgccacttgggaactcgaccagattgttttgttttgaaattgatcttggaaccggtttaataagttaaaaagacaaaatcccaatttccttttcccttaaattttaatctgaacactctttcgttttttgtcatttttcgaaactcctcacatgtctttgatcttcccctaaataaggagtggagtttcataatttatgttttatgtttcgtgtttataattgtatgtgactactacgtgttaatcttatggattgttgttttttgcatataagaatttatgttgttcatttttcactttgaattgttttgttgctcataacctcatatagttttgctataaaaaaaatgaatggaaaaaaaaaagaacaaaaaaaaagggaaccaaattggaaaaatatagttggatctagaagcagtcataggtaaataagataagttttagggtccaaaaactaaaaccagttataatatgataggttccaaattctaactctagaaccacgatacccctactaaataatagagatcggctataaaagatttattcttttagtccaaagaaccaagtcgtttataaactagatattaagagtctacatagtaacgttcatatttttctgttattttgttcttttattttccgaaataaaaaaagaacaaaaatccgtttggtaacgtcaacaattatttttattttctgaaataaaaaaaatagctgggaaatagatttaaaataaaaataagaagtagaaaaaaagtaactttttactcttaggataagtcattttttttcttttctccttcttcctcttctaaccagctactactgtgaagaaagagcaagaagaaaaagagagcaaaaagaaaaatttcaaaaaattattgaaaaattaaaataaattctactcatgaaaaaaaaaattgtggatcataccaaatacgtttatgttgtttttcttttctagaaattgaaattttatgtatttaccaaatgtattctttttctcataaattgttctaaataataaaaatagaaaaatactatctctaaaaagaaattgttctccaaaataaagatgttaccaagcacatcctaaaaggtccatatattggacatttgagtcaaacgagtcgtaaagtttacactcactgttgaatttgtctcatcagatcgttggtgaaatagcagatgatagaatgagtgtattactgtttgtgcatgctgcaggacgtggaggtccatactattacttctggatttgtgtccatggttcttgatatttctgaaaattggggaaaaaatgatactaaaatatctgaaaaaacaaattgctctgtgaaagcaaatttagattttgccttttgacatattcaacttaacatgcacaacttgatgaaattcctcctgtgttccaatcattttgaacctatctttcttcttttgagactagtagtaccacttctctggcttatgccggaagtgatattagccttgggaaaatcctgttcaaaaactgcacaggtgacttttgataaacttttgatatagatataatataagtttagtaaaaaaaaaaaagtaatagaacctgaagccctctatttgtcaaggagattgtctaggtggaacgtgttaccaactaatcgaaatgagttcggggagctataatgacttcttacatgacccgtcacctgtaattggctagacggattgcattggaattttgtgtaaatatataagatcacattaacaaaattgataaatttatgattaaattgacatatgtatgataaatttaagggtgaattggtaattcttcccgtttcgaatatcaaattagaataaagaaatgcgataagagtttattgaattatattttgttaatagtaatttgactcatcatgaccttacttaatgcgaagtgagtcggacaaatcatgaccttacttaatgcgaagtgagtcggacaaatcataacgtcaaaataatatttatgtcaaattcatggtggctcaacaaaaaaaaaaagaaaaatcatggtggcagcttgcattacctggcggggattgcatcccatatataaaaaggtaccattttggcatttctcatgaagggttatcgtcaatccaaggagtaaaaaaatatcaaatttctccatctaactatgaaaaattattgtccccccccccaaataacaaaacatttttactttggtcgttgccacttttcaagtcaaacaatgttttactcctgccccgagatttcagaggatgacagacactctttctcctctctttctgcttcctaaactctccctccgtctggaaagttgctcctttttttaaccttaatctctgctaataactgtgtgcagctgtcttgaatctgcaattaagaggggaagagccaaataaaagagaggagcaaaaaaacaaagagagaagggccaaaaaaaagtgagagagaaaagatgtggatttttgggtggagagggccttctgggttctctgctcgctctacagctgaagaagtcactcagggaatcgatggaactggtctcactgccatcgtcacaggtctcgttataatagtatctgtgcctttcccccttaccttcttgcttattctctttcttgaggaagatgggacgaataaaagttcaaactttaataagttctaacaatctggatcgtgcttccttgtaagggtgtatggcgaattactggtactgggaaactcttgacttcgcctgtcatctttgcagataaatcaatgttttgttgcagggactagactgaatttataattggctgtctgtaaattgctggggaaatgttattaggataatccgaaccgtttgtctagcatgggttgaggttgttaattggtggatgcagatgatttaggagaaaattatgattggttgcataagggttaatttgagatggtcttggttcaaagcttaatgtctaacccgggcggcgcatatgaaatttttggaaattgtctgatcgatgtgtttcagttatgctggaattctttctgaataaaatcaatcatctcattctcaattcttggattacttgtgaaacaactaagtgttgcacttattgaaatatttcagatgaagattatgtcattttgtgtttgcgggtttggtagataaagattcctagatgtacatgttgatgacaccgatttctcaaatggctttcatgactaccttcataccccctgtcgatctgaattgagatgctagtctctattccttctagttacttcaatcttacagaggatcgctatgctttcaggtgcctctagtggcattggcatggagactgcaagagttcttgctttacgtggagtccatgtcgttatggccgtgaggaacgtggatgctggtaggagtgtcaaagaagccatacttaaggaacgcccatctgctaagattgatgtgatggaattggatctcatctctatggcatctgtttggaaatttgcatcagactatcaatcatccgctcttcccttgaatctccttatgtaagaaatcttaatcatttcacctaaatgttttatggccctaaacattcacaaaaactctttacttaatttctcttgatggccatctggcaaatgcttaatgagtagtcaaaagctgagtgcttttcaatttcacactttatgaataagcatcccgtggtcctgatcatttgaccttgatttgaacacttgttggattacttgttagcaatacagcatgataatgtttcttccctctggaagtaata

SEQ ID NO: 10240 - DNA, 1694 bp, Eucalyptus grandis
  Intron number 17 from transcript Egrandis_v1_0.000190m (lo cus Egrandis_v1_0.000190m.g) derived from phytozome v7.0 ( chr-ID scaffold_7; pos 49297989 to 49299682 reverse strand )
taagtatcactgacatataccagtatttttcacaggttcattctccttgagatttattcactcttctgcttgttacctattttgctttggattggagcacttgactatttttaaatggttgttctttttttagtatggaagatccatgtagcatctattgtttttttttcctaggtaaacaatctttgttaagaaattgtttttatagacaaaaattagtcatcaaactgattaatcatcatacataatcagttccttgctgctgtgttgccattcactgcttttactttcgcatagtctttgtgagcatctccattttatattctgtatccttcattatgatccactgtaatttcaattttgagggtttagtcttctgctactgtgtctttgataacaattcatctttctttatcaatttgagtcatgtacttacatgctcatcggggcttggcttatagatgcttacgctgatgcagttagatttgttggttatttttttttctctccctgatgcctagtgtgcacaccttttaaacttaacgacattttacacatgttgatcaccatttagtgccttcagaaccaactagaggctgatggtgccacttctggccgagttaaattcctggagccaatttgaccttgagactcacatttttctggccaatcaacagatagaccggtggagttcttctttccccatgatagaaggttgtccaggctgccacatgattaggcatcacgggctccgagatggatcaccctgtcaatgacggtcttgacaagcctttctagcataaatcagttgtcaatttaggcatcctgcttgaagtcatagctgccttaatcattcgcctccattgttgatttgcttgtctagttgttgatccagatccattgctttttgatttatagaggtttctgtgcgaagttcataggagctcattgtaggaacttattgcatggttgaggtggaatgtttcctgcggctattttggggtggaatgtttcctgtggctattttgggcacgctgcagactagtaatttgtaaaattaatggaaactaatggtttcattttgaagggtttggacttaacaaaaggaaactttgggaaagttttagtggccaaattgaacaatgtaggggggtttatctagttcctccaatctgtttgataattggttagaaaacagaaccatctttctccaattttgctgatcatttaatgttctattatggagtatagagagtataaagtgcttatggttgcatttcaaccatctaatcacataggacgtctctcctttaacttatgatagtgaccttgtcaactctttttttatgaaattcttggattggcagtatctggcctaggattcctccattatatagggcacttaattgtatatgtcacctaagttgctcgtgcttacaaaggtttcggattttttgtttattttctcttgaaattcctctagtttttctataattcaaaagtttgatcgctttcttgttccacctactatgtattaattgatttcttcaggattgctattggtataggtgtcttgtattttcaacttttctgatgttgttatctttggtccttgtcatctgtctatttgtagttgtgtggttatgtattccactaagttctcttctgttgtgatgcttcatgcatgtaggaac

SEQ ID NO: 10241 - DNA, 8441 bp, Eucalyptus grandis
  Intron number 10 from transcript Egrandis_v1_0.011071m (lo cus Egrandis_v1_0.011086m.g) derived from phytozome v7.0 ( chr-ID scaffold_11; pos 20040506 to 20048946 reverse stran d)
aggtaaggcttgaaaatatcagtaggatgttgaaaatttatccggagcacttgggttatgcagacaaacaactagcatgataaatatggaaatgcaaacaattagcaatgcattagctgttctggtactatgcacgattaatgcttgaaaactctaatatttccaccttatgtatatttaacaagtgctctgagagcaactgttaacaacagtccctatcatcacattagttggtttatgcagacagagaactcattcaaaaaaaatatctaaccgtgggaaaattgccttcatggttgtgtcaggtttctaatttggcatatggagcaaagtttgatttccaagaattctgtgcggctgccataagtgctgatcagctggcgggaacagcgagtttggaagaatatgcaagggaggcttttaagcatttccccagagaggtgaacagaatcacaatgagagaaaaggctctctctctctctctctctctctctctctctgtgatgcagttggatcgagcttgatatatgctttcgttgtctacatacttgactcgttgtactctgatctccaggaacgtaggctcggcacctcacaaccgcagacaactttcaacgaattcatcaaactactacatgatcattcgcagactatttaagggtctgactggagtttcagagatcttctaaactctcctttgaaagaaaagatctgagggggaccaaatgccatgcacaacgaaagacgaccgcatcataaataaccgctgtcatgacatgctcggaactggtgtaacacttttttttttctacttttggtttttccaatttcataaattttaggtatgagagtgtgcttttgaatgcagactgtgctttattatttgctttctagcttttgctttgttctgcagttatttgggttttgctatgcttgaaagccttttatgtaccttttaagtattattttgatacatggatagtatctttctttcgataaaaaattcataaattttccaagggatttcacttaggacaattcggaaagctcgtcccaagcgctatagtgtggccaaattgggttcctccatttgcagcggtttcgggtttgaaaatccatcggtcaagcacgttttggagcactaatctattttcgggcctttctgagtttttttttttcttcttctaggaattagagttgaaacgctatgtatatgtcatgttctttgtaagaactcgtttttgcctcttttcagaaatacagaacaatcgagacatttgtctccatgctttgagcatgtgttttgcgagtgtttaccggtgcttttcatttcctttgtgtcggtgaatcgtattcgaccaggtgtcttaccaaacgtgaggtaattggattcgcatttctcgggtaatccaattccaaacaagatcagaaaaaaaaaacttggcgaagaagttgaagtttgaaggctatccaggaaattcctaccgcgcactaggagtggcacagatagatgcgtgtggttgggccaaggaaacaaatggcaatctcactgtaacaatgtactgggctttttcagcccattgcatgtagttgaatattcgaagtcactgtagagaaagaaaacaaactgggatgggacaagtgcactatgagatttaaaacttatcattaaagtgtaaattttcaaaaaatacaatcaattcttaaaacttgtcacgaaagtgcaaatttttaaatacaatcaatttctcaaacttgtcaccaaagtgaaattgagccttaagatttttaaaaagggtaatcaatggaattactctactggaccaatttgacgagttttagaatttatttacactttttgaaaggtctaaaactcaattaaacttttgtgacaagttttaggacttgattgaactttttgaaaattttaagattgaattgcatttcatgacaagttatagaatttgtgatgaatttatcccaaacaaatttgaaggcaagagtgacttgccatactaacgacacggtttcttctcaatttcaaagtatttgttttcatgtcactgtttataatatcatcgtggttctacctcgctattcacatttcatggtacttccaaactttactaaacttcctgttttaggattgtgcaccttccatttaggtatctctagcttgtagacatttctatgcttaatgccttgttcaccaattgatagagaactcaaatcttttagacgtttgccatactaacgacatgatttcttctcgatttcaaagcatctgttttcatgtcactgtctataatgtcgtggttcaccttgctattcacatatccatggtacttccatgctttaagcttgttcaccttctatttaggtatctccagcttgtagacatttttatgcctaatgccttgttcaccaattgatagagaactcatatcttttagatgtccctattagaatatcatctatataatggcttgtgtatctttcactggttattcaatcattaaaaacattagtttgtcatattcgaaatattataaaggattttcccaacaatattattattttattggagacggcaatagctttgaagggggagggctgttgagagaaccggcgtttgaggtaaagtacctaagtggacagttgccgacagtgatgatggggaggagaaaggagctatgggattggacttccatggaaacgaagtcctaggcatggaagcaatcgcgtttcacggtgtaggagagggaagctcgtctcttgccaagaaagaaggaaaaaaaattgaattttttgtaatttttctcaagaaaattgaatcagatttttatgtcgttggtgaaaaatattttccaattcattttcaaactttaattaaaaataaaaaataatttcttagaaaatatttattagaaaatgtcacattttttgtgaaataaatgaagactaacaagtttgagattttatcttaacaatctgagctttttgattacgaaggtcacaatttggtgatggttttgtttgtgaagacgtaatgctagtcttgatcaagtttatgttattgtatagttcaatttaatgattaaattaggtcaagtcccaatttaaattagatgttatctctaattagataatctctatcttaacatgtaatctatcaataaaaagatccaaaactttatcctaatagatctctggagattatctagaatcatattaaatatgcaatattatcttaacatgcaaaattatcaattaaaatctaccctaattttatctaagatttttttttttgataatatacaaacaaaacaaaagatagtattcaccatccaaggtatcaactacatacatatgcacattgtgaagttagaaaaaatatccgaacttcttacccaattcagcagatgatatttatgaattcggacaggacgatgaccggcgctcggcggcgttcgtagcgatccagcattttattttattgtgttggcgtgcggttctccgcagactccggtgatgggggctcctcctcaagatgctttggcggcgaggcttgtgcgacggtgtggtgaagcaaagaccgtgggttggagtagtttcgtaggattggcgactgtcggtagtaaagactcctcgcttttgtctgagcgaatcgtccccgaatgacacctgcacaaaacggcttttcttctttctgttttgaccgaacgtcagtcccaccttccaatttcgtcagctcccacgttccaatctcgtcacctctgctcccacccgcccgggtccagcgaagccagcaaacgaaagatgaagtcgtggaacgcgccagccgcgggtactttttcgaagattctttttttttttttgcatatgaaatgcttggagtcggtttttgcagtgatggtttcgcctctgtataaagcctgagcgcttcgccctttcttgttacttcctcctcctctctgggttttttgttttggttcgaccaggaaacaagaaaagaggtaagttgcttttctagttagtctgctgagaattgctagctcgtggcgtattttccggaaaggttttgcgaaatctatctcttcccgggaagatcagaatgagaagctgcttgttgagaagagcttcagttcatctgctagaactcttccttttgtccttcaaatggttcatgatccgaaaatttgttagggacccgtatagagaaaaacaacttgcaatctcatatcgaagttccctccttgaaactcaaaacccgctgtaatacttcctcttgtgttcgtcaatcttgggaaacagaaaaaagttttgaagcttcccattttttttttcagttaacattctttcttgggactcaagtcgaacgataaacaatagttttctcgcctatttagcgactttttggcttattggatttgcagtattaaatggaaccccccggtcacggaatacccatcgaaacccatgaagggcgtgagtgtgagattggtttggacaagaatttcgggtttttggaccagttcgccgcgcagtacgagatgggtaaggagattgggaggggcggttttgggcgcacatgctctgccaaggccaaggggggcagcttgaaaggccaagaagttgctgtcaaagtcatccgtaaatcaaaggtttcgttttcttttgtattccctcttcggatcttgctgcgtcatttgccttttcttgaaagaattttatatggattctggttcttatttagtaggtagcttcattgtgtattcgaatcaacaaaaaatttgtgatggtcctcttttttgtgcgggtttctatcagaatatacctgcttttacttgtgtggaaactgctagtggttgacagatgagtgtctagtatactgtgatggttactgttcattattgattgttcagtcaactgctttattttgggtaattccagttatttggagaaatctcttgttcactcgctgccctgatttgtgccagtgtctttatatatgtcatgtttgggaatggagtccatttttttttctgattagtagatggagtctgtctgagaggtcataaagagatattttaggtgaaatgctccttggatacgatggttgaattttcatagtttggatcccttgagctttatatactaaggaactactgagtcatacacactcaacttccaaggcccattagtcatatttcacttcacttgagaaagaaataaggatgatcagtgaagttttcaagaaagtgagatctgttgccttgatcgtatgaacttgccgcaccacaggttctctatagagcagctttacattcccgggaaatggaaagatgaaagggatgtatgtatcagcgttgctgcaaaggatgtgatgctttggagcatttgtctgcaggaactattgaagcatctcttttttgtactttgcagatgacaacagcaactgatgtagagtgcgtgagaagagaagtgcagattttgcgggcattaactgaacgaattggacataagaacttaatccagttttatgatgcctatgaagatggagacaacgtttacatagtcatggagtatgtttcaattgtgccaagtgcctatgcttctgttttctgtcatctttattgtttctggtgtgaagctgtgagcttctcagtataaaacatgtcataattactactaaaattaagtctggcgttgggattttggcatgaggggagttagaccagatcatgaggggaaattacatggcaatcttacaagtaacataggagtggtcaacctgcaaaatgattattctgttcatctgaactgagagaatcccaacgaattgggggaaggttatggttattcagcactgaagaatcaactattttttgacctatttgactgtgctcagtaagtaggtaaatttttggttgattatactcaaaaaacatattaaccgatggaacttctggttgttcagtatttgtctcaagcaaaatatctgtcagtttatgtttgaccattaaacttttggggtttatccagtgtattctctgttttccaggttgtgtcaaggaggtgagttgtttgacagaatattttcaaggtaaaattgtgtttctaatgcttagttaatcaaatcctaagcttgttttactatgtttttagttgagcttaagtgcacctttcaaatccttaagaggatggaaccatttttgtcttgtatagtgataaagattaccctgaagaagatgcaaaggctgttatcattcagatattgagtgttgtagccttctgtcatctccagggagttattcaccgtgatctaaagccagaggtaattgatcaattgctgatcatactttttgagaatgtattcatgaaacatagactatcattgaagtttaatgtcttgatcctcctgttgtttcagatacattagattggctctgttctgatctagctttatgtttctgtctcaaagtgtacaatcatgttccttaataagattttgacttttagatacggtactgctttccctttttaaactttcttcatgggatttcagatttttccattatttacattgatttctcattatagttatgtattagaaaataatgaccttggatgggaatatgcatgattttggataaatgaggtcattgttattgttttgaccaatactggtgtgatatgaggttattccagcctcgaggtgttccatcatagtgtataactgtggaataatgcagtgggtactttgccttccctgcctacctactaatgagtgatctaaaccgcaacaatcctgtctactaatggtagcttgattttctttccagaattttctttttgcgacaggagataagaactctccccttaagctcattgactttggaatttctgaatatataaatccaggttagaactacagattgaactttaagatattcccatctgttgacagtgtggagttggacttaatgtgtgaaatctctgcaggtggcaggttgaaggattttgtgggaagcgaatttactgtagctcctgatgttctacatgcatcctacggaactgaagcagacatgtggagtattggtgtcattgcctatatgttactatgtggtgatccacccttttgggggcagaatcaatctgaaatattccgggcgatccgtgaggaagagccaagttttgatgaagacccatggccttctcgatcccctgaggcaattgattttgtgaagagattgttgaacaagaattacagaaggagaccaacggctgcccaggctttgtgtaagtctatagagccatttaaacaaagaataacatacagaagaatagcaatcaatttgtaattggcaacctggccttattagtttgctaagttttatccctaatcaaacctagcaagggttgcagattaatattgatctgatcttcgaattcccataattttcattaggtcttccttggctggtttctcaccatgatgtcaagataccactagatatgatgatgtgtaggcttgtaatagcctatatgaggtcatctcctccacaaaaagcagctttgcaggtaagtggtgattttaccgaatttgcctatctcctgttgtctgctgtctcaaagactaattttgcttgtacgctgcatcttgaatttcgtgattcgactaatcaggggacagacagagcttgcatcagaataatcatacactctgacatagttcttcacttttcaatgattttctttctccaccttcaaatcagatgcgagtctgtgactgtttttgcctactgttctaagaactgaacttatgaatctttaccactggagcaggctcttgtaatgacattgacaaaggctcagctagcttacctcaggaaacagtttgaaatattaggcgggagaaagggttttattttgatgcaggattttaaggaggtcagttgttatcctattgcttgtggcacttcattggttttgcttttctttttttatttctcaattgagaattcatggtgactagtgtcaatttaccaggctgtgacaaggaggtctaccgaggctatgaagcattcagggactcttgagtatgccaatgaggtaaggcttgaaaatatcagtgggatgttgttgaaaacttatccggagcacttgggttatgcagacaaacaactagcatgataaatatggaaatgcaaagaaatagcaatgcattagctgttctggtaatatgcacgattaatgcttgaaaactctaatatttccaccttatgtatatttaacaagtgctctgagagcaactgttaacaacagtccctatcatcacattagttggtttatgcagacagagaactcattcaaaaaaaaaaaatatctaaccgtggaaaaattgccttcatggttgtgtcaggtttctaatttggcat

SEQ ID NO: 10242 - DNA, 1401 bp, Eucalyptus grandis
  Intron number 4 from transcript Egrandis_v1_0.012017m (loc us Egrandis_v1_0.012017m.g) derived from phytozome v7.0 (c hr-ID scaffold_1; pos 324144 to 325544 reverse strand)
cgccctacggtttggaaactcctcctggtaagctaaagctgttactttgggaagtagagttagcacatttatatccccaactgagccttcaaaagttagcaatatctcttttgttgacatacaaagttaaaaaaaaataaaaaggagccacattcagttgttgaaagaatttcttactggaatacgcatttttttcaattaaggtttctattggtggctgccacattagattttgattctatgaaggtgtatttataatcattctcagtgtgcttattgctacatgaggtgtaattcgtttatattagtcagttcgtttgtggtccaacctctataaatatagagaggcatctggtggttcaatgcagtccactagaggcacaaatatcttgtcctctgagtcttacgtttttgccatacactcttttaccatctcaaactgaagctttcagtgtcatttatgtggaattgattttgaccttcaacttgtcataatgtgattgtcctacctgcctggcatgtcgctgtaataatgtttccttctgcgggcttattgggtttcatttaagagttatatttttggagtgcctcgttcatattatggttgatagaatattaccatgtaatcataatttggtggtggcacagagccactaaaaccctccttctcttccttttcttgcccaaataataaaaataatctgctaatacaatcttcatgagttaggattcttttgatagtaaatgtcccattttctcatgcctgtacaatttaagctcacagtaggatttagctaaacaatactagtaggttaatactaatggggatgaacaacgagatttggttttgcccaataccattgtagatgtaatagtctacaggctgagggcaaatagcaacattgttatactctttctgctaactgaggaattcattaatggctgcctaaggggttacatctgctgtacaaaattaattacaataagatcttgaaagttcagagaagtttgggtacgagaaagggtgctaactgaaaaccactaaaaaggcctgacaaccattcctccttctgaaccattataggaatttcaatattttcaaaagccttttgattcatttcctttaaaatctttcaaagaaaggaaaaatgaactggacagccatttcttttatctaaatgcagaccaagtgctggcacatacgtaaagacttagagaatgaggacgggtagcaacaatttttaaccaaatgctctctccatgtcagttcatattgtagatcatgcatgaagatccataaatctggtttagcagttcactggattggaattcattaatatgatttggtttgactaagtttattcatagtgtgaaaattaaatatggactgaccacagggat

SEQ ID NO: 10243 - DNA, 1993 bp, Eucalyptus grandis
  Intron number 5 from transcript Egrandis_v1_0.013382m (loc us Egrandis_v1_0.013382m.g) derived from phytozome v7.0 (c hr-ID scaffold_2; pos 23240460 to 23242452 reverse strand)
cctacagtgtatgcctttctttaccctgtggtatcaaagtgctgctgtgtgttctaaagatgcataatcaagctttgtgtggtttgtctagtatttgaaaaaaaaaaaaaaaattctgaggatctacatatacaatttttgagggacatcctttacatatcgagctgtagcttcttacctctctgcaaatgatgtcatgaattttgagaagatgacatgatcctgaataattagttggtactaaactgacaaaggaaacttcttctgccaataaactgaagattggtgttctggtggttatttctgaagttattaaactaaagatggtgtacactggtgccattgtagaaggcagttctaggccacgaaatggataaggaagtattttgtgtcaatgaatgttccatgtctttttagtctcctgtcttgagtatggtaatcaactatctacgaagcatacctctcttaacaagtattggtcttttgacaatttctgatgcttaaaatgttcctagatcatgtaactttcttttatgttgtccatgtgagagggatggtgtgggattagcctgaggactgatgaggaattgttgattgcagagttggactgggaagtttatatgatcaatgaatgtgccatgtcttttaggtttgcttgtctccagtgtcgttagtgactcctgggcaaagcatttcccctctgacaagtaaagtcatatacatactgatcttttactcccaaaatgcttctagataaggtccgttgttattcctaagatattccatcccctcatgttcatggtgatataacgttttacatgttgctaggaagttggaggcctctctcaatccccaggataggagtatgaaagtcggtagagggagggagggagttcacctcaaaaatattttgcgaagatttgctcgaggattgctgaagaatgactgtttgcagagaagttggggagatttagtgaatgaattccagttctctgaattgacgtttgagttcattacagtaagagctgtggtgtattgcctaaggaaggactaggatgagcccagaggatcaatgagggatttttgagaagttgtttggtttatgagggtggtaatggtcgttgctgtggcattgaattcactgcactggaacttggcagtttccacacgaaaatttattgatatttagtgtaacagatttgacataattctttgattggtgaagaacatcaaaagtttgaactgtataataaatcttctgcaatgataaaattacaaaatgttagtcaacctggggcactttgggatgcctacgatgaatccatgttatggtgaagtgatgcagtgttgcatcccaaattcttaggtattaaatgtgccatcatcaatggctaatagcttgccggaaattagccatatgaacatcctgtctataagtttgcactcttattgagtgggttaaatctctggctgtggatttttgttgaaaaggaataaagatgttgtgcgatttgatacagaaaagattgtaagtacctccaggatagtggagtatatatagatgccaggagtgccttacagaccacggtgaaagtttgaggcatgttgattgagttgctgtgctaggagttttaaggggatttgtgagacggtatacggttaggttccatttcaaataagagatccaagttgcaaccatatacattaagggaagcaatagttaattattctggttattcctaagtagctgcatatttctcttggtatggaccaataaaattaagtttgtgcatctgtattgatataattttataatctattgtagcacaatctagaatcacagctgtgcttagcatgtcctttcttatgatattccactgcttaaggtgcttcagagaatcttaattctgttatttttactgcaatgtggcgtatatataagagtcttatgttttcagggtcaattggggtcagtttcatcttcagatagcca

SEQ ID NO: 10244 - DNA, 1107 bp, Eucalyptus grandis
  Intron number 2 from transcript Egrandis_v1_0.031108m (loc us Egrandis_v1_0.031108m.g) derived from phytozome v7.0 (c hr-ID scaffold_11; pos 42211712 to 42212818)
gtcccatctctcgctcatctcgtgctggtattcaggtaaatttccctttttaatttaatttaattttattttgatttttgatttttgatttttgatttttatggctttccttgataattatttgttgtttttgttgttttaccgtgataagtggtcgagcatcagaaattagtgaacgttagtgaaaaaaggccgaagcttttacagaattgaaggagctccattagggtgctagtgaaggatgattcggtgtttgattcttcagatttctaatgagggtacgcttgtccaatgctacatgagataaagttgggaacttgggtgttggggagtgttcgattcgtgtaaacaaccttaaagtttacacgtggttgatggattataattttttggacttcagaatatcttaatttgcacggtgggtggaatctacaggagtaccagcctaggtgatgaattttcatctagtaatggtttaggttttagcaactttagtgtatatgttagcttaagtatgttcatactctgtttaggtagatattattttaggcgggcaatgtttactcgttttgtcttttgggagatgtactggaagattgcgttgtttaagtattgttttcttttctttacgttgttgattgctgagctgactgaaatgtgcgaagctgaggtggaagtcattcatctgattaggttcattcactgcttaattctactttagtatgttggcactgtttacgacatgtctcataattagtggatggatatgcaagagaaggatcttgaagagacggaagagatgcttggctattatgtctcacaactatgtttaacatgtctcactaaaaagtaatagaggttctctctatagtatttacagtggtatagtaccatattataaggtttggttctccttgcagtttattttagctgcaaatgacaaccatttcgtgcataatactgatagaagaccttttcataccttttgctttcaccatgaatatgtacctttatttgcaattaaccttctcagtcaagtaatgtgttctggggatggtttgcttgagatcagtttcctgtgggtcgtattcaccggcacctcaagac

SEQ ID NO: 10245 - DNA, 1097 bp, Eucalyptus grandis
  Intron number 9 from transcript Egrandis_v1_0.023793m (loc us Egrandis_v1_0.023793m.g) derived from phytozome v7.0 (c hr-ID scaffold_6; pos 18979392 to 18980488 reverse strand)
ggccattagttgatcactggtgtcagtttttacaggtagttttcttttgtatacttattgagcattacaatctgtttgagttattaataattagtcctcacgcctgagtatggccatcctggtttttttggtatattctcaaaatattgtctttttcttttgatatttattttcagtccaaagagcctatctatattccctcccaaacacccataaaaggaagaaaaaagaaagaaagaaaaatctagtaagaagagaattgctcagaaacacatttggtggggctttcaattttcaagtaatttaacatttttctgggaaaatggaggaaaggagattgtcatttttcaacttaagcaatttaggtaaaaaatttgctatgctccgttaagcaaaatgcaagaaagaactacgaggatttgacatcaaatgcaggtccaaaaagtggagagctgaaaatgagaagcagttttggggaaattgaaggacttctttcagaccagatgcacttctgatggttgcacgtttggagcctttagactttctgtatttgtttcccctctcaatatgattgattagacacttagtaacatcttccttctaatatatgggatgaatgtagcacatggaagcgagttgaactatttttgcaggagggaatttgtttttgaaatggatttctgcagtttggcccaaccaaaaaaaaaaaaaaaaagatgaaacaaatagttagagtagataatattaatagttaaatgaactgggtagatggtgaatagaggatgttctttttcatcttgacgtctcagcctagtatgaagggatggatggcatcacttatgttggttcggttcctctaaatgctatgccccctttgcactgtagctagacttttctggttgaaaacaaaagtagggacactgcatacaaagttaactttgtcagaatgcagcaactagttatctcatcctgtttcaaaaacgtgattaaagaaatgtgcgcttgtcttgacatataatggctgttgaatgggattttgtattgtctttctctacttcaatacaggcccgtcataataaggccatctccagggacac

SEQ ID NO: 10246 - DNA, 1598 bp, Eucalyptus grandis
  Intron number 5 from transcript Egrandis_v1_0.027142m (loc us Egrandis_v1_0.027144m.g) derived from phytozome v7.0 (c hr-ID scaffold_1; pos 34668943 to 34670540 reverse strand)
gttgctcttttctggggccagtgctgcatttggaggtatggacagattcttccgggctttctctaattggctggtcttggtttgcattcattttgctgacccacgctcattttacaccatatagcaattagaatggtcgctttactcattacatacataaaagacactggcattagccggatgatgctactgccgataaaattcatttcaccatatggaaatgcatagacagattatttccttgttagatctctctttttttttttccttttttttggtgtgtgtcggagacttctgtttttagaacactattaacccagatttgcaaatgtttggtttctctcatttaaataagcttactttccttatagagttataggagcccagatttatataccctgttatgaacatgagttaatgaagtccatgatgtcctgttgatctgattctcttggtccgtcagaaaattatcgtcttcagtgttttgaaggcgtctttgaagagttttacttattaggggcaccccacaaagaccccacacatctattctcgttgttgcatatttgtctgagtactcacacaagatgagcacccccacaaagaccccacacatctattctcgtcgttgcatatttgtctgagtactcatggcaagatgagcacccccacaaagaccccacacatctattctcgtcattgcataattgtctgagtgctcagggcaagatgattctatagattttatgatgaaatgttgttgaaaaggttgatcagaaaaggttttggctttcaagataacaatttttatccagcacctattctttcatctcttctgtcagaaaaactacataatgtttaaatcattggcattcttcaagctgttgattctccttagtacaccctgtgatttggttgccacatatagagctgaagttaagaggttgacatgtacaacatatggctttctctgcaggttgcgtgggcagcattgttatttgtttatttacttttggatatagttagtgttgctaaatagcatatgaaggattgctatgcatgggggaagttctggagtttgacataaaaattttaagctcaccttgtaatcaatggaaagaagccctttcaccttttaatactaatattataagcagcaaagcccgtcagcctcagtttggtccagactgtccattcgaggctatcgacaatggatatttattaggtctgacggagtcccagagctatctgtgcccttatctgggttttgtagtgcagtgttttataggtatttaactcttgcttttaaggtgagagggatggagatgttctgttgtgaaaagcatagaataacctaggaagatcctggcttttattatttttttctaaggaagtttagagtaaaagccgcagactacacatccattttctattgagagtgcaagagggttataattattgaactttagatggagcaagtggctaattacttcttaatattgtaattattcccaacaattgcatcaaactgtccttttaaaaatgtacttttcatgcttattagaattgtaaataacgttactcttttgatcttgtagctt

SEQ ID NO: 10247 - DNA, 3467 bp, Eucalyptus grandis
  Intron number 9 from transcript Egrandis_v1_0.003374m (loc us Egrandis_v1_0.002561m.g) derived from phytozome v7.0 (c hr-ID scaffold_10; pos 2183508 to 2186974)
ctctagggctgagcgagacttcaagtccgagcttggtaatcaatacctttacagcttcttaaatctttaatcccgagtcatcaactgttttatttgctgagatcaaagagataaattactcgcttatcagtttcatttgataccagtatgtcatggttactcgttgttttctgcagttatacctgtcgagttgattcgaaccccttgtttttatgaatcgcattttttgcggttatgcagaccattttgcaggagtggagttggatgctttgcattcatctatagattctatatctacccggctacggaggtacactcaatcaataaagaaagagcagacatcaaggaagaagtctcttgttcaagacaaccagatctctcaactaaaatcctccctcgagaaactttcccttgtcaacagcgacaacttgaaaaaggtcaaagtcgttgaaaaagctataagcaacaaggagaagcagtagtgcattttctctgctagaatcactcgggaagcgtcctggcgacgaacgtgacaattcaatatctcaaagggacggatgccttgtcattttgctctggaggcgtcttcatgatctataccagtctctgcaagatggctggctttcgatttgggtctacatttcgtggaatgatcggcaggcttcttttgtgctgcatataattattctgtagaatacaagcaatgtatcaaagccagctagactcaaaagcactttacaagcgctgttaactattgattaaatctttcataagatgtgaaatccatatcttagtgaggtctagcatgacccatctatcttttgagtgatttgattttttctagtactattctgactatactaccaatggagcgcaatgatcatggttttaaaatcgtgcgaggttttaaaattgtgcaatgaccataattttagaattagtggaatggaatgggttggatagtcgttgcttgtttcgtgtactcaacgagcaaagttttaaaattgtgcttgtcagtatctgtcttcccatctctccccgtctgcttcagaagtgccccgcaagtttcttcttggtggttgcgatagttcgtccattgaccgagaaaccatctcaacctcaacgagcaagatgagccaatacgaaatcgatgtcattttgtcgaacgcctgaaccttaacgagcaagttgagcaaattacatacatctaatcgtgtaagagtttcaacaaactttaagcctaatgagctgtgcgggactgccactagtgtgtagggcaaccacggatccatagagaccatccttgatgtagatcaaagtcttgtgctttccttgctcagcaataactccgcttttaattaccacgatcacatctgcaatcttgattgtggataacctatgagccaccacgcgtgtggttcggtgcaccatgacgcggtccaatgtctcttgaaccgtcttctcagattctgtatctagcacactcgtagccttgttaagcagaaatctttttatggcttttaactaaaacgcaagcaatagccactcattgcttctgactgcccgacagatgagcccctctttcaccaaccattgtagcatatccccgaacgtaaaattcgtactgtaaaaatcaaataagcccatttgaaagcaaatgtaagtcatgcacacggaataaatagcgactgtctaacctgttgcaatccactaatgaacacgtgggcgtgtgctaattctgatgcggcgagtatttcttgctcggctgcatctctatcctttccataagctgtgttggcccgatttgtctcgttgaataaaaccgattcttggctgatcacacccatttgctgcctcaaccacttgagttgcagctaccgaatatccactccgtcgagtgtaatgcgaccaaaatcaggatcacaaaagcgttgcagcagcactatcactgttgactttccactctcactttcccactttcccactttctctgaccaaagcaacaatctgagaggaacaatcgcgtaattgtcaaaccttttgttcctcgtgttcaggtgatcgaaacactagtgttattctcgtaattcaatgctcagttgatgaagtcatatttaaagttaggcatcagataaagtccgaagttttacctttccgctgtaaacggccaggctgagatcacagaatatttgaatgtccggcctagaggtatatttgaagctgacatggcgaagctcaatcaacccttcacattgtcttgtgtctatcttggatttgcggtctatcattgctaaaatggaagcagcaagtaacacctgtgactttgatggaatcggcagtgaaggaacttgattgtgaaattgcactggctgccacggtcagagccaaaaaaaggaaaaaaaagaaaaagaaaagaataaaaaaagaggagcctgcagttacagaacctgttatgtgttgccgttcgataatcatggtgagtcgttacttcgtgatcatcttcacaacaggtatgaagatgatcacgaagtaacggctcaccatgattatccaatggcaacacgcagtagagattcacaatgtgcttgctgtgaatattgagaatgacgatttcattgcctaaatagagaatttctcaatgctctaaagtgaaggttttttggcttgcattaggagagttctttactaatgtacttctattcttcggcgaggaatcatagggaccccgcaatcacatttgatgtttgtccagaatttggtaatgttttggacgcacatcctaattaagttagacaaattcacgttcaagtcgtgcttgatcttcttttcttgtattcaagggcaaacaatggttgaatgaattgatctcaatggcatctatgtctcataagaaaaagaaacatataaagaataaagtacataaaccaaatcatacatatattaagaattcttgatgaggctagagataacatgtatttaagagtgacaaaaatagccaaggatcacttaatattatagatgatgattggtacatttggtaatatctagaattaatcgaatggaagtttacgtcaagacgattggaaatctctgcagaaaatggagcctagccatgttcattatgtcacttcattttctttattaaatctaaagttggagaagaaaacacaggacgggcattgctcgaagactaaaggtcaacttaaactactaaccttggatgccatagcaaaagactggcatgcatctagttagtttaattccgagtcatcagttgtattgttggctgagatcacggagataaattgctcaaatctcagttccatttgccaccaatatgtcatggtcactagtcggttgtctgcaattatacctgttgagttgatttgcagtccttgtgtttatgaatcacatttttttgcggttatgcagaccattttgcgtgagtggagttggacgctttgcat

SEQ ID NO: 10248 - DNA, 1452 bp, Eucalyptus grandis
  Intron number 3 from transcript Egrandis_v1_0.050151m (loc us Egrandis_v1_0.050151m.g) derived from phytozome v7.0 (c hr-ID scaffold_6; pos 11911999 to 11913450)
taagaatcctactatttataaagtagttcctcaaggtaaacattctctaatctaggggtgtgcaaaagaacggggatctgtccggaccgtctggaaccagactgaaactgcttggaaccaatggttcttgagggaaccggtccggttcccggttccaatttatgggaaccggtgggtgccagttcggtttctggtttcgtgggcggatccgtccacccgcccacccagactagaccgattaatttttccatgagctgtagcgatctctgcgggggattggcttttggccccctccttcctctgtgcaaccatagccttaggaatcccataaagaaccaactttttatcccaatataacaaagacaagcctctcaaaacataaacaataaatcacagtacgatctgaaaacaccaacgtgaattgcgatgacccacgagatctaaacccaacaaaccacccaacgcaactagaaacaagaatgcaacgtatcaaaagaagaagaagcaagaagcaaagaccctaaaacaaaaacgaaaccaagaaaaaactatgcagagcggcttatcggacgtcagcgaactcatgaacaaacttgcagcaaaagggaaagctcggagagcaaaagccagagagcctcgcgggtagggtcctctgaattcgtgcgaaacgagaagataatagagagagagagaggtaggcgaggaggggggtggggaatgatgggtttctttcttcctttcccttgaggactgagcaacaaggaaaagagaagaaagagaccagggatggatgttaaactacaataccgagctgaaaaaccagaagcttttgccaagcttcagtggatgaatctgaaagctctaccaatatttgtaggggagaaggagagagggagagagagggtaatgctgaagctgaaggtggtgagtcgtgatttgaggggatgggataccgcacttcgtggactggatccatgcaacaaacaggtggattccggttccaatttttcggaatcggtccttagcgggcggttcttggttttaggttgggaaccgcccgcccggaccatgcacacccctactctaatcctggcatcttttcagatttgttgaatttgcatggattcctgtagcccaaagagaggtaggaaaattgaaacaaaacgaacttgttcaaaccaagttcactcttgataagaataatgaatgatctctatcttgctgatggatgacggatggcctgacaaatgaaagaaaagtcaatacataaatttgtctgagtttccaaagccagatgtcaaatttaataacaaagctcagaagcgtgttccttcccccttattgcaactattaataagcttgttttgctattgtagaataagaacagatagcaaaaagcaagacttcgggagaatctttaacttgagcagaccttgccatgatgaagtaaac

SEQ ID NO: 10249 - DNA, 4209 bp, Eucalyptus grandis
  Intron number 2 from transcript Egrandis_v1_0.043142m (loc us Egrandis_v1_0.043142m.g) derived from phytozome v7.0 (c hr-ID scaffold_5; pos 62303196 to 62307404)
aagtcatcacagcaataaacggtaaattgacaaattgccattattttctcgtaaactatctatattatataaatttagcatattatgaaacttctttattttccatatggaattatacaaattaagagtctgtttgacgtaattgtagctatagtgtagcaatgttgtgctgaaaattggccgtgaaagagtgcaacttgtgaatttggtaatacacagtctaaaactgaaataccataaaactagatgagacaactccatgaagttagtttaatctactagaacgatgacatgttcgttgaatattttatagaaactgcaacaacaccgcttttcattatttaagatggtcgagcaagccgtaccatatcaaactagtggagctaatccttattacaagcttttagaacattgtatgcgcacgggtacgtattgtcgttatacacccttttgtacttatcaatgattaaatctcaataatttcccttttaaacttattattaaaagctaaagtacatttgatatcagaaacatttgactaaaatccagtgtcaacttctgttagcaatacaccgttttcttatatgtacttcaaaaaagttgtgcccctataatcgaaccaaaaaatgatgtttatcatgattatacatcaattatattaaaacaagaaaaacttgcaaattacattaattttatggaataattatccaaaaaattctaaacttattatacaacaatcaatttagtagctaacttttcaattttgctaatttgccaatttagtactgctgctatacaacttgtggtgagcattggatccatttcgactcaggaattgggctgattgatttggttctgagccagtaccccaatcaggctggatcctaagttgaaactatggaaaaattggctttgaagcctctttcaacggagaaaaaaaaaacttgcgttcgccaagattaaaaccatgacttaaatatagacaaagaaccacgcaaccacttgactaaggacggttttgtagtaaaataatgcaacttttctatttttttaatagatataatcttgaaccaaaacatagaaatgagtcggtggaataggtaggtttagatcaagaataaatccatcatggaaatcccctatgtacaactatggaaaaattatccaaccagtcatacatccattatacgaatgccaattcagtcctaaatatttcaattttaccaatttagctctaaatctttgcatgaaattctaatatagtcattcggatcatttttcgacagaaatcggtgatgtggcaatctagtcatgatcgtccgtcctatgtggcacaccaccacatcaacaatttctcacaaaaattggctggaatgtttatattggaatttcacataaagatttaagacaaaatacgacacaattaagaagtttatgactaaattggcatttgtacactaggtgtaagattaattagacgattttcccaaagaaaaaccaccaccaagaaacaatcaatgacaataaaaattcaaaggcaatattttttttttttttttggtgagaggtaagaatatattgagttttgaaccaaattcacagaagttcatcgccaaaacttacacttaaagtgacaagacgtcagaatgagtggaagggagccaaagtaacataaaagaccgaaaacaaaggcagtattcaataatgaagaatccaatctttcatgctatttctaccttcaaaactatacttagactggacaagcatatataatgccaccaatagaaggaatagtttggggacgtcaaagctttcttttggccttctagatgaaataaatgcagcaattccataaaaatttcaccaatcagcaatcaaaatctctctattctaagcatcaggactattcaaactactaatcaccgatatatctattaggagtagaaagctgaagtgcaaacttcttgacttggttagagaaattgcattcgaaaaatgaatggaatctatttcatgacaaggaaaaacagattttggccttcattataagactatctatcaattccttgaaataaagccaactactcttgtgtaaaaatatgttttgagttttaaggaaaatgaaactttcctaatttaatttggtttcctagttggagtagatttcctaaaaaaagaggtttcccattttggatcttgctattgcctatatataagaagtgtcttcattgtgaagaatatacaagaagctacttcttcatgaattatatcttgatagcttttagtgttgatgccaattaaatcttgcagtaagatttattaatttttttgtgagattgagaaattattgtgaggaattgtgagactaaattctatgtgagttatttggtgcaattgagggttaggaaatactgagagcttgtttggtaattattctatttctgagaataatttctatcagaaattaatttttttttaattctattccctaaataaatttctgagcattttaaggagtttgacaattatccaaaatttctattcctgatataaaaatgcatttgatagatactcaaattcttttttgatttagaactctttttaatttttaaataattttatcactttttttcacttttttcactttttaattttctttttctcttttcttcttctcctttatcctttggcggtcattggccttagccaagttggtgactagctagatgagggccagcgtcctcatcagagtgtcaccgattcctggcaagggtaagctcgcccaaatttcggagaggccgatcccactagatttgggtgaggtcgagcctcgtccaatcactagcgaggcttgccctcaccaaactatcatgtgagtggcatcacccagtcatggcgagaccgacctcatagtggcctagcaagggcaagccttgccggtggctacgcgaactcggcctcactagattttggcgaggttgagcctcacctaattaccaggaagacttggccttgccgagggccgatgacgcttcagcaagcgccggccaaaggatgacggggtagaagaaaaggaaagaagaaaaacaaagagtaaaaaaaagacttgattatgaagttgttcttgagaataaagaaacaacttttttttacttcttgattatgttccaaatctattccaagaataaaaaagttaccaaacggattttttttttttcgggaaacaaaagaatagaatcaggcactgttggaccggttgccaaacagaccctaagagtgtttcagtgactctattgtggttgtaattttcattgaatctcttgatctatagtagaaccctttgcccctctccccatgggcgtagctcacaccaatcgaaccacataaatctagtgttcgatttattttttggttttgcctattttattgtttgattgcttgcttctgtaactattggtcaaaccaaggcttggttgagttgaagcaaattgataacaacatgagaagggaaagtgagaatcgacatatttgatgagaagaattttggtttctaaaggatgaggattaatgatatcagagtaatatgtacttatccctgtttgggaagaaactaaagttaatggagcaaacgaatcatctatcactttaacaaactaacctaacaaatatatccttacaagttatgaatcccttaccgaatccaactcggatttccatatatttcctttccttttttcgcttggacgtgttgtgtgccccccaccccccccccccccccttttttttaacccccccttttcttttaattttctagtttagatatccattggataaagaacaaatatcttaagtaggaaatctcctatgaagatttggacttttgcttatgggctgaaattcaagacataatttaacaagataacctaacaaacactaccctcaacatgaagaagtgatcatgatgagagatttattttattactttgtctcctatagtattgatgattttgtttctttttctttttttctatcattaccaatcaagagagtaaagatcgctttggagttggggacacaaccatgccagtccagtttggtgctcttcgatgtgatatgtttcgaagcactgacaacccaataaatcccactaggaatcactatcaatataatttgatattcacattgacttgtttggtgatgtaggtgcaa

SEQ ID NO: 10250 - DNA, 1208 bp, Eucalyptus grandis
  Intron number 5 from transcript Egrandis_v1_0.040486m (loc us Egrandis_v1_0.040486m.g) derived from phytozome v7.0 (c hr-ID scaffold_9; pos 19284504 to 19285711 reverse strand)
cctaccagtccgagaagaattacctccgtattaatgtaagatcttcgctaagtactccctcttggtatggtcccgaaatgtcttcttcttgtgccggctataggtggagaaaatcgttttcatgtaggcctgctgttcggtgattgacactgacgcggttaaaaagtagaaaccatcaagattcttatggattgcccctttggaagatcttagcatcgattaagaaatacttttgccgttgacagtggatggataaagacaaatctattagataggtgacaacatatgaaagtatagatatgtaagaaaagtttaaagtgtcgagttagtagttagcataagaaaaaaatgacataaatagttcctaaatttggagtcaatatgtaatgtgattcttgaatttttaatttgttcagcatgttcacttaatttttatacatgttcaacttaattcatgaacaacatgaaaatgtttaatattgtcactgaactttgaattaataggaggacaacattgaacttcttcacatcgtttacggactaagttgagcatgtaccaaatgttcataaactatattcaacaaattaaaagtttaagaaccgcattacacattgagttatagtccaaggatcatattaaataaattaaaagtttggatatcaatatgtcattttcccttagcgtaatggatgaagagggaaatgatcatctttgcctttctcttgaccatcaggtagttatactagtgggatcgtagactaacacaactcctctctcatgcatcacgatatgttggaatggaaaaagaagaataacgagagatgtgtatttagttaaaatttcaactcaaaaatttaaattaataggtggcaggagattacacatatatgaagaacataaaaataatgatggatgtataaatttcatatagacatggagtatcacacttcttctcatgtgcaagcagatttagggatgacatgcgattatgatatcatgttaggaaatccagctcaaaaacctaaattggtcggtagaagaagaccatatatatataaagaatacacaagtgatgtggaatatctcataaatggtgaaaacatgaaatgcaaactatcccaaacaactttgaattcttttgttgtggtttctattaatctacacttggtacaactcaagctacgaaaattgaatgcattgctatagg

SEQ ID NO: 10251 - DNA, 3727 bp, Eucalyptus grandis
  Intron number 2 from transcript Egrandis_v1_0.032186m (loc us Egrandis_v1_0.032186m.g) derived from phytozome v7.0 (c hr-ID scaffold_3; pos 13204163 to 13207889 reverse strand)
gatctctgtcagtagctaacctgctcgtttctttttctttttctttttaaattttttttacctcgatttgtggatgttggtttttcgttgatttcgtttgtggcgatttggattttggatggcctgtactgaagattttttgagcaggcatcgagtgccaagcgaaccaggccagcgccactagcgaggagtgcacggttgcttggggtaagaatccagtgaaactgttgttttgttccttgttctgtgattcctgtacatcgattatacatagaagggcccaattgtgtcaatcggatcggcttttcggagtttttatatgttttgtcatgctgtattgtttttcacccgtagccctgttgcgtgtgctgatggtggaaggaggttctaattgggctatcaagtgtccattgagtgcttttcctctctcttcctagaagttgattcgtttgactcataatgcggacgtttatcaaatttcagtgagcaatttataggagagacacattctcattttgaaaaatcttgacttgaaaagagttcctgttttaaatcgaggggttagagaggtcctttctagtagaacagatggatgaacaagtctgcatgcgctatacttagcatcagcaaaatagagtacccataggagcaaggtgaattcttatcgcttagcagtcaaagtagtgtgcaaaattaaggattacattttgacggtcagagctggtaaactttaggggacaattctgggaatttttttttttacagtgcattgagactgcagtttcgatcatctcctcgaggctttgatcattatgaagggtcaatctgtcaaatgttctcttcctttcctcttgcgatccctatcccacactattaccctgtctctcttcttttctagtgtttgggtctctatctgtctttctactgtaggaggcttcttgatgatggagttttcatggcttcttcacaaattattgttttcttttcaattgattgaagtagcctgtttgtttccttgcataatgagtaatctaagtgtacaaatctcccttttgcattatacaaatgttcttttcactttatatgatggaggctccttgatatgctttatcatcttcatgaataacagaagggtagttttgttttcacatagatttatatgagtgccttgtttgcacatagattcataccaagtatagagagactttttctatctgagaccaaaattatgggagtcctcaaagttttctgaatgcgctctggtctatgatcatgtgacttctcatctttagttttctgtcattattaagtcttagtgcgttctgaatacctggctcgttaattcgtagattttagtgatgatagtcaagcccatctttagttttctgtcattattaagtcttagtgcgttctgaatacctggctcgttaattcgtagattttagtgatgatagtcaagcccatttttcacttataagtgagaatgttgctgggggagtttagagcacatctcctaatcatttgacttgcgaacatgttaacttcaactgcacgatacggtggcggtaagataagttgaaaggccttagaagaaattcagtggccgtacttctgaaatttccactcactgttatctgtatacacgaagcacaaacaagaacaattgattttacaaagacgagtggataaaagaaagagaaaaagagaggcttgggcttagagtccgacctagtggacatacttgacgagtcttcaaccaacgactgatgcagtaaaagtgaaatgcatggttgcacactcctataagatcaaaagcacattattttgtacttttaaagccaagcatactaggtgcaggagacaaaatgtgacaatatgaacccattatacgggggagtagatttgaattgcgtccgtggtccaaacaagttgactttcggatttgaagcgaagccgctcgattttttgctcttcaatctggtcattcttagatgaattttggggaaagttgggtgaatatcatgttacatttgattaagttttaagtgatttttgatatgggaaactaaacaaatggggacgaacggacgaatcgttgggccgattggaccgagctatgtctattgcgactaaatggaccgcgacaaatgaagtctcggtacttcttagcaaaaggacatccatttttcgggctctccgcttccatggattcgttctgagcttggactccatagcccctcatccgagagagagacagggaagctaattaccacctgaaaaaaacgagggggaaaacaaagacaaaagagtgaaagtacaacaaaaatatggctatctttctgttacttgttcttttttaattacctttttggtctttacatttgtagcgagttgatattcctactatttcaatttcctaatttatagatttgactaaattgaattaagaaaacgtgagatacaaaagactcggaaactttattttaaaaaaatcatggacaatatttatattaatatgagcacgagaaacctaagcataaattaatattgtggttaaatattcttaatgaaaattcttatttttagaataaatagagcatattgatataactccaaacgacattgcacgtcgagctaggatttaagaattaatctatatcattttcccttactttttaccgcaagccgtatttatattaatataagcacaagaaacctatgcataaattaatatattcgttaaatattcttgataaaaatacttatttttaaaataaaaagaatatcaaatcaatatggcttttaacggcatagcacgttgagctagaaggtaaggattttccatgctttttaccgcaagccgtactcagaaagccaagtccaaatttgctttttctttacccaaaaaattaattgcgtcgtgccgataatatcattacccactaaaattttcttaatcactcgcatataatgagtgcacttccattttaatatcaaaaaattaacgactgaaatagggggagtttgaaaaaaaaaaaatagggagaaaaaaatttaaaaaaagggggtaagaaaaggtaaaaaacccgaataagttggcggacttccgtcgaccttccagaacggcacggtaacgaggaaaaaaaaaaaaaaaagcgaagaactgtctctctctctctctcttcgcttcgcagttcccgatcggcgatggcgactctcgattccgacgtccccatggtccccgccggcgagggctcgagcagcggcgccgccgcatcctcctcctcgtcgaagaagccgaagcggttcgagatcaagaagtggaacgccgtcgccctctgggcctggggtaagttttccgtggaaagaaaacaaaaaagaaaaccctaatccgagccgatggtgatcctgccgcgaagcctcgagcgctccgagcgcccgcggtttttctttggaccgtcctcttgtggtcggatggcgtctgatgtgatgcggcgtttctcctttgcagatatcgtggtggacaactgcgcgatttgccggaaccacatcatggatctctgtcagttgctaacctgctcgtttctttattttttatttttttacctcgatttgtggatgttggtttttcgttgatttcgtttgtggcgatttggattttggatggcctgtactgaagattttttgagcaggcatcgagtgccaagcgaaccaggccagcgccact

SEQ ID NO: 10252 - DNA, 1181 bp, Eucalyptus grandis
  Intron number 1 from transcript Egrandis_v1_0.013422m (loc us Egrandis_v1_0.013422m.g) derived from phytozome v7.0 (c hr-ID scaffold_6; pos 24324860 to 24326040 reverse strand)
ctctctctctctctgtgaagaagccctaggaagttcgtgttcactttttgattcttctcctgtttccattttcgcgaaagtttcgtgctcttcatcgaaggaccctgcactgcacgaaccttttcagattctgagaatctggcgctatctctttttttttcttctttttttttctaggcatggttttcgtagctgttgcatcgtgctttgattccgtgtgtttccgacatgcgattgtgctgcgttgatgtcgcatttgggggggtgattggatttcgtctcctccgtcgcattttggtgtcggttcgagcgcgcttcgttagggggtttcaatctttttggctctctgttgagatttaattcttcatgtcttgatggaagatcggtcggtgtaactctgtaatttgtgttggtcgtctttcgtggacggtgttgctatattaggcgccgccgtgacctatatattccgcgctcgatgctcgagcgagctgctgagccactggattttatcgagctatttcgaagaagagagggacagaatttatgctttggatcagtgtttcttctttatctgtttgttttctgttgattattgatgttttgtcgagtcccttttctgttttaggattatgatgtgcgattttgtaatcccatcgttaagattttgcaaagcttagcgggttttgtcggaagtaagtgaatgatgtctcccgttctagaacttttgcaagtaataaggagtgcatttatttgtgcctttggttggatgtgacgctgtcgttcagctggtctctgaacatgacccatttctgtttttcatctgttgtagtgaaaaggggaaatgttctttctttggaagaacttgctttgccaaagaagcttggtgcactagcctgctaggcatcctccctttcatgcatttatatccatgattatcatgttactgaaacaagcttggagcatttatttctctttcgtttttaacagtttggattttcttgtttattagtcatgattttgtcttgctcaatagcttttgactgtgtttgattcatttgaatctttattgtcttatactcttccacacactcttaacttgagactttattcaaagaatagttttaatcgcatggtatctattttgtcgcataagtcttataattgcttccattttatgcagg

SEQ ID NO: 10253 - DNA, 2770 bp, Eucalyptus grandis
  Intron number 2 from transcript Egrandis_v1_0.030599m (loc us Egrandis_v1_0.030599m.g) derived from phytozome v7.0 (c hr-ID scaffold_5; pos 73905530 to 73908299)
aagtgagtgttgcgctgtcttttccctgttttctgtacctgttcgctgtcgatgcttgtttggatttattgcttcgtgtttgcttagtaatctttaccgtggaattgaaatgtttggagtgatggtagcaatttaaggcacaggggatggttttcttgtttccattaagtttgtagcgcttgaaggcacaagtgatattaatgccgaaatgccactgtgtgtgtggagggtttgtgaagggcttaatcttttcactcaactgtcttgttctttcaatgggacatttgagtactcctgtagtcccttgatacagattaacataaggatcatgggctcattgggtagtgacgattatgcctaatgattatcggttgtgaagggcttaattattgagctgtttgttgtggctgcagcttttggtagagatatttaataaagataaagaattcatggtgatgtaatgactagaaacagcaaactgtctcttcagttcattggtttatctgtgtcatcagggttggcacgttaggatctctgaagacttaacgttttttttccccaacgacttagtttgatattcattttcttatttctggtgttcaaacctacaaataattgggtgagaataactcaaactaatgaagtgatcttggaagaattaccatttatgaaatttgaccataactttgctaaggaatagcctactactttggtttaggttatcagtttctcaattttgcttatgaagaataggttgcgccagtaactactattaattgtatgctttggctgatcatagtctatctatttaaggcattgttaaaatgtttgtgttgttgtattgtgaattcactgaattatgctacttgtgattgctcgtgattgctctacttatttgttgacaccccattttttgaaggaacaaaccttgttaaactatgcaaggcagtcaagttagagtgtatagggattcctattcccaaagaagaacccttttagaggctatgctcagactaagctagactttctttattgctacaatatgatttgtattaggcatactagttgcctcttcccaaggatcggtaccaatgcttgtttgggaaggaggggaggggaaggaaaattggggtaaagtttgaaactttggcgcagagaggacaaaaatttaaattttctttccattttcatcccatccttgccttctaaacgaaggataagaatgatagactagagaggataaagcagggcaggtaaggttgtcaatttggaatagatggtaagatatgctcaatgatagttgctcctgtcctggggttatatgtgttaatacttggggtggtggtggatctagagtagcagaagcaactcctggtttagatcgtcttaaaactatgatgacgtgtagctttccctgaattctagacaaggcatttcatcaattttattgacaaagtccttattggttgtttctttgttggttgtattgagtgccaaaatctagtcatgcaatctagtcctaaaagatctcctttctagatcaaatccctgagacttctgagtaggttgatctaatggtatttttgttttgagtgattggaaggagagaggaattaaattgacaacttttggggttagcttgatctcaaggccggtgcgcaggagtagaataattttgtttctgcaggattctggtttagattccattttcaccaaggtgccatactctattggcttgccatagtcttcacaactcaaccagaaaaaaagtagtaccatgttcattcgtctcgtgtgttcttctcactcactgaattttggcatataatgatcatacaagacaattgcatgctgttttccccagtctccctgcagtaatgtatttaaaattccttcctgtccataacagtgtcacttgaccagataaattgcgtttgatagcacgatacttttctttctggttggagaacatgttccttcttttcatcagcactcgaaacctatcttattctatggatactgcaaatatcacttattggcttgtcaatgcttaagactggcttagagcattatctaactctccttgaagaattatatgcaaatgctctggggatgtttctttatcgctattggtacttgagttagtctaaactgacaagatggtatacaacaaaaattgtcttgaggtcattgtcaaagtacttgaatgttcttacggctgtgaacatcgtcatttaggactggtcattaagtagatgggatttgatggcatctgttgtttgccttatgtatgtacgcttaacatgtattttactttgaccttcaggctcatcatgcaactatggtctcatgaccagcaaattgagcatcgtcttctaattttaccatggttaactgagattaaaggtagatatatttattgaccagttgattttgttgtttggctggccaataagactgattcgaggagagcagagtttccccatgtattattcattcctcatctgatcgttaccatcttgcttggattactgttattgttaaggcgtttgatggagttaaacatgcattccttctctagtgagtagtaagagaattcagtgtgcaaatgctatcgctgttgtagttcgtgtgtgctacgtttcgttcgttaatgccttcttcttttcccacgtacagcatatctgcaaaaccagaacctacctcattaatttgatcctctcgttgcttgccagatacttgtacagaggcttgtctacaggggatcgac

SEQ ID NO: 10254 - DNA, 2608 bp, Eucalyptus grandis
  Intron number 8 from transcript Egrandis_v1_0.004289m (loc us Egrandis_v1_0.004289m.g) derived from phytozome v7.0 (c hr-ID scaffold_5; pos 57235967 to 57238574)
actattccaattttcaagtaagtttactctgacatgctgcttaaaggtgaatttgacacttgctgctcgtattcccctgaagtatgttaatgttgggtttgtttcgtactcactttcaaattagtcttgatcattgatattccaaattacgatattgtgatgaaatctgttgtactttgtgatgtttggttatccatttatttatcagccttttcaataatctctcttgaaaatctagtacccttgggacctatggcatctctaatatatattactagagatgcctagattctgagaatagtaaaattagagattcaaaatggaaaaatagggtgacaactagtttacgacaccatttcaaataattactaggattgaagaaaaggaagcattcttcaagtttaagatgacgaacaattcacagtgggccttcatatgcttttcgtttcctgtgaactcttactttggaatgaactagaccctacaataaacacttccctcatttcctatccatttctcgtgtcaaggatttgtaagtgtccttctggatcctaaactgttggtgtttcaattggtaattttaaatttctagtttccatttcttcaatcttcaatttatattccaattttattttattttatttatatatttattttgtaattaaattttagttttatcttctatacacaggtggtgcatgaattcatgcataagcaagtcttatttttcggtgacatatgtcgagtaaacataaccatagttacttgtatggtggctaaattgaaactaggaaagtttcaacaaatacctgttagcgagtattaaaattggaagatcttattgcatttcttaatttgtgtttgttgttgtaatacctgagaaaaaacacataccttataattgaaatctttttaacacgaaagactggtatcgtccaatttcgaaataaaaaaaataaaaaaaaaaaggttttgatttgaagtcttcttgcactttaaatccattttaaaccacaaaatttttgaaaattagattctcaagtattttctcttatttaaaaaataaatttcattgtctaaacaaaaaaaaatgggatttgatgacaataattagattggagaagatatttccacacttctttggctttgtgaagtctgagaagaaaaattccttctgttgtgtatcgcttattaatgcatcctcatcatgcagtaagatgagtggttatggacccaggagaccatccgcatgggagcggtgaaggtagagtcccgattggtataagaaaacccaggggtgctaccatctagctttgtataggctaggttcatgagttggcaattaggggactcaagccattgacatctgcgacagggttaaaccactgtgtctctggcccccggctgattctaccgtacaaaccaagaatagaaattaattcccccggaacacaacttgcaactttcattgaatcgtgctctccaaagagcaactcttctcaaaatctctggggttattgagttggaatctcattataactaaggattcttgtggttttgggggtttagctacaaggagaattaggaatggagagcttcccccccctttttcacccgattctttggtcttaagaatgatgatacaaatttgattatctttctctcatcttttcagttttcacattcatttgaaagattaaacaagcaataatcctatatttcgtgctcttatttctttactatttcatcttctatctatcttccttctttatcctttcccctcaagaaaagcttcttggtgttttcactacaaacaaaagatagtgaaggaacttattatggtcttacttgggttgtagaaaaattcgtcttccttcctctcatccaatccaacatatattcacatcactgaagctcaagattatggagaatccaatcaaactttgtctccattcatcaaaagagctagagtttaaagtatttaagaagaagttcaaatgattttcgtgcgatacaattttaacaatcgttgatggtccaccttcttttagaaacaattagtttttaaggaattttttactaatgtctggaaataactgtaattaacaagaggttgcaaggtgtggttaagtggacccacttatggatgaagttgcatacgcccaatgtatggaaaatttctccttaaaattttgtttgtaatcttgcgatatctaattatcaacaaatttatcaatttcttcaacattcacatcttcaaatgtactgctgtctgatcctgtggcatctctggtgtgtgtccatatatgtatagtcaaatctggtggagttgcttaatggaccaagtaatcatgatgcctgattccaaagccactgatgtttgagaaatgactagtgtggtgaactcttgaccttatgtaattaagaattctcctcatgcttctttttggcaattaacagcgctgctatgatcacaccctggtgattatcaggcagtgtgaaccaatttccaatttctagtctatacttggttttgtactttctatattgtcaccatagcgttggtcatgcagaaaaggtggaaatccttttaatacaagtgtaattc

SEQ ID NO: 10255 - DNA, 7189 bp, Eucalyptus grandis
  Intron number 2 from transcript Egrandis_v1_0.007383m (loc us Egrandis_v1_0.007383m.g) derived from phytozome v7.0 (c hr-ID scaffold_5; pos 68037436 to 68044624)
acacaggtagatcaagctcttgccttgattttatttccatttgctacgatttacagctaattaaagtggatagaggaaagtttgagcctgatcgggacgattggcagttcgccatggcgctattgttctatcaaattcttttccgaggtcgcgatagcgcaattgttccaatcactgagttttgccaaaaaacttgtgaataaaatactttgtttttttatttaattgttttcttagtaaggtatgaaacaagttctttgctctttctcttattgtgaacctccagtgagaagaatgggtggtctcctaacttttaaattcttttaccttttccttcatcctagttcactcatcaacctagaatcggaccccatgacttaagacaaaatgtacatgagattctataactcggtttttagtagtattgataatcttatcaatgcctgttgtacatgctcccagttcttatgcttgtcgcaacaagtagtcagttcttttgcctttttgagtgtctgcctctttattaattgagatttagcataaaatagaaaagcatcacctgttaagaggaacgaacgctcctcgaatagtacataaacctgaatacctcatttcctctggttgaaggggtcatttctggggcgttgctctatattcgggaggacttcgaagtcgtcaacaagaaaacatggttacaggtaactaattcttcctcatttcctgtaaattgcttatgtttcttgagtacgttaattctcaaaagttcttgtctgctcgaaggaaactatcgtgagtatggctgttgctggagctatcgttggggctgctgttggtgggtggatcaacgatagattcgggaggaagatatcgatacttctggccgacgtccttttttttattggtgcgattgtgatggccacctctgtagctccatggatgctcatcatcggaagaatactcgtaggtttaggcgttggaatggcttccatgaccgcgcctctctacatttccgaagcttctcctgctaggatacggggcgcgctagttagcacaaatggtttcctcattaccggagggcaattcttgtcttatctcatcaatctggccttcactcatgtatgcgtaatccaacataatgtccttctcctatattagcgatttaagataagcgaataaattggcctctttgaattttaggtacctgggacatggcgttggatgctcggggtagctggacttcctgccctcgttcaattcatcctcatgttatttctgccagagtctccaaggtggctctacagaaaggtaacggtcgagctcttaacttatttcacattttagtatctactggtcatgtatctgattgtaatagttgcagggatgtatactgagaatttgtcgatggaaaattctagtctttttcttacaatcatagcttttggaggcataatcgatttactgattaatttttagtttcttttaaaactaggaatctggtttcatgttgtttagtagttaagtcacacatcattttcttgtttgaataatggttttgctagctatgcattcagacaaactgtggagaattaaatgcttgggggttaccatttgagatcgtgtagagggattagttttcagttaattcatattcttgcaggtcttgggaagtccctattgtacatgacatgacctggtataattttcttgacttccattttgttgagttttccaaaaattatatagacttggtcttgcaaatgtttgtatgttagacacttatttctctacctggagcatggacccaaatattattcattttttgttgtttgatccattgttgataattatgtatctcagtggtatgttcattaggttcggttgccgattcttttaaataagatgcatgtcgtgactgagtcgagagttcgtcttggaacttttcttgatgcgagccatgtttatattatgcaatagagttttgtcaaattagctggactatggggaatgacttaatccattttcctacttctgtattctaacataaagtcatgtgtctacgacatgggctggtacattatattgtctctgatatacatatatcctctgtaaaacagaacaagatcgatgaagctaggagtattttggccaagatatatcctgccgatgaggttgaggacgaaatgaatgccctgcaagaatctgttgaagctgaaaaagccgatgagagcatcgtgggagagagtatgattgccaaagtgaagggtgcttggagtaacccggtagttcgaagaggattatatgctggaatcacggttcaagtggctcagcagtttgtgggaattaacacagtcatgtattacagtccgacgatagttcagtttgctgggtttgcttcgaacaagaccgctttggctctctccctcataacttccggcctcaatgtggttggttctattgtgagcatggcatttgtcgatagatatggacggagaaggttgatgatcgtttccatgtttggcattatctcttgcttggttgtgttatccgtcttattctggcaagcgtctctacacgcccctgccgttagtaagttgggatctaaccactttggtggaaacactacatgtcctgcttatttttcggctccagatgcagcctcgtggaactgcatgtcttgcttacatgctaaatgtgcattttgtgccgatggtacaaatgaggtaaaagtttgcttcaattattcttttcgagcaatttgtcccgagtattttcgtccctttttataatgcataagctaagcttgtgtgttgtgttcgtttgttatttagtatcaccctggagcatgcctgatttctgacaaaggaataaggggcatgtgccgaggcgagcaacggacatggtttgagaatggctgtccaagcaagttcggaattttcaccgtccttctccttgggctgtacatcatatcttacgcacctgggatgggaaccgtgccatggatcgtgaattcagagatttacccactgaggtatcgaggcaccggaggagggattgcagcggtcgccaactggtcctcgaatttagttgtgagcgagacattcttgaccttgacagaggttcttggctcggctggcagcttcctcctttttgccgggttttcctttctcgggctcgtcgccatttacttcttggtgccggaaaccaaggggttacatattgaggaagttgagaagctgttgcaggagggatacaagcctaaggctttcagaaagaggaactccaaagttgaaggatcttcttgaattgttctcttcaagcattggtttggatttcttaccataaatctcttcatcttttagtcaatgaacaataattggacattgatcatatggcaatttagcaaggaaggtgtaaaattccatagctttggttgaaatcatagtatttcaattttacggtaatttagcaattgagatgtagaatcttgtcaccttcaagtacttttgttgttttagttgaaatagttggtctgtcataatgcaatttttttggaaacaatttttgataatagggtcttccttgttagtcatcacaagcattttgagataatgatttctatgaacccatgcaacattcgacaatggaaatattttaggcccaattcccttgagaagtggtaactataattaggattcaagctttggtctaaactattgtttatctcataaaaaaatagttttaactcaagtctcaattctaacctaaattttttactgtgtctcatcaaaaacgtcaattttcatttttcttgtctcataaaaaagcatacactttcactcaatacttgaatgtgaccttatttagtttcttttcaacaatgtcattaaaaatgcgacgtgttatttcgcgtatacttagcaactcacaattgtcgtcacaaatatggtattgtgatcctatttagggtgtgcatggcaacgtttctattccaaaaaagtatttcatttcaaaaatattttttttctatttcctttcagaaatagtttttttctatttctactctgggaacaatttctgaataaaataaggtatttggtaattatacaaaatttctattcttggaatagaaaaagaatagaaatacgtttggtaaaaatttataaatttttgtatttatttgttttttcttcatactcacggaccgctgatcgtcgctcgtcgctgcacgaccaccacacgattgccgaacgatcgtcgcacgaccgccgcacgattaccgcacgattttcatgcaaccgccacacgactgccgcacaaccgccgactattgccacatgattaccacccacagcccactggtcgtgggaaggggcagtggctggtgagttgttggtggtggtcttgcgactgcggtcggcagtgacgatcggcagtcgtgcggcggtaggtggcggtcatgcggcggttggcaacgacaagttgctcgcggacggtggcggtcgtcagtcgatgggttgtgtgtgatagtcaatgggctatgggtggtggcaaccatcgctggcagtcgctggcagtcggctgtgacgatggccgcgggtgacaggaggtgtctggcggttagcaggcggctggtggtggccgcgacaaagaagaagaacaaaagaaaaatagaaaagaaaaagaaaaacttagttttagaaattgtttccaaaaataagaagctactttttttttttttgtttcttgtttctattccaaatttattccgagccacttttctattctacggaatagaaaaataagttagcattaatttatattctctctttttttcggaaaataaaagaacagaaatcgggagaaatgaaaacttacatgcaggcccttagtttcttttcaataatgtcattaaagatgcggtgtgccatttcatgtgtacttggcgactcatggttggcttcacaaatatggtattaattaataatgacactttgacacaaaagacttaaaagaaatatcataagggataacttgacagtaatattctttagatattcgttctattttacatggcttaattgaggaaattattttgagaaaaagagaggatattaccataattgtcaaattcccatgtatatcatttggataagagtacatctaatccagtccggtacaaattcaatattgtggatattggattacttctgatataatataaaggaattcaaaattggagatttttttttttttttttgggttcaaaatttaaattggagatgaggaggaagtcgggggaggttttgccggcgtgccaggcatcaaatagagagagggagaaaccgaatcatagactgaacactgaatatagtcagcctaggcaaccgtgaacaatttaatgtccctgcacggcacgctcgatggatttggttggtgggccccgctttggataatttccgattagactaatggataaagctttcgacttttgaactctctttccctcagatgttatctttcaattgattcccttgtgttcttttccaacttctctcgcctttttctcggttgttgtcatccaccctttacttggaaatcacagagtaattccctgctctcgcctgtggccacagcttttttgcaaaagtgtcgaggtaggggtgttcttcaggaccacatctacacgacagatactcaggatcttttctggccctgaagcccgctcccccgacccggttctatatatggacgtgtagactgcgtcggtgttggattgaatcatcattcatccgccatcttattcatagtttgcaggagtccagaagacccagaaagcagagagagggagagaaagagagagtgggaggagaaaaggaggcttttcctggttctccctctgggtatgctctgttctcgttctgcttttcccagtttctttgtcgtgcgttcaggatttcagcgccatatttgggtccatgtcgtttcggatttgtgattctctgttccagtgcctcatggagagttcagtcgatcagattcggcgggatcaatgggcttcatttttaaagttttttacctggcgtgttgtttgctgaaactcgataaaatagaataattgaagttgccggacgaaaaggtggaagttttggagcgtagtgtcgaaagactgatttatgtttttatcttgctgaaagttgtaatatagcgtgtagtaaaagagatgataaataaaaaattgcgcctttttcatgtttggaagcgaaagttttcgatcattatcgcgtattgtccatttcgggtaagtagatcagtgaatctttctttgatttttcgcagaaaatcctagatttaaggttctttttgaagtgtgtgtaccaggaagggataagatggagggaggtcacaccaaacccgataaaacggagttcaccgaatgttggcgcacgacatggaagacgccatatattatgaggctcgcactgtcggctggaatcggtggcttgctgtttggctatgacacaggtagatcaagctcttgccttgattttatttccatttgctacgatttacagctaattaaagtggatagaggaaagtttgagcctgatcgggatgattggcagttcgccatggcgctattgttctatcaaattcttttccgaggtcgcgatagcggaattgttccaatcactgagttttgccaaaaaacttgtgaataaaatactttgtttttttatttaattgttttcttagtaaggtatgaaacaagttctttgctctctcttattgtgaacctccagtgagaagaatgggtagtctcctgacttttaaattcttttaaccttttcttttactttttcctccatcctagttcacttatcaacctagaatcggaccccatgacttacgacaaaatgtacatgagattctataactcagtctttagtagtattgataatcttatcgatgcctgttgtacatgctcccagtccttatgcttgttggagcaagtaatcagttcttttgcctttttaagtgtctgcctctttattaattgagatttggcatacaatagaaaagcatcacctgttaagaggaacgaacgctcctcgaatagtacataaacctgaatacctcattttctctggttgaaggggtcatttctggggcgttgctctatattcgggag

SEQ ID NO: 10256 - DNA, 1877 bp, Eucalyptus grandis
  Intron number 5 from transcript Egrandis_v1_0.024375m (loc us Egrandis_v1_0.024375m.g) derived from phytozome v7.0 (c hr-ID scaffold_3; pos 22254351 to 22256227)
acaacatagttcgatattacggcactgagaaggtgtgttccttctttctaagtttctttccgcagcatctttcactttggcatcaattatgatatgaccggaactgagcaaaatgtttaggtgaacatggctgtgattgcagccacaagatagttgtagcgtcatcatcactgcatgtttaagatcactgcatttgtggcttttaagtagtaacagcctttcatgatagacgaagacattttagttccctctccaaccacaagaaaagttcgtgaagaattgactgttacctgaggtagtaattatatgagtaaagaatatatgcagagtagacgtcagtttttgtgctcactctctctctcctctctctctctcctctctctctctctatatatataagcaaaaaaagtttcccatttaaagtgagactgtcatgtaatcaactctttgatttctagtggtagatgttttacgaattattcttcttgcaaactgaagattcaggtcaaactctcaggactaataaacaggaatctgaggctttgagaaacggcagccccgactaataaaacataaagggggaaaaatgatatgcaagtgaagtcatttagttcaatagatatcctttaattgaccgttagtcacctacctttcccccctcttctataactggtcgtggctgtagcaacaataatggagctcctctgcaaagctcaaattttccatgattctagtccagcgtcatttagttacactcctttttatgcaacatcatatagttcttaacctctacaattagagaaaactgaaaatggaaacgatcattgtttaagtaagggaagtatatcctatcttaaaggctttaatgttcaagtaccttctggttatttttttttttcctaaacatagtttcacaataatcatcaaattctaagaatgtgccatgacgtaacttcttgctggagatgaaacatgcaaaagattgttgctggtaaacaaaatttggtttgctacacctacaatccaccacattgttttgtgggaaagagggattaatgcaatacgacttcttccgccaggtgcagtatgcaactgtctttgttggcactgctgccatttagaatcgtagtgaacactcataacttggatatttgtgttgtacgcggaaaccaacaaaaagaagagctcggtaccatgcgttcttgccttatttttccttttaagttcacagaattgcttttcatttgtgatctgacgtaaacatttactaaattaacaccgatcaaacagatttttacgaagcactgatcgattattgaaaaggtacttgataccttcaggaagcataactaacctcagggccttgtctaggggattcttgccttggtacattatgggaagggtgttgtcatgatccaatgattagtgtgatgttataaaaggcctagacatccagcttcattaggaagaataaaacgttaacatcaccgatgtagtttgtttcattttatttgctttttggtatggctgcctctaatgaatcttgttaaaataccctgtattgttaacttatggggttttgattggtcttatatttatgtagattccttccacctaacagcttaacctttgcgttcaggcatggtttccaagctatgttctgcattaatttatttccatgcatggctctttttcatcaagtccgtgtgcacttctcagacccgttttcacttgagaggaggtcttaaaatattcaactgtgctaatttatgtattttcaatgtgccttatatacatttcatcatccaccacttaataacttagattttgggttggatatatgttaaatgtaattttctttactctcttccaggacg

SEQ ID NO: 10257 - DNA, 837 bp, Eucalyptus grandis
  Intron number 2 from transcript Egrandis_v1_0.003743m (loc us Egrandis_v1_0.003743m.g) derived from phytozome v7.0 (c hr-ID scaffold_1; pos 34514297 to 34515133 reverse strand)
gagtacgcactattccacctttattatttatattctttctctattcaatgtgtgtagactcgtacaattaccaaatcatgttatgtgcatttctatatattatctgtgcaagtgattgcaactgcaattaaaccatgccttaagtagtcatgagaggttggattttctttaatatcattaacgattctgaaatgaatgtgatgcttccaagttcttgaaaaagtatctattcattagatttgatgcttgcggttataatctggaaaagtggcagtgggcatgtattactgtggttttaattgaacttacaacgagcttaatgctaggagatagcatgttgccataattttaatttttcttctatttatactgttggggggggatttcgatttaggagtgatatccaagctttcaacatcatttcttttttccaagctcttaaatagtacaggtcagccagacctttagtagcaccccagtaatactggatatatgggcagtaaactggttctacttgcttgattgccagttagatggtctaaaagtagtctggaatgaatgaagattgagaaccggcttatgatccatttctggagactaaacatcagtacacctctctatactgatatgatataagagaatagttccgttcatagcatggtcatctccttactgtattttccactcttacattatgattttaggcttgggtttagtagagtaaaagtatgacgaagagatattaatgttatcatttgattgggcaaattctgaaatttcttgttctattatcttctgatagggatctgcggttcgtgtgctgcttccggttcaagc

SEQ ID NO: 10258 - DNA, 3026 bp, Eucalyptus grandis
  Intron number 2 from transcript Egrandis_v1_0.004142m (loc us Egrandis_v1_0.003804m.g) derived from phytozome v7.0 (c hr-ID scaffold_11; pos 17534997 to 17538022 reverse strand )
gaagcaagataatcaagtctgtcctcataggtaagtagatttcttcattctgtcatgtttatgaataaggactatccatcctttgtgcacccagattcgggaatatcccgtcctatcatttcaagagaggcaacatggagtctataagtgataaatcccacaatttagaaaaagttatatagcctgatgcattttcagtggatcggatgtttgttgttcgtacacagctcttcggaattcaagtttgctgtttgatttgggcacatattttatgaacgaggactatccatctttggagcacccagactcgtgaatattacatcctgtcatctaaataaattaaacatggagtctaatgataaaactcccaatctagaaaatgttatatagcatgatgcaatttcagtcatttgattctttatttttgaactcttctccctttaactcaatttttaacttgaatttgttttgaccattaattgtcaagacaaataatggtttggtccacacgaaaaataaatggttccgtctgacattaaaaataaaaataaaaatctctctacagtcttctctttcgataaatgtaagtatatcgggagaaaatcaattggatattattattgtacagttgtcctataatgaaagtatttacttctttctttcttttttatttataaatacttctactatttcctcataaactcaccttttgtgccttgcttttttagtagtttaagtaagatgatgtaaaatttaaatgtacatttttaaaggctcatgagatgtgatatttttgttactatgccaggatgcatagaaaatatctccccactactttatatatatacttcataacacttaaaaatagactatgggtctttctctcacacttaactcttttaaggattaataccctaaaaaaaatcataaactgatacacatatgatgaatttacctcaaactaatttttgaatcacgaaaaaaccctaaattaatacacctgtgataaatataccacaaatgattgcaaaaagtttcaaactgatacacacgtggcaaatttaccccaaactaatttgttcaactatcaaaacctcaaagtggtatatatcttcccttaaattagattattaataaaaccacaacaatggtacaactatgataaacaaaaagtaaaatctcaaattgatacattagtcaaatgtcatacattattgaactttgcaatttgagattaaaatttaacaaaagctaaagagggtaaatttgtcataagtgtatcgatttggggtaaatttatcaaatgtatacaagtttggggtttttgtggttaaaaaattagttttggataaatttgtcacaaatgtaccaatttctaattttttaagtattaaccattcttttaaagtcaattacctttttaaaaaaaaaattcttttaaagtgtttgcatgagattttatcatttcctttatatacaaaatcagccatgacacacgtgtgatatcaatcataacatcaaaacgaatgtggatatttttctttagaatttttctagtcatttaatgattctttttatataaaaaacgggccatcatttttttctttgcaattgttttatgtttgtagaatgtcccatgacagattatttcaacgatttttgttagcatattgacactttctttcagatgaatccatgtattttaaacggaacatatagaatgaaaaacgtaatcatgggaagaacattgccaatgcttatatttgcaatttttgataggaaaaaaaattctgaagaaaaaaaaaatgtgatagctgaacatggcctataaaagaactataaggccaaaaataattactaacggtgggtaggtgtcaacataggagagtaccattggttatttttgctattttttgaaaagaaaataaaattatgaaagatatacgaaggttgacatatgctaagagagagagagagaaaaggcccaaaataaacaaagtggttaagtgtcaaaatatatactttgttgaacatttttcctaaaattgattgaataaaaatataaatggaaaaccacggtcgtaacatagaattgaatcgagtatgatgtacctagaaaaataaatttggtctttgtggccttcttccttcgattttacttaatatgaggattcaaatatgtgcccagggacttgtgtgaacaaattgggtacctatttctgcgacgaccctaaaaagacagccaaattcgtttttactggtaagtaaatcttttaaattagaaatttgagtcgcttcatgctatagagtattgatagaaatagaacatcatagcctaaattatgttcagaaaaggtacataagtaggacctgagcaggtccttaaactgctcaagagggaaacagagggagaacctacctggggacaatgaccccttacgcccctcctaggctgggatcttggcctggataaagattccagccctattggctgacccggccactcctttacaggagaggacagccatgtctgatcctcatgacgccttcctccagggaaacttggggcgtggagtattgatagaaatagaacagcatagcctaaattatgttcagaaaaggtacataagtaagttttacctacataagtaagttttaccttaccattcattctaacgtgactgtccattcactctttttttttaatgtatccctctattcttctacatgtcatgatttgatcgaagttttgaattcaattttcaagctatgcataatctaagtttttcacatatatagttggtagcttcctatgatgggaagaaatttctacttggccaatggaaagaatatccataacttaatgagatctattgttctcctgcttccaaattactttgttccttcgtggataatttagcacatcagtaaacattcttaagagcaggtgctttttatgactctgtcctctgccaaatttccggactgcaggccttggagcgggcgttggaggattagcgcaagtg

SEQ ID NO: 10259 - DNA, 1388 bp, Eucalyptus grandis
  Intron number 1 from transcript Egrandis_v1_0.018597m (loc us Egrandis_v1_0.018597m.g) derived from phytozome v7.0 (c hr-ID scaffold_10; pos 25674433 to 25675820 reverse strand )
gatcgatcgtgctggtcgacatcatcgctgaaacggtgagcctctcgatttcgcgtctgtcccatgcatgttgttcatcgcggagcgggatggattggttttcgatgagttcgaggtttagtttttggattctggggaacccgcgacggcgtaatcgggagtttctttctggcctgctttgtcggtttttttttggccccgggttatgcaatttagggtgcgcatgatcacttttttactttgttgatcaatttcttttaaaaattgttcttttttaatttttactccctcgaatagtttttaaaaatgcgttcaatacgattgataaatttttatatttaattttttttcttgcttacggattgccaaacttcggtcgtgcactggcggtcggcggtcggccggcgatggccgcggcatggaaaaagaacaaacgaaaaatagaaaagacagaaattacttatttctagaaattattattgggaattactttttttgttgtttttatttcaaatttattaccggctaattttttattcggatgaatagaaaaataagttgaaattatcaaacggatgtatttttcttttttattctgaataataaaagaataaaaattgagagaaacaagatgttaccatgcgtgtttttctcggtctgttgattgatgtggttgaccttctctgactttgcttggaccttgcgctttttgggctatttttgccggatgtcgttgctggatatttggagtagtgggtttgagaattactgtgtttctgccactagtagctggatcgtttcaacctttttattgtcggaggcctgctttatgtaaaaagatttctgctctctcgggccctttttttaaatgatttgggtgagaatatcttgtgattcctattttggtaggtatattaaatacgaggattgaaaggattataggttcattagagggcatgagaggctgcctgcccttgtgaaattcaataggaaagaaaggcaatctccggttgttgcttggagctaagggaagggtctttgtagcttgcttgtttctcgtgtggaattactgcttgatgtccagaagggtggtttttcagctttgttttggattttactttgttgaacaggcttatgaaatcttatctgtcatgtgatcaattatttgcggactatggtctagagaatgaacatcgattgttcagaaatcactgttctaagggatttgagataaattgctgtacttgttgtctgctccgatcttctcaagcttttcttcgtcttatctggagggtgtaatgaaatatttacacttataacatggttgatggcattgtggatacgaaatttaccatgcgggtcttttttctttttttttctcttaccag

SEQ ID NO: 10260 - DNA, 7947 bp, Eucalyptus grandis
  Intron number 18 from transcript Egrandis_v1_0.002133m (lo cus Egrandis_v1_0.002128m.g) derived from phytozome v7.0 ( chr-ID scaffold_3; pos 53817019 to 53824965)
gtgaagctgtggaagtgatactttggcatctccaggtatttttcctaagcactcagattggaagactgaattcgctgttcccatcaaagtgcatgtatcttgtccttgtatcagttgcctcagtacgcccaggtggtgtcgtctcactgatactaatttagagcttatgatgagcgatgggatttaactttgtgacatttgttgctgttgtacatcaggtgatgacttcttttgtcaagttgaagctttctgcgaatgcttcagtgacatgtaatgtttggcctttccttagagaaggaaatgttctcagataggactctacatcgataattgccgtcttctctcgtttggtacttatgccatgtctcttgaacttcgatgtcatttagttttctggtcggattgaaattctaattgtcggtttcattctcatcaacttaaagggcgaaaagaaacagatttcgaggaacccccccactttttagctgttaagagcttgagatggaatgaaatatgttctggttagatccctaggaaacaagtggatccatcaactctaagaatggctgaaggtaaaggaaaaaggctgcgaggactgctaaaaaagtatccccctgctgtagcctttacttgggtattatttaccttttttgtatggattaatgccagcacacggatgatacggaatctgagcctaagatatagtacctcccttggtgattccatccactgggtgattattaaatggaggctttcatactagagttattgccttggaagtaaagcaagatttaccgtgcgaaaaatatagtggacatgtggagtggcaaaatctcttttctcgtaataactgtgtatatgttgcaatcaaggggttccactaaatcactgtagtaaacatgttttgcacgatgcgataaatgcactgtcggcatgattcgtattcgaatgtacgcggtggtgctatatattgtattgctggtgagtgaaaaagccagaagcagctgtaaatgtaacttgttttgagcgggattgaggggaatttgcaagtatgcgtggctcatctgaaatgctggtctcacggtgatatcaaattctccgctggttctatgctcttcatggggccagaacgcaccaattgcctgcgctcacatcggctttcgtcatatcatttacggcaaggcagatcctttgccgcattaggggcctcatgttgcaagttccgttctccctcctgcccggcgaagtgcataataccatcgtcggtctcctctacccgacgcgccgaccggaggttctcggatctttgcttatcgtgcctacccagcaggttatgcatgcgatgggctaaaggcagagtcccatcaaacatgatcagcctcgtctgacgattattgactgtagaaattcctacatctgaggagagttctagtccgatgatgtcgagttgatctgctgtgttcctctatcgtgacagaacatgcgtttgcgttgggcaacaaagggtttttcttttaaacaaaattcaatcgagagaacacgggatacaaaagccatgaacttttatctatctcaaaagttagaaacaaatatgtatatctatagataaattgatatcgttcttagatatgattataataactagatacaattcaaaatgaggttctatttttagtgccatacttattgttgattcagaaaatgaattgaaatgaaaagatatttcaaaattcgggaatcaaagttagaagtcctgagttcgaatgttttaaggtcacattcgtctcttcaattaaattttcatgcttagtaccaaacagaagactgatcaaactaagcgtgaaggtagtgttaggatatttaaataataagtcgtatattcatctaatagtttaagcttttacaatagttgacagtgcaccacaaaatcccacacttctctttagatagttttgttcggtctcgagatatagtaaaggtgaaaaactcacatttctcctctttttaagtataataacacttcaaaggagaagagaagtatgagggtttacagattcactataaactgttttaaaagtttaagcgattagatgagagcataacttattaattaaatattttaacactccttctcatgtttaatctgatcggttttctatttagtactaagtgtaaaaatttaattgaagagacaaatatagggtaagttaccaatgagatctgcctttggctaatctaacgaaaaggtatttaaaggggtagttaaaaagctgtaaggctagcttcccctttcccaatgggaaagaagccctttgtttctttcttatccaaaagcagagggccaagacaggagcaagaacccttggatccatcgagaaacaccgtgccatcccctgaatttggaggcgcaattattacatcttcatgcatcacccacttattccaaagattaatccttaaaagaaagagattgatttctatttaaaaaaattttaaaaaatgacttacgaaaaggaatgagtgaatgaataatttttttttcattatccatgaaaatatttacgcataatttgcttcggcggctgcgaaatctttggtaatttttatttgatcggaaaatttgtgataattcagacacaaaataaaggggcgagactatcagccgtggtggctctactgggtaggctcctacctttgaagggaaacgtcaagtgttcgaaactcttgcaattgcaaggaggttggtagatcattaggtgtattacgcgtggcgccctggtggtggattctgagctagcgtcacttggggtttacgtggcggctgtcaggcaaaaggttcgctctagtggtgggtcatgagctagcgtcacttgggtttacgtggcggctgtcagccaaaattcctccggccaaaaaaaaaaaaaaaaaacaaaggggcaagattttttttaagaaaagacgcacgaggcaattcaattcctgctcctgtgtgcctcgacctttctttgtacggggtttctctctccggaacattcgtggcacgcgtttcttggttcgttcctttttctcccagtttggacgctcacttccggagagatcgttcgtcattttacaccgtggagtgcccatttttttttccttgaattttcggttggaagtcttccatcgccttcgagtaaattggtcagtcaggtttagactttgtttttggctgatgataatctcttagcatgaattcagttatattgttcagtaatgatctggatcttcaactacaggcagatactgttggtcgctccatggatgttagcaaaggtgcctgagaactctacattaatggggaattttggtgacatgcccatctttaatcgttgttcttgaactagaattatgtggcgtgtgctattctatatgctttagattttctagggaaacgttgtcatataaattgcaacatatatatttgttcactttgttgttttctgctccaaatttagatctattgtgtgtatagcagggaaagaaatctgttagtctcatatatcttgtagacttcgataatctattgattcacatagatggtattgggattttcctttgtccttcagtctgaacgactattgccaattcatgcgctctggtgcgtcttgagcctttttttttttcctttctgaggatctgtaagatttcgtccaccatgagctcagagtttgattggtcgaaacagaagggaaccatacagaaaaaactactgaaagagtttcagaaggactaacctttgagcgacaacggagaaacgtaagtggtatgagcagaaaaaggaccaaaactcaataaactaagttacaacgaaggacaagactttcacgacaagcctttgaataatgcacagacaagataattttgtcatttctcgctatcactcctatctattaagaaggaaatgaacccaatgacaccagttaacaaaggatgataactagcctgcctttggaatcaagtgtaactttccttgaggtaaattttatcaaccgtaaaatcctgatgaatatttttagttagttaatggaagaactttgcctttagatgtccttcttcgttattaatttagactaccattctcaggtctttctaattgaggtttgatgcagaatcatttccctagtaggctgaatgatgaagtgtctttcacagtttcactcatagtgttcaaattgggtgctacagaattctcatttactgaagtgaatactattcgagcaagcgccagcaaggttacctgttgccacttctcatcagatgggaaagtacttgctactggtggacatgataagaaagtaagtacaggcagttatgtggacatgataatatgttgtcttatgccatagtctgataatgggatggttaaatttctggattatgcaggctgtactgtggtatgcagatactttaaagccgaaaacaactctggaggaacattctttaatgatcacggatgttcgatttagtccgaccatgtctcgcctggcaacatcttctttcgacaaaactgtcagagtctgggaggctgacaatgttggtgaacataatatctcatcgacactcacgttttttagatttttgaattcttttcgtattcaaagcttcttgcaacagccttctgatatactgaactacacgaggtgccagcccgactttaagtactgatgaaatttcaaaactttctgccactatgatacaagtgcttttgatgcaagtttgtttttcccggagcgaacaatctaatggaagttattgttttacataccccagaaagttacgtagaacatgacctacacttgtagctctaagcaagcagatgtaccggcatgagttaattgacaggactctgaatttatagttaagtgcatgatggtgaagggtgaagaagttggtaatctttcccttagagctgaccacagaaggttttggtcctttagaggaatggagcaggactttcaattaaagctggtcacccgttattactcagatacttagatattcctgtctttggcttgttgccacttgcaacatcaataaaaaatggctttgtggtcgattttagctttgtagccctaataggagttgccattgtttcaaaatctgaacattgaaagtttgggaacatatactatattgagtcgatattatgaatttatggcctaactgtccatgtgaatggttttgcaatctgactcttgttcaaaacctagagagttgcttcagtatgtaagttctctgaatttccacacttgcttacatgagatgatcgtctcctcttattacccttgaagctggaattctagaggctgctgatattgataaattctgccatgggtactctcccgtgataataatcaagtgaagatttggctacttccttcatagatcattttgaaagcattctcttcggagctcaatgaattgctgtttttggactgcagacttctgcggcatttattgtgtggcttttttatgaaatggtgtctgtgactatgaggattgtatttatccttcttggctcttatgcattattttggcagctcaatgtcgaggctccttcattttaccctgataatgatcatgttttaagagtttcctgtttcggtagttgttggtcaatgtggagggcaaattcgcatgtgaccttcctaagatttatttgactgtctctgttttgttcgcttgtgatagtacgcatttagcttcacttttattggctttatgtctaatgtccatgtgcatatggtatcatcaatggattatttgttcatttcaggctggttattctcttcggacttttatggggcattcttctgttgttgcgtctctggacttccacccaaataaagatgattttatctgctcatgcggtggggatggtgagataagatactggagcattaataacggcagctgtttgagggtattcagggtaaaaattaatatgaattgtcatgctaatcttgttgctccttgtggttttaatgagatggtgcatcaagtgcatctcggttctctaaaaatgtataacttatgttgctcgtgaatcagggtggcacagcccagttgagattccagccacgtcttggaatgtatcttgctgctgcggcagataatgtcttatctatattggatgtagagacacaagcgtgcaggcaaactttgcaggttgaatttttagtaacttcctcctttttattcggtctagttaagtggggattgttattgggtggaaaaaggggatattgttgctgagtgaatgattgtcttacctctagtaggtatgattgaatgatgttgtctgcaactacctttccagattctatgccattgaattgtatgcttgctactgatggctttagttcatgctctgttatcgtgttgaaatttgaaaggacaatatgttttatttctctgggcactagaagaaaagctattatttcatctctctgccaaaatcttactgtggtgatgggagttgttttgtttttcttgctagggtgtattggtgaacctattggcttgctggatatacctgagtcaacttgccttaataaagtagcattttcccaggtctaggtttaaggctcaatctagttgacaaataacagtagaaaaaagtttgtcatctaagcttgtcgtctttttatctgctgtatctaagcatatgatgtttatgtatgtgtcaccatttacggatgctattttaatgacacaattagtctcaaggtgtatctcatctttcagagcattttatggtttgcatctatcttattgaaattgttactcattcaattgcatggccttttagttcaagttggcctttcttttctttgagattgtcacaattagtatctttattctctttgtttcctgcttctagtaacatgttgatcgttcccacatgaatctgaattttgataacaggggcatactaaggcaatcgattctgtgtgttgggattctactggcgatttagttgcgtctgtcagtgaggactctgttagagtttgggcagttgggtctggtagtgaatgggactgtgtacatgaattgagctgcaatggaaacaaggcccactcctgcgtgttccacccaacttatccttcacttttggtgattggctgccaccaggtaaggcgcacgtttgaattatttattttagcattttcaggtgaattctatctctgtacataggagaagtgagagataagtccatgtttagatgttcccaaattttgtgaatttttaggattgcataagaaatttcgagcaagcttcttgggatgctaatcaggctcatgagtttctaaaaatattaagtatttcctagtacaaatcaggcgtctttctcactatcctctgaagtagcgaaggtcaggtaattggcaacttcagaatcatggcttctgaagcaggctctacaagagccatggaacagcaaaagctatgtgccttatagtatgagtcacgtgaataggctctttggtcttctatagccccataagatcttggtttaatggtgctttggtctaagctaattgaaaattctctgcagaccctggagctttggaatatggccgagaacaagacaatggctttgccagctcatgacggactaatttcagcattggcagtatcaaatgtgacgggcctggttgcttcagctagtcacgacaagacagtgaagctgtggaagtgatactttggcatctccaggtatttgtcctaagcactcagattggaagactgaaatcgctgttcccatcaaagtgcatgtatcttgtccttgtatcagttgcctcagtacgcccagttggtgtcgtctcactgatactaatttagagcttatgatgagcgatgggatttaactttgtgacatttgttgctgttgtacatcaggtg

SEQ ID NO: 10261 - DNA, 2408 bp, Eucalyptus grandis
  Intron number 1 from transcript Egrandis_v1_0.023577m (loc us Egrandis_v1_0.023577m.g) derived from phytozome v7.0 (c hr-ID scaffold_3; pos 38479584 to 38481991 reverse strand)
aaggtacttcttctctaacacttcttttcgtcatgtatacactttacgcacacatactcgggcgagtatacctattaccactgccacacagctcacccagatcttcttcttcttcgaaattatctttcttgattcatcaaccacctaaacttcacaacgcgacagtcagcagtgatgttgaggaattcttattctgtctattgttagttagagaagcagttttccatccacatatgttgttatgactgtccgtgtagtaagtatatgaatctttatatagaatgattgaatcacacataggtctcatgcaaaccttttctctccattttctttcacgagaaatgaacacaacaaacactccgattttttttttttttaagagtaaggttctagaaagtatatgaaatgccattgagggaatattcccatacattaacttcccaagtattttatgctccgcttgtttcacgaaaaatgaattatttgaaaaaaaaaaaatacttttttagtgatcgcttgaaataattagtaaacgacgaaatttatgtctagacattttcatgaacaattaaaatattttttgttcattcatttatataaataatacgaattatcaatttaataaaatattttccaaatcattcattttcacgaaacaattgcactcttagataagcatcatttatatgctagactcaacgatagaagaactcttcgtttcagtgggttcatttggtttcgattgattacaaagccactacttcacaagtgtttgaaaatggaagagaaaaaatgctgatagggatagagttcttgatctaatgctaccattcaagttgacacgaacaagtgcttggtgaaacattgtccaacattgtagtttgtatctccatcaaaatatgtggtgcctaattttcttctagcatagagaaggtaaaaataaaataaaatcataagttagtctgacaatgagaaggacaacaatagctagttcgagaactttgaagatatatgcagaactacgatttatcctgcttgtggaagcacttttcagcgaccggcatgatgttgttgtactccgccatttcagagcataaaatctgatatttgttagtgctttccatgtgatcatccacagcccaatgttgtagaatgtatagtcagatcggtgagtgaagtgcgtttcagaatcatcaaagcataatgaaacgatctcataagctaaagtgatggccccgtgacgatgcggagtttccacgtcctagctttgctttatatattagggtgtgaatctatgcttcgttctgacgtgtcactgataaaatgatacggttggaccaccgtatgaaacaaaacacatttaacaattgaaacgtgattagagcctgtttcgtgcatcctttcacaataatcatagttatgaaaaaagggatagtgcagtttttataaagtaattagtaatatcttcataatcgcagcgccctcacagaagtatgggagtttcttaatcagtatcttcaactttttggaaatttataaagttcttctgttaagccctgatcaatatatctacaaaaaatccttcaaattgtattggattaaaaccgtgtattgtagacattccctcagtaaatttaccttctaaaaggctaagtgccctaacttgtagagaaaaatgcacaaaaagacaacctaacttttttcctatactcttgctcctgcatcttccttcattgtcggcctctactacctaattgtgaattaaaactactcccaaaaagaggtccgaccacctaattttgaattaccgtggctttgaagccacgcatcactaagcgaatgaattacaacacaattaaaatgcagcattactatagcgccgcttctcagctagaggaagcgaacacttaaaggtgcagacattagcatactctaaatgagttttcgaggataatatagttttgatagttttgtatgaactccccaatgaaaacatcatattttcagaatattcttcgaataggaataaccaccttccaactcccgcttgcgggattgaccaagataactagacaaataaacgaaaccaccggggaatgtctaccaaatataatgcgtgttctagaagttgccacatattctgtccacacgagggaaaacgtcacatggttttatcctctaccctgactaggatattctccaattgatagtacgtgaattttgacatatattaggtggaatgtgtaacactatcaaatcccaagtacaggaagctatttgttgaatttcccagagtataggacttgtattgacaattttatttttgggatttctctatagtaccattatgaaaatgggaaaaagaaagaaacaagttgaaggttaatatctgatgaatttgtaggaca

SEQ ID NO: 10262 - DNA, 700 bp, Eucalyptus grandis
  Intron number 4 from transcript Egrandis_v1_0.011149m (loc us Egrandis_v1_0.008568m.g) derived from phytozome v7.0 (c hr-ID scaffold_4; pos 37062512 to 37063211)
ctgtcattgttccaaattcgttgttttctagccaggtgagtattcttctgaagaggtggattactagcagtgttatattttgcatgtagttgcctgaaatttgtagatcttactgtatccctgtcggaaggtcttcaccaatctcttggaatattataattactgttctttgcaggggtgcaatattaccctctatttagagctgcttccgcactagagtggggtgttacttacagagtttagtagattagttttaatattgctgatgttacgtgctcagatttgcaaaatacctgaatactcactagtcttgcttgagctaaaaattactgttatttgataatgattgagtggtttgactgttgataatcttcatttgtatgcttgactgtttactactttggaccttttgctggatgaggtagtcccctatgatattggatctcactggcaatacctcttgctggtcgtcccataaaaaaaaaaaaaggaaaaacaaataaaactgcaaggagttgtgaattttctggatctttaggattgctgtattcttttcaatcaaaattgggcaattttagttggatatgatgttgtttttatctgctttgttctgtggtaatagtaactgcaaattttagtcagaaaacctcattatcagttcacaaagtttgtaggtgattgtaaataagtcgcgtgctga

SEQ ID NO: 10263 - DNA, 7384 bp, Eucalyptus grandis
  Intron number 1 from transcript Egrandis_v1_0.020706m (loc us Egrandis_v1_0.020732m.g) derived from phytozome v7.0 (c hr-ID scaffold_7; pos 17464132 to 17471515)
cctgaagcaagtcgtgtcccgccattcccaccggagtatgttctaccgtcatcttttttatcattaatctaagtggaaagttctagtgtggagggttaagcttcttatactgctatctcttcaatagtttgtgagtttattaattccgtccaataattttcatctggatgatcgtcgccggatggaagacggtaaatacaggttatgtttgatcaaaacttgatggctaagggttgaaattctccttttcgttttgttttacatgggtagacactcaactcggttagattgaaaggcatactagctgtgtaattccttttgttttttttaagcttttgcttggaaacttgaataaggtcattatttcagtggtggtattgaagctatgaatatgagaagtccaagatatttgagtgttgtgacagaccattattattattatagcttcttattgcatattccttccatgtgcataagttattaacacttttgtagtttttcaatcctgtgacatcctgtttggaagtaagttgaagatataaatttgaatcaaacttggtcgcttcacccataagttgggaattatggttgaatcttgaaattgtgttatatcattagttgtctaggaagcctgtactaaactggccattcttttgatatcctgcccaggtatctccctctgcatatcttaagttaattttagacttggttcttgctagaagtgaaaatgaaaattgtgcatcatggttgcttgacatgctgtgttttgacactgctaaaaaccaattttatgtatgtaaaatcaagtagccggaaggtgttgactatgttctgatggcatccaaattcttcctcttcataatcctgcaatgtcacataggatacagctactcaagatcatttgtttatagcacgggttgtccaaaacttttggctggagtagtccatatggatgcatgcaaacagccatgtccatgtgcatgagggtacatagacttttattacatttacattggcatggatgagaactacttttgctggagcaattaagagagttgtgattatataaccatgggcaatatggtgttcctttgcacgattttaaggcaacggaataattgaagttaactattagtttggtcacaggactatccagaatcggagacataaaatgcacttaataaaagcagatggacacatatagcagaaacgtttcttgtttcttctctctctctctctctctctctctctctctctctctctctctctctcaatctgaatgccccaagcgccattcacacatttttctactggagcatctgaccaccatgccataatgaggatatttttcagtgcttttggaaattggtgtacgcaacagagaattctgtatttttcccctctcataagtaggtctttctgttagaggacaagctaggttgatttgtcatggaataaactctctccaaaagtaaggggtaaggataagtacatctaaccatccctagaacctacaacttcagagccttgtgcacggggacatcttaattttcctcttaaaataagtaggccttctgttgtgttggtccaattttttaacaggttaaccctttaatttttcccgcaggactacaatgaagatgggaagctcaaattctccgaattttctgacttgatgaatgcttttggaaatcaattggctgctgacaaggttagagtcagttgttgaactgcatcaatattggcaacttttttctccatgtttcatttgtaggactcataaacttaaattgttttctgtgtcagaattatgtttgggacgggaattgatgtaagggtacttattgtgcactagcatacatacatatgtacttgcatgcatatttgtctggttgcatatgtaaatgcatatacatgatgtgcacataaaagcaaaatgtgtgatgcagcacacaagcatgcatacatgaaagaaattgatggacatatgcagcgacaacaaaaaagttacttgttttagtctatgcaaccatccacgaggataacaaggctcacttccatcaagaaaaaataattatcctaagtttaaaacaagtaacagggaatattctacatcaatatatgtatataattttcatagatttgaggtgtttagtattaacagtcaaatcatgagctccacaagcaataaccattgtagacacgccctatagaatatctctcacattcttaatctaaaacccatttagaactgatcagaggctgcatattagtatttgatagcttggccaaatgtaatcagtgcttgtgcaaagatatctatgttggaaatctgcctactagatgaattcacacagaatgattgttctgtaactataagtaaggagaaaatatgggcctccatctttcaagattcttgctcttaatgttttttatgatcacttctgtttttgtaggtgggagaaatatcaacgtgaggaggaagcagctcttggtttaagaaagcgtgtcagaaaagttgtttcgtatagagaatcatatgtagcacatccaagtgaaatggccaacgaggtgttttatctgaattgctttctcttatgctgttaggggtggaaactttagaataagagaagcgtatgtcgattgttcatttgattaaaagtcacttttatttatttacttcttcctaataacttcagctttaagcactaactattgttttggacagtgcagttcaatatgatgcaaattttgggagaaattttaaaaggtaaactcactttcttggataataattttcataagaacttgagtgcaagacacccaaatttctagcacaaaggattcaatccataagaataattacatgaccagctcatttttgtcgcagcaacacattgtatctttggaaactcttatgctgaattcattatgtaatggcaaggttgttcatggtggtatgttgagcttgtagctggaggaagtaaagttcatgcttgctgcaaaaccaagagtcagaacaaaagtaggagtgacccatatataagtgggtatggcattttctactatgactgaaatatgcacattttacaatcttttgaagtcactaacttacgtttgtacaaatttttcgacagattattgtgagtattctgctgctagctcaacttgttctaaggataaatgggtatgactcattcttttagaattaaagttagttttccctttatctggcttctttatatgattggattttttctttgaaaaatttgtagaggccgcagaggataatatcattgtgcataatgttgataaagaatttcaatttagaattggcatgacatttgctaatgaggaagaagcatataagacatacaatgcatatgcaatttccaagggatttggagtgagaaaaggaaaaaaggctaacaatagtaaaggaatattacgaacatgcacatatctttgtaattgtgaaggacactctccattgatcccacctcatgaacaaagagatgtttataggactgtgaagagaactggatgtgaagcttgtataaaattcaaaattgaaaatgaagtatggatagtggacaagtttaaggatgttcataatcaccctttcatcgatgataaacagaaacacctcatacgatcataccggcacatgacgaatactaataaaagtattttgacttctatggctggagctggtataagggctacaaaatcatactcctatcttagtggtgaagcagggggacaggagaatattggctttattttacgtgattgtcaaaatttcttacaatcgaagagaaggaacttgattagtgcgggtgattgtcaaactctcattaaccattttaattgcttacaatcaaatggaagtaatttttcttatacatttcaactggatgaagaatagagattaaccaactttttctggtctgatggtgtatcgaagctagactatgaaagttttggagatgttgtgatatttgatacaacttatcgtacaaataagtacaatatgatatgtgctccttttgttggattgaatcatcattggaagaatctcttctttggttgtgcatttttatcggatgaaataattgcttctttcgtttgggcatttcaatcttttttaaaggcaatgggtaacaaagcacccaagactattttcaccgatcaagatcatgccatggcgaatgccattaagactgtttttccaaatactaatcaccgtttatgtgtatggcatattgggaaaaatgctacgcatcatattaggcatcttcttggaaagtcgggttttcgtgataaatattggcataaacttttatatcattgtgaatctgaattggaaatggagaatatttggaaagatatgtgtcaagaatggagcttaggggatcacaagtggttgaatagcatgtaccaattgcgtaataattggtgtcctgcgttttgccgagatactttttctgcaggaatcatatccacacaaagaagtgagagcacaaataatatcttccaagatatggcatgcaagactatgactttgtctgaatttgtcggtcattatgagaaacaagcagaaaaaatgcgcaattctgaagttgttgatgattttgagtgcgctcgagggaagccacagattgcaatcggaactagtggaattttgaaacatgctgcagatgtatacacacatgtcatttatagaaattttcaagatttcaagatgcgttcttgcatgttttatccgtgtttatttatagatctgaaactgatggaccattgcacacttatgtcgtggcaaatgaaaatagtgaaaagaggcatattgttcattttagtccgagtgatttaaccattacatgtagctgcaagttatttgaaatgcgaggatggttgtgtaggcatactttatgcattttggcaaatgttgtaaatcttaaaagtattcttgcacaatacattttgaagaggtggacaaaagcaacaaaacaaggggttcattgtgatgttggacaaagttctcatgctgcggtaaagtctaaaacattgcgcttgaagaggttgatgcaattatctttcagtgttatgaatattaatgcacatcatgatgttacggaggagcttgcgactacaaccttgctgcgtctttactctcatatcacaaacaaaatgcaatctttgacgggtaatgatcatattaatttattggcaagaaacaatgaatctgaagatgtagaaaacaatgaaattcaaatatttgatcctcttcaaagaagaccaaaaggtataccaaatactcgattgaagggtagtagtgaaaagcgaaagagaaaagtgtcttcatgcattggaggcacctcacataaggtatgatacttgtttagttttatagaatgatttcattaattaaaagcatgaagtttatgatactctcacttttgtgcaggattgaccttctgtgaccttcatcaaacaattttttggctaacttagactacacaatctttgttagtagttatctattattttttgttccaatatcgggatgaacagcgaagctactaaagctgctcaaaggtttctttgtatcttgtagcggcattttgatgtttgtctgtcagctgatgttgttgctctacttaaaaaaaaccaacagtttgctttcacatacatgttccattgcattttaggaggtgaaggatttgttggctaacatggagcaaggagcatcagaacctctgctagattcctttcttccagtcatgaaggcactaatttctgattctcttttgaaacattctgttgagggtataagagtttctgtaacatgttacctcactgagcttttgaggataaatgcacctcaagaaatgttcaatgatgaccagatgaaggtgcaacatctgttatcctaatttataatggctatgttgatgtggccaacactattcaaagctcctggtagtggggggaaagatgagcaattataacaatgctgtattagaggtataatcgtaatttttgtagtataatttgattatgttaattggtgcagtgctatatttttattatcttttcttcattagaaagcctttttttttcccttcaattaaaatactgaagtatatcagaaagtttctattgaacatttctgatgcaataatcaaacagtatcggaactgcttctgctgctattattattattattagtagtagtagtactagtaaaactgaaatagtttaaaaagctccgctgaatattgtggttacactaattagataatgttgacacgttttttcttactttttcctaattactacgtggtttaatcattgtgcccttttttaaaaaaatttatgtactcatgtattttcttaataattttcaggatgctggagtgcttgctgaaggattagttggacttggaataaaggcctggtggccatttgatgagatgtgagcactctagacattcactagcaatacttgatttctgtcttggttgagcatgttatttgtcaatcctcatctccttctttcacaaggaactgaaattaggaacgaacgcgaccagaacagtacacaaggaacgaacgcgaccaggatggcggacgttgtcgaaggcggggaatcttctcacgatgttcagtccctcctgtcttctccagacagggacttcctcgtccggaacaacggcgatcaggtgaaactcagttctcttctttcactcttgctctttcactggatgaggtgaaagaaaaagaattatgggtcagcgtccttgtccaagttctcgtggccttcgtcttcgtgtggggttgtttcgctgatcggttcttgaatttcgaactgggggagtctgtggtgacgaagccgtcggtttgtgatggctaaggtagcgaatttagttcaagagaagctagagttggtctgatctaggatcatcatttttcgagtgctgtccatttggttccttcagaaactggatgattggtagttgatgcattactttttagagaaagacatgttacttggagttggatcgggtgggagcagtgtatatggatccgatattgctagaagtaatgctctttagtgtaaatgctcacaccttcggtgtggtatacttgttttggtggagaagactgctgatttgctaactatttaatgagcagtgcgtaagggaagtgcttctgcagttggcatttggatgtgtatcttgagcattttcaggatttttgtgtggtggtcaagtgatctagtgtgccttgagcgctgattactgtatgaaagaactcaaattaggaatctttttgttctatatcaggttaaggtcgatagcttgaaggggaagaagattgg

SEQ ID NO: 10264 - DNA, 1908 bp, Eucalyptus grandis
  Intron number 6 from transcript Egrandis_v1_0.015089m (loc us Egrandis_v1_0.015089m.g) derived from phytozome v7.0 (c hr-ID scaffold_4; pos 4900380 to 4902287 reverse strand)
gcattctcctgtttggtcctccggggacggggaaggtctgattttttaacacatgaactttgtgcttcttttatttgcatacattgacgcatgttgagctgcttatggtttggtttttaatgtatgaaatctaaaatttgatttataagaggtttgctgggagtttggtggagcatgttcatgactctttaccaaaaattttagaaaattctgatgtgcagtgaagggagagataatataatagtctgtcagtcattcaatgttaaataggtggaaaacgtccaatttactatctgcatgattgatttcatcagaatcgaggaaaattgaatagtggagctacttagtgagataaggcttgggtattctgctactttttacatttgttctataattgtagtatttgatttggggaaaacccatatgggctttattaaagttcctctggaaacatcaggctgttttctggtagttatcgcattggtgaagctattttgtgggagctcatagttaaaatttccatgaaagatgtagataaagacttctatgtgtttcatattgtctcaaatgattaaaagtttaattggagtctcagcatggacactgtgctttgcatttgttttgccaattttatgttttgccctttaagacatctttggcaccttgatgacagtgtagatttagtaccaggtattcatactttactttgagcttctctttatttgtttgaaatgtcagaactacaaatttctttcatggaaaagcaattatttttctaatgagtgtattaatttcacaatgctttctcaaaaatgctgtcaaaacgttaaggacaatcagaaagctatgtacggtctgatatatttatagataaaagtttgctcgtctcctggataagacatgcgcatgcatgctgggtaagattagccgaccattcaacttggaccaaggctataccatccttgaaattgtggaagttatgattttattgatgaactatgctttttggcataaccatttggactactaaatctcctagatgaattcatacccaatcattgtgcagctatggatgtcagtgcaatgctgtacaacaacactattaccgtatgctgaacatgtagcacctaacagtcatgggaaatggttgacggagagaaagaaatgctacttctcctgctactctaggcacacatattcagttaaacttgccggtcaagacaaaattatagtcaaacacatgttgcagatctaaacatttgtagaaaaatacgtgttatctcctgataacaagttctgaacagttgaagaaaattatggaactcttgccaaatcctttcaatttttagatggcttagtgggaagatgcagtatctaaggctggtaacagtttgattgttgtcataattgttgttgtcagggtcatagttattgttatccaccacaatgacttaaatgaactttctgactcatctccagttagctgaaatttgctaaaccaccgtatctgcaaaatatcattcagacaaattgctgaataatgacatgttgagatctgtaatatagtcttttggatctttaagagatgggtcttctattttgcttcctttagaacaattctgctagtttctgagattgtttctcctgtgagatccatgtgttctttaagagggcatctactattgataggttaaatgacggggccatcatatgactgttgttcacctggatttagtgaattgatgcttgattttcagtatcatacttttttcgccttctaaaggccattctttcttgggcctggtttaaaaaggcctgctgattaatctctaaataatggcgtggttcttctgttgtttgtttactttttgatctgattgatgaattaactttcctctgttgcagact

SEQ ID NO: 10265 - DNA, 2296 bp, Eucalyptus grandis
  Intron number 1 from transcript Egrandis_v1_0.038161m (loc us Egrandis_v1_0.038161m.g) derived from phytozome v7.0 (c hr-ID scaffold_5; pos 827495 to 829790 reverse strand)
ggacagaaagccgtcaagaacagtgttcatcccaggtatatttttgcatgtttaaggttcatatgcatggaattcgcaaatgattcaccaataagtatacgtctttagttttagcaacatataagaatcctataattaaactggattattttggtaattgacgctcttgactaaatgagaagttctctctttgatcaattccctctgttctcccattatcaatgctctccgccgtgcgatagaacggtataatttagtttattgttagtgttggaaacaggaaaacgattgatccattaaaatgactgaagttagaacattgcgtgcgcacacatatttatacgtatgtatgtatctttgggtatgtgcgtgatttgatggaatgaagtcgaagaaacaagtttcaatgacttttagaatacgataaagtaaacaatcgagaaggaagtcgcttagggatttagttcattcttaggaagaggagactagaattcattatctcctcatttcatgcaaaatgattgatcatggacatgcatggccacaatttttgggtggtagatacttaagaagatgaaatattatatgatcaggatttggttgatgcccaagatggtgagcatccatgagttggaagaaaagagaggtccggcactgcttcaagagatcaccattggaaaatctttcgaacaatctagaggggatgaagattctctttccttagtgcctcgacaaatcttaatagaggatgcagggcgagtctgaagtttcttaattaacgttcttaataggaatcaacgcatgatttggtagattaaggcatcaactaggagtatacaatgggagagaggacctccatctttaaatgaggaaactaagataagcaaagtcatgacggcgagaagaaagagatttaaaatgaatctaattctgtggattaaactctttgacaaaatcgatggcaaaacaagaattcatgtttccaaaccccctagatattaaattatttttttaaaaataaattaacaacattttaaactttaaaatggcaacattaaggttaattaattgaggatgaaagataattcatgtcagaaaaaaattagggcaaagtaatagtcgacaatttacacatggatccaagtatatgtattaaatatttagccctgatattttcaactgcaaatgtgataaagttcatgcttgcctttatgaataaaccgcatattttgttcactttgatccttccatctttcaatgtatactcatttctactatatgtaaattaaacgagctactgacaaaaaaaaaactaaacctagctagagaaggatttcggactcaaacttttacctaaaatttcatgaatttcatgtcaattgtgaaggcacgtttttatcattcattttccacatattgaataaaatcgtaagttaaaaatagtggagataactagaaagtgattcctcatatttcttacactgtgtagtgattaatgtcaaattatcccaacttcagaaaagtttaattttttttctaaaataaaaaaaaatcgtccaatattatttgtttctttacttatttaaactttttttcattattttatcttcccatggaatgtctatgtgctcttttgctgtaaatgagtgaatatacctatattgtttcttcagcataacaaccatgtgaataaaactacaaatataataggaaaacaaagcttattgtgaaataaaggaaaaacggtggctatgaggatcatgttgtggcatttttcaggaaatttatagaacatagcataatttgtatcatttaatggacgtaaatataaacatataggcagctgttacaaacaaaaaaacctagtttcaaaaactattctcttcactgctctagcacgcgcaactctagagcgcttgcgcctaggtacatttcatataatcctatcttacttgtcttaattaggtccaaaaattgattgaacattgtcacaatcaatctcgagaagttttcatgtaagtatgacttatatctaaaatgagtatacacatgttgaacgatcgagtcttacctaaacgcttaagcaatgcacaatgtatgcacagccattatccatgataaagaagatatagatcattggtatgctaatctagctctttatatctctgtaaagaaagggattgcatgcatgcattgatatacactcttggcaatgtgatcttaactgaccaaactcttgcatcctaaacacattggatcggacgagaaggagctactatcggtgcacacatcacac

SEQ ID NO: 10266 - DNA, 3681 bp, Eucalyptus grandis
  Intron number 2 from transcript Egrandis_v1_0.018061m (loc us Egrandis_v1_0.018061m.g) derived from phytozome v7.0 (c hr-ID scaffold_66; pos 40521 to 44201 reverse strand)
gttgtgaaggcaatcagactgacaaactaaagctggtatattacttcgctttgggagagaacttctaattaggtgatattgagtttcttgtcctagaagttcctttccaagctatgcagtggagtagtacctcatcagtgaatgtttttgagtactaggtgatcgtggggctcaacgcaatttttggagtgaaatttaatggacaataataattgcatggcatttcattttttgaacacttgatcctttggtataacatacgttgctggttgtctaaatgaatttgtgccatgatgcctaagcatgcctattacttttcccaaaatgctaagtcaactaacagtttcatagctattttttagagccttcatttctagttcatgtaatcattgtattgtacttgatctttcttctatcttttcttttatccatgggactacatatccagtttgtcatgggtgatcttgaatttggtacaccgcatcttctttggtaaaaacaactgaagtttgttgacaataatatccagcttgatgattagtgtgttgtgtatgttagtgcttggatataatttaagaaatttagattttctgacttctctgtgtgcttaatttcttcttgtcttagcttccttttttttttggcattcgacattctgtcacacttttcaatagaatctggatttttctgttggcggaagttgacatgttacttttctggtagtttttgacaattaaggtcttttgatatttgctatgcaattggaaaatgagatgggcaagtccgtggtgatgcagttaaatagcataaaccaatgtgccatgtcaagtagctactaatattgatcttaagtgctgtgtttggtcctgattaaggatgattattcactttgttctttgcctctttccttcttaccagatactgccttataataaaataagggagttgatgtttactgaatgtattgtacctttgtctgatgaaattgaccttccttctctcgtttaaagcagattcgatgtccttgaaattgatgtatcaggaagtggatcttccatcttagtttgagttctactattgattgccaactttctgaatcagcatagaacttgcgtagagttcctcggaatgataatacttgttcgtgtatttaaaggatgctctaatcataaacttttggatcaatttggctacatttccagcaatagattttttttttattttttattttatctatagcaattgaaaatttaaggagctgtttgttatctaaggtttccaaagttaatgcttcatatgatatactatcattccggctctactttcccagtagcagaaaatacatctacctggtcaggtatccatggattatttaagttgcattgatggacatttggctctgtttttttcttcccccatctggatttagaatgtaaacgatactgggaatgaaaatgccgtttctgtattattcgaaataaacaagaaacatgaaaggtgtccaagtccttggattggcatactctatgaatgaacctcccacatgcatatcacgagtacaattgtgatctatgaactaaagcatgtcaaccaccgtggtttaaatttgcggataaggtgttttctctctgcaagatatgaactttctgttttcactcctacgacagcagctgatcccaattcatttatcagagaatagaaattaggaaaaaaaaattgtcggactcaatagatttaatatcattgtcttctcatgcattcatcagatagcaagttatatgtctcactgtattctatatgcccattatgggaggcacttataagttgccagctgactatgtatgaaaagtatttcctttgcactatcactggtctataagtcccacgtattggctttgctcctaaatatattcagcatattggttcctctttcatcatcgcatgcagatatggtatactccctgcaaattagcagatgattcaaattaatattctcacatgcttcttttctgaaatgctttaacaacgtctcctttgtcaaattcttaattgttctctaatgaagaataatgatttcgttgtggagtggtcactagaaaacattgttgtcagacttcaggccagcaaacttatataccactgagagactgccaaagagaacatttctatttatgtccttctgatcatcaattattttggagagtgtattattgtataaaatgggtctgaatagtatgtttatgacagtgataaagaacaagttttaaggtttaatttcgtgcatggtgcatccagtgccctagactcatgctctttctttttggctgaagtgattctagtaaataaacttgaattgtgtttcatccagcttttgtggaaatggctaaataattgagacatgattacagtgatctcaaaaacaaggtgtttgtgtagattctgtttcagaaacagttgttaaaacagtttgccacaccagcttgaatttctcgtttcagaaacaagcataaatgctcagtagattcgttgtacattttattttattttctatcgattaagttcttacaattaagtaccatgcctgtagcatttggagaattcacggaagtgtcaaaaaaggcattgaagctaaagcaaagtagtagttatggtacctcatgttatcggagtctctctttatgtgtctaatttagttatattgaaggttaactaggattcttgagacaaacaggaaaatcatctatttatgacatgggggatttctttcagtgagcgcttgatttcatttaaagtgatgagtaaggaagaatgcttttgctctctgttctatggttttggaagacattcattacttacactagaaaatagctacatctgttgaaatactttccttggttgctcacatgcgtgccattcttctacatctgggaaaatctgaaattggagcgaaatgggttgttattcttcttatttgtacaaaatagactaactgggtattggcacttgatcatggccctgccggccctgctcaatcctgagactaggccactagtgggctacgccattttagttgcatatggactttaccacattaaaatacccagctgtctcacctacttaaaaaagtttaatatctttatttcccaatatcatttgctcagtagtttctatttagctatgcattaaattaggttgattgttactttcaattcaaggtgatattttctttcttattcataagtctgttccatatatgctagatgagaagctgaattgccaaattaattaactgcttggtgatctgaatatgattaatcagaaagatttttctgttattttactatctgttcagtgatttagtcattggcatagtttatcctttcattgcatgtttggtattattaactttgttgaagaataagaacccttccaattgctcaagtcaattgcaatatgatggctatactgtccttttgaagtgatattctccaattatctgtacaaattgctgtgctttagccaatgcacggatggatttatacttttttgctcatttggactttgattttgtaatctgattggtcaatgtcatgctttctgacagatcacttggaagttcctctaatcttgcaataaatctggggagtggaataaccactgacggatgaaacattgtatatt

SEQ ID NO: 10267 - DNA, 3492 bp, Eucalyptus grandis
  Intron number 2 from transcript Egrandis_v1_0.033323m (loc us Egrandis_v1_0.033356m.g) derived from phytozome v7.0 (c hr-ID scaffold_11; pos 33760092 to 33763583)
tttctgaaagggaagaaaccgtgaaagaaaaggttaggactctattaatgcctctcttgcacttgtgtgtttgacattctcctatctttacagaggacgattttctccgcttgttttgcaattatatatcgtaagaatcttctttgtctcaatttcaggtagaaatgtgctaaagtgctttcttttcatacaattacttgtgctatttaagtggcaagcttcgctcgatgccaccacctgcttgacctccaacccacgagacctcctagcctgggtagttccctatatgccaccactttaactatgaaaaaagaaggattgcatatgtgataaagtcttggttatgggaacttcagttgaatataggtttacggaatgtttagaaatcctctaagacctacactggaataatcctgatgatgagtacaaggtagattctggatgatcagtttgacgtaccttcaaggagtgaaaaatagcacaattctttttctcaggaagagggtaaagcaaacatagaaaacctattaagcaaaattctgtcttttggctgttgaaataaccttcgttcccacatagtaatggtttggtaaggtataaactaaagcaaaccagggacaatcattccccattagtaatattcatgtctcaggaagcccattttgttttccagcgaaccaccaaatgcactgtgttttcttttgatgccatcaagtgagaagaagactgacgctgcgtttgcaagaatttataagccttgaacacctcaatttgggttctgttagtgactttcatattaaggattcatctgtctcattcctatcaaagcataatggaaccactcaacactattttgtcgcaattattgcatttttttgtgctaagaaataacgatctcagaagctgctcgttgccaccagtaatgaaacagcattctcaaagtgttagaagctctggcataactcaacctgtaaatttccttccctaacataagtcagtggttgatgcattgtctctcgatggtcatttctttattggcgtatatccatgcatccactggattttgtggtggatctctcattgatagctctggcacctagcagggtgatctggacataacatagttgctccattttcttggcccaaaattgaatactaacggtcattagtcttttcccttttttgttaggaatggatttgtgtttgcttggcttttgcttcctttttcttgttttatttttagggcaatgactttgatgaggagtgttataagtttttttttttttctgttcccactcccaacttgggcacatgcatgtgcgcacttgatgaaactcttggattggggtagatgaatgtatgatcctctgtttttttttggttgatccacaagtagcttcctgtgagttcgtggtgtattgtgctaacttccttccaattctctgtgtagtgaagtattgtgtctgtaattgcatgtcttgacacaaccatgtttgtcacttgccagtctgtatagattgtgtccaagacaaatgagaatgtcagctcaggttgtgcgcaagcttggtattccaaacatatcaaagctgagtgcacatgaggggttggttattcataattcattgccttaatgtgtggggtgtaaatgggctgttcaatttttttctgaactttgtattgaattgagctgaagttttcaagcagggattcagcacttgaaacccagaactaaactgaatgtcaaggacatagatagtgttagaaagtcctattcgagagtttaacttgttaggtggagagagattacatgaaaacaaggcccattgaaactctgtattcaacaaaagtgcggtaacactttagcgcatgcaaagtggaatatacagtttggaagaatcatgtggaaccgatggatgggaatcacagatgcgaaatagacatgggacatgaaggacaatgaatgtcgtgttagaaagctccaccaaaagcttaggtgcaggaagactacccagtgaaactctgttttcaagtgttttgagataatgctttaaatacaagaattgatcaaaccagtttagtcctttggtttgtgagttttgatcagtttctcccctcccctggcctttcccttcacattttcctttcagctactttgttctatgacaaacaaacccttcattgctgtctactggtaggagatagactcatatctttccaacttaaataatgcctttcaactagttttggggactgtttgtttctggaagctgtcttttgtagttagccaatcaacataatgtcatagagtggagattaaggatgactagcagccatgtgaagaggatgaaaaagaaggcaaagcccgaattggctaagcaaaggaaggactctacaaaggcaagtgctacaagaccctactatgacgatgaattaagagaactgagctaaggtagaaaagagaagaagaatgacagggtgtagaagatgatggccatgacagacgaggtgtgatgtgcggttgtgagttttgggtgttttcagcttcactggttatggtttatgtatcgtagaactgtgaagctaaggacatgggacctttttcttaataggttaatctgtgcagctctggcaaaagggtttatcaaactgatattctacaatttaaataggcccagaaactaatcaggctggggggaaaccgactttttggggtcagtgcagactgttcagtttgggcttttgtgtttttcgggcattttgaatcccctatgattgtgactccaggtatcatcttttgatattctctttagaaaacttgggagtgtgcttgctatccattctgttctcttcctttcatgcttttaaatagcaagagctgggcgtcattagctttctcttttcagcaaaagcaaggtttgattagttgaaccgtcatggaatggttaatgttatagagagagtacaaatttcttatgaacctttggtccatagtaacagagtttattttgagaaccatagcctacgttaaatagtgctgttgctgctttatatgaagaaatgatgatgtgtacctgaccttgtagcttcacctgaattactaaatttagaaccactacacttggtactgggatggcattgtatatgatttaatggacgacattatttgctctctggtcttttcatccaatatagccttggtgctatagattgtgtgatttattagaggaaatactgaccccatgaaactctttactttataatttcatgttgatttgttcttatgttgtactgtatcaatcaattattccatttggcaatcgcttttgtcttggttgacttgtagtgtgattgaagtatacagtcgatctcctctcgaaacggtgtacgcttagctgtggaaatgggacattaaaatctaatgttagttgacttgacctttgcttgaactttgtgacagattatcctctctcaagagaaaaatattcacaaact

SEQ ID NO: 10268 - DNA, 1100 bp, Eucalyptus grandis
  Intron number 17 from transcript Egrandis_v1_0.000178m (lo cus Egrandis_v1_0.000178m.g) derived from phytozome v7.0 ( chr-ID scaffold_1; pos 39642445 to 39643544 reverse strand )
aaggctttgcatgtaagatgatgtttgagtgtatacacccttctaatcattcaaatctttaaaacttttgaaagttgagttttaaattgaggttcatttttttttaatggaccacatcttcagctgtttatatttctcttcaacctagttaagtttaaaatttattgcttattctatgcacataaatttgcttttttctctggtttaaagacttatttattctgtgataacaagtgagacttgagaaatgactgacagcctttggcttatcagaggtcttgtgtaagggaagaacagctttcatattccaataaaaagtcacgtgcctcaattcttctatcttctttcttattattggtagtgccatgtgaaggtagatggagttaattactgggaagtacatgtccctgcaatacgcatataagttttggttacacattggtagtcaatttaagttcatgcattttcaaatttgtaatgatggttcgttccttgaaagaacatgtgcaatgacataaacagattcatatagctaaccctaatttgtgggttaaggcttagttagttgttctaatcgatttgtatcctcatcatgcactggtaggtttgtaactgtcttgtaccacacattaataactatcggtgtggatcatatgttattgatggattgttaagatgaagaacattggttttaattgattttttttgctttcaactcttgatcaggttgatggtgtaagatgttcatgtgcatgcttgaagaaaactggactttaatagttctttgatcggaatttctcatcttcatgcgaacaaactaatgaggggatttcttgaatagtgatgctaatccttaatagttcgctaaaccattataccaaataaaataagggcattgactggaatagccataatgcaagacaagctatggagttgttattctgcaactctttaggccctattctattttcaaaactagtacgatgcttctttaaccaaatatatagttaaggaatcaaaaccatccccttatgtgctgatgaacttgctttgggtcccatgcagtttgaacagacttttgctgaagatcctgcagttgt

SEQ ID NO: 10269 - DNA, 7039 bp, Eucalyptus grandis
  Intron number 1 from transcript Egrandis_v1_0.015459m (loc us Egrandis_v1_0.015459m.g) derived from phytozome v7.0 (c hr-ID scaffold_7; pos 7024075 to 7031113 reverse strand)
tctcgagatcttcgaaaatcctctgaccttcatcggtacgcctttctcactcttctttgcaagaactttgatttctttgtgtctgttttcttgtttcttttagtgatttcttggtgggaatctgtctctgtattccttcaattcgtttgcaagagcagctttggcgatcctattgggttggttgggtttattacgggttgcctctctgtcctgttattaacagctgctttttgtttgttcactgggttctgaattttcattcttgagcttgtgggtgcccataaaggtttggagctttctttttgtttgttcactgggttctgaattttcattcttgaacttgtgggtgccccataaaggtttgaagcttttctttttgttcttaatcaacttggtacggtctctgattctgcatattcgagtcaattatgggattaatcttctatgtggatgataaaggatggggcagtaaattcataagtatggttatcgaggaataaagggccgtgtattaatattgaagagcctccgagtgcttttttgtcaagatggtgcttaacgcacatttgaatagtgggcatagcagtgagagttttcgatgcattgcaacttttaggcaagatgggagaaagaggaagaaaaggaagaatgtgaggaattgagtgagatcaaggaggaggggaatgagggacgaaacacagacaaaattggaaagcttcgtgtattcttatacatggaaaatcttacctactgaagatagatttattcttcgattatgacaattatcttttggctagacaatcacaactatctgaacgcatagattaataatagtaaagttctaatttgcttgtcaagtcctttcttaagttcctatatgacctatgacctatgatgtttgacgacttgcggttcggtattccttgcttggtcttcctcaagcttcttcttaagcttcactgggcttgccctctcttcaacttcccatctaatgcttccattttttcaatacacatgagctcttcagatcttggtttgtgagattagttcccgttcagtgcgaaaacccatcagcgcttgatccagccaattcacttttgtaataaaacatacaggtctttccagatttgtgatgtattatgtcacagttgtgagatcccataatgtaactatagcattgtttatgctgtaaaggtcgttataagtttgtaacaagccaaaagtaatagaagactgacgttgaagctgcatagagtatgagttggacatgtgcagtgctaggaacaaataaaatggtttgggtaggaggtctctgacttagccaaagttattaggatttaggattgaagaaggtgtctataagttgacatcctaaaaatttggcagcaaggcaaaatcttggaatgtcatatggaatctactagttatgaacgttgtgtgtcattaaattaaaaaatagtgtgaatttaaagtttgtgccatctttattctggatgtaccaggaaaatcaacttttttaatacctaaatatgaggacatactgaatatgacgatatacttatttcaaggtcaaagtatgaaaaagttggatcgatgggacccgaaggatcgtattgatcctatgattttttggagcttaggatcaggaccatgtaaaaatcattgcaaattaagatcctacttaagatccagggcatttcttaagtttcgaatcgcaggatcctacttatgcaattccatcttcttcatctgggaagatatggcttggttttgttttgcatgcgttatggctagtattgaaatagttctattgattggtcatgtcatttatagcccaggtcgtgcatacaattgattccatacatgatgtcatattgtgcagtttttttgttggctaggatggtgggaatggcatagggtgcaactttagttgtcctagtagagcttggttgttacttttgtagaggaatagtcaggaggactccagcgccttgaagatgtttttcgtggatctcgaacttatttctactcataggcctaaattagtcaagatttttttatatagttctttggctgctggttgtgaggaaaaatggggaaggccccattgcaattttttattgaaaaatggcttctagtgcactagcagtgatgaggactggttgtgtgcttgatcttggcatgtaatgatgtggttttcttttcttgtagggtgcaatactgtagttgtcccagtagagcttggtagttatttttgtagaggagtagttaggaggactccagcatcatgaagatgaatttcgtggatctcaaactaatttctactctaaggcctaaattagtcaagatcgtgttatagagttctttggctacaggttgtgaggaaaaatggggaaggcctggtgcaatttttttatcgaaaattggcttctagcgcactagcagtgattgggaacggtagtgtgcttgatgcttggcatgtaatgacatgtggctttgctttgcttggactggcattgacatgaaaattgtgcacattgcctgatgagcttgggtagaggggcattcatactcaatcaggaacacaaagttcccttaagctgtttggagattaaaattctgcctaataatcatcctctgatgtttccctcttgaactttctgttccagatgctataaccttcttgtggtttgtcaggactagaggacctatggaaggatcatgtgggcgtttgcatccacaatgtgtagtataatagtgggtgatagttagctttgtatatatgctgattgtagatgattgtttggatgatgttggagctgttatactcaatgtgaaggatgttcgtctttgagaagctgtccttgattctttaaaataaaatcatcagcttctagtttagaacaatctatgctttctactttgggttagtctgtcaaagtttggtggaggatcaagtttcacagaaacagcaggagaagaaggaaacaattattaaagtggatcctaagggggcaacttgatggatttctaactgctggtgactgaatagctagcaagatcagaagtgatcattctggtgcttcagaaactgaattcaatttatgaagtgcttgggctctcatttggtagctgaaaatagcttgtgatttttgaggatataaatccaggaggggcttctagtaaagttgtttaaacccttgtaggaagtgtcggtagtctgcaaggcttcaattattgttgacattcatattttacgcaaaggtctttcttacatgtagaaaaggaaaagaaaacacaagtaaacgagaaaattggattttttgctatgcattggattcttgcatgtcatgtttaagtattggtaggattattgagcgtttgagcatacaattgactacagggatattttagtcatttcatctaacgcatgaggcattagtagtgctttttagacttaatcttgagtactgcatttgagtgatttgcataaccatccggggtttgggacatatttggcaatttctgggcagaagagggaatgggtggagagacaaagcgtggtcactcggtattctattagttattttatttctcttaattaatctgttgctctttagcaagtcatttttattctgaaaaattgtgaattcaggtctatagacacatttccctcaaacaagataatttaaattgcagataaatttagggaaaaaaaattgaaaagaaataccttttgtccacgaccaacatggatgtggtgcatgacttggttcattggaccaacccgtagtgcgttttccacgtatgcttaagtcatggttcattttgtctatagattatcatttttatgggatatttagtgtctgtttttattttagattcttagtaactgttagggttgtctatatatatctagcactctctataactgggaattggacattcacccctctaagcattttttacatggcggcatcccacctttttttcatggtggcatccatgaactagtaccaattctcgttcaccaaattcacaaaaggcacacccacgtccaagcaatttgtcagaccagcatcacccattttccaatttttttaccctttatcatcccatgcaccttcaattatagtccattaacatcttgtgaaaatcactacgcctgtttgcttttctatgccacatcacatctttgggattcatcattgagctgttgctagcatctgggaagtcacaattcatcatttcactgcatcaggtcgtgtcgagttgttgttgctgtagtgacagagttgcttctgctgtgatggagttgctgctgctgttttgagtgcgtctgctttagccttgtagctgtgatgagccattgtgctgttgcccggattatcaagcctgcattactgctgctaaatcagcctgagaatcgcctttacaatgctctcattgactcactctagcccagctgtggtctgttattacaatttagagtgtgcagctttgtcctatcaaaggtatatatgctggtctactattgggaagtttttgattttagcttcaattaggtgaagtaagtcccttgaatgtcaattttggtttaagcaaataacttagatgcatacttagaggctccagagtagatccatgcgtatcatgaaattgctctcaaggatggatgttgtgaattgttgaagatgttggaacattgggtttgcttattcatttagacgtatttcatggcacagttttagttaggttcatacattcacgtcatattttttttaaactataaaatcatttgtggcactagtaaaattccttctttacacatttagattcttatgctttattataattatccattaatgtctgtcttagtgtgcatttgagacatttaggttgcatattagtttccatgtctcatttacatgtcatgaaaatcgaatataaaaatcatgtctttcatgttagtcattttagattgcatttgcataaaaattcattcaggattgcacttgcattcagggtaaattgcatttttgcatcataatttgattttttttcctaatgcacggtacactgtggaaaaaatattttgcacaagtcataaaaatttaaaaattaagcattcttcccttaccaagattacacataccatattttagattacattacattagattttatttctattgttacctcatcatagtcaagtaatttatctaggatttattctggcatagcatgttaaatttacatattttctttccctttgatgctttagtctactttagggtagatacaataaaaattttgaacttcccatttacgctcgaggagatcatgtcctgggatgtaataatgaggttacgttcaattgttgctcaatgcggcttgggttggtttatttctttttatcttgttttataattgcccaagatggtttaggttgcaattttactactttttgtcatatgccattattaattggttgctatgttttcttgattgcatattgcatttaattgcatgatctcgtagctgcatattaggaaataaaatgatcgtatgaagagtttcctttaaaagagaaaaggtaccaattattcggcgttagtgtaatcgagtataaccaagtccttgaattcaattctctggttcgcagaggtagagtgatctctcgcgctttactgggctcctggtgattctaaggtaataataaattaataagaaaaaccaagttgcaattggtaggacttgagagagtttgtgcgaagcgtaagagctgcctcgcaagaggattatttgtgtccatctagcaatccgttagttctcatggggttcaccttgagagggttgcgacaattatgaaaagactttttgaaagttaagtgagtaagtgagattattctgagttttgcaggcaaatatctttgtggttacgagttgatgctgagaattctggtatgggacaaacggttcctttttgcagcatgtgtttagttctgagggtagtttgggattgatcccttctcctcatgcctttcagtggtaccatttgtacattctactttagtcgtttattggtagagtggattgctgttttgggttcagctgattgtattctattagtcttcttgttatttcagatggtttgggttcttgtgttgggaatgtttcattaatcaggtacagcaataacgctgatgcttaccggataaatgcttgtaatttatcaagaaggggtgcatagcatcatatacaagagattacaatagagtggtttcatgctgatatcaaaactaattatttgatacttgacattgttaatagctctaatcagagagaaaagtttatttctttctccttttatttattttgatgtatatttgtagactattaaacatggatccgaagcccatgtttcctgtatccacaggaatttcctttcctaatttctgtaagatgtttaatgctgttgaaatttatacttgatgttgaatacagttctcacctgcgtttacctaggacatgtagaatttgtttgggatattcttttgagaaactctggcatctaattagccacttgattcatggttcacagaaattaaaattgtatttgagacttgctcatcaacttaacaataatatcggtaggttattcattttcggtttgggtcatttggaggattcattgatctggtcctacattcttacaatcagtaaatattaagctaggcatgtcatctgcaattgtgcagccattgttatcttgaacgttgtaagtcttgcttgagtggtttgtttttctgtttttctttcagtggttccttcaatttatagttgtcactttgaagatgagtttgaatttagtggcaagattcctagcattgtcattgttacttttatttgtattgattgacttattgctggtttttaaaagtaggggcctaaagcattgtgttgtaagtactttaatctgtttattgatgtgttaaattgtcctttcacaggcatccttgacattaccggatttgtt

SEQ ID NO: 10270 - DNA, 1700 bp, Eucalyptus grandis
  Intron number 1 from transcript Egrandis_v1_0.003625m (loc us Egrandis_v1_0.002663m.g) derived from phytozome v7.0 (c hr-ID scaffold_3; pos 3648934 to 3650633)
agatcgaggaatcgactctcccttgacgagctcaggtttgcaatgcgatacgcgtcaatttccgtcttatatatacatacatggatatgtatgtgtgtacgtatgtgtttcgtttgtcaagtttatagcggttgcaaggctaacgtaactttgctggcgatcgtcactttttgatgttccatgagacggttctcttacttggcgcgcgaatgtgatggtcgcagcaaaagctaattacttgtgatttcgcccgttatgtggttctcttatttatattctttacttccccagtttgcagtcgagcatgatgaaaataatactaggaaagttagccttctttcggtaggaatgtggatatcttgtcgttggttggtcaggcctcttttggttctcttgaccaattttgacaggcgtggatgtcttgatgacatgatactgtagaaagagtgtgcgtgttagtctttcatatcttaaataagataccgtggtggactgaggagtgccttcaagagagtctcctgtaatggtgatttaatgtccgaaaaagttcatataaagcttaccttaattaaaggagcatcatcggccctaatgtacactgattcaacagtagcggaccggacgtctaggggtcaatttgacattgactagatagatctatagtaacattctcattattgccactcacggtgtgtcaacgggatttggagaattagaggaagagaatcaatggtttctgctgcaggaggtttgtattaatccatccgctaattccatgttaatgggcttaaggtgcagcaagtgcaacagctaagatgttttgatggattccgaatgaaacttgacacaaaattaaggtgccaacatcaaagtgcagtataaaccaacattgctgtggcacacctgcatgaccaggcactatctctgatcgaaggagaagccattctgccatactttgcaaagtccatgttacgtttctctcaaatggctcttcaaaggacctcgatgcatggttacacgatgcacagagaaaattgcatatctatgtctagtgtgtagatagattgaatcattgtagttgaggttagtcaaattgagcatgttcaaggtataattgaaacttgattctatctaaagcttggtgctttgcaatttaagatataattttagatgaaattcattcccaaatagtactcatatggctgagatgctcaagctcgagatggtgagccttagaagttcaaaaggttgtacttttgaaaaaattctgatgaacaactctgggtttcagcagttttaaaaaattccgtcaaacaactcttgatttcagcagttttatcaatagatatccgctatgttctctatatatgttggtatttggtgggcttcttttcaaagtctgtcgttctgaaaatagggtagaaaaacaaacaaatctttgaatgaacagaatccacgattagggtaactgtggtagccgtagtctttttgggcacaatcctaagtagaaataggaacaagtaagctgcaggaattttcagcaatagaggtcttggagcattaatgtgtacatacacgtgacgcatacatctttgaagagaattaagtttgcattgattggagcaacgttgtttatgagggccaaccttttcttatctgttgcagatatttgactgatcaactctttaaaatccaagttg

SEQ ID NO: 10271 - DNA, 7979 bp, Eucalyptus grandis
  Intron number 2 from transcript Egrandis_v1_0.036604m (loc us Egrandis_v1_0.036525m.g) derived from phytozome v7.0 (c hr-ID scaffold_5; pos 72682358 to 72690336 reverse strand)
aaccaaggctcttcagaccatcaccgaagcaggtaacgaccctctacttcccatgaacttggttttatgcttaggttaatcggcctcattcggtgatgttttcatcgcgtctgatcttgaatcatcacttctgctcaacctcaattcctccaaaacgaattaataattttcacttcgactgttgccgctgttttaaattacacaatcaatttccctgacaagctatgctgtcaacatatgcaggtgtaaactcagcggcctttgaaggagaagacaaggtggtggtagttgggggagttgacgcagtgcctctggtcaaccgtttaagaaagaaagtcggtccaactcagattattagcctcggagaagggaagtaacacccatgaaatgaaaatactcacatgaagaaaatgacatgactcagatttttcttttatgttcttttcgagaaatattgtcgagtttcattaggaggctgctgaaatttttttgtattacttttcttggctctttttacaattatgattcgacataaataacaatatcaaagatgttaatatatttagtgagatattacatataaagtcattttttttatatgcctatgtgtcttattcctaatttttgttggtaaatagatcgagaatctacatatgatcctggaagcgaatcaatcaaagtaaatacttcgttttttatcttccttcttctagtcttattaatatgtttgctactaaactttttacatattcattcgatgagagggagggggagagacatggtcatgtaaaaggtcaacaagtcttaagatttctggtcaaaaagccgactagaattgtccttaccaacggattgaatgggaaaactttttgcgagggtcttggtcctcttttaataataaaaataaggtcttcgttccttctataaacagagaattcacctaatttctaggtgggtcaaatcagtacgaagacctgctatcaactaaaaggtggtaaaggacaagtgcactgacgtttgggccgcggtttcatacttcaattaggcgactcaaaatttctattaatcagatcaaccttgaatatctacgactcaaaatttctattaatcagatcaaccttgaatatctacgacttttttcaagaatataccgattaaagtcattttcaattggcaataattgcacaaggatgaccaaatattgttccaagtccccaaccccatgaaatgttacatctacgaaccaaatcgaaatagccttcttggtaaaagaatcgagttgagctataaacattatttggtaactcccaaatctagcattccaacgtccaagacgtatgttgagtggtctagcatttaatgtggatccgctgatcatttgttcaaatcatgtggagcggctttcaacttagaataagtgacatgtcaactgtttatagagggcctccttgaatgctccttatacctattacttataaccatgcgacttgcgagatgcacgggttagatttagcaatatttccatgtaatataacccagttagaaccaaattttactttgaccttctatgtaaatataagtgttaaaattaaataatgcaaataagaagtaacatgaatgaatatactaagtatattacaatcaaccacatatcacataatatatgtacatatatatacacacacatgctcatgtgcgacgttcactactaagggaaaatggggtacagacaccgcaagtaccaaaagttccataaggtacatgttagtgtcaaaattggaaaaaattgggacacttaggctctgttagtttcgcagaaaataatttctggaaaaacgttttccagattttccgggttcgtttcacagaaaatgaattccttaggaaccattaaaagaaaaaagtcttctaaagtaggggaaaatattttccacttttaaaaagtgaaaaacagttttctcacttgatttttcttatcttacacctctacaaatcctcacttcctcctcacgtttcttcttcttcttttctttttttatttgaattattttttaatttaatttttcttttttaattcaaattatttttaatttcttttttttgtttcccatcttgctagtcgtcggaccaggtgaacctcaagctcatcgatcttaaactcgcacttgtcgatctggcaagcctcaagcttgacattcgcactcgccaatctggtgaacggaaaatattttccttaccgaacaccggaaaatattttttgaaacattttcaggttttagttgaacaccggaaaatattgtcttctgggaaaatactttccggaaatggtccattttctgtgaaacgaacggacccttaagtgctaatggcaagaaattctggccaaatggctaacgtggctttttccggtgactttttctactgacgtggcaatttctttttagaaaaattgtccacgtggcgctataattccccaaaattaatttttaatataaatattaataaaataaataaataaaactaaattattagaaaaaagaaagagggagggagggggggatagcgggttcggcgaaggcctcaacagccctagccgaacttgctgttcccccctttttgtcttttataaaaatttagtttatttatttatttataattaatattaaattaacaaatttatggacaaaatgtgtcgttttggacgttcattattaagtaagcattctgacgagccatgtagaccactttaaattattaaaataagccacgtcgaatttctagctaccctcgctaacgttgatacttaagtgtatacctgtatcaagttttggcacttgcaatctactttctccaagagaaaattaatggattactaagcgtgatgctcagcacaggctcttccaagccttatcaatcgtaacttgatagtttatcttattttttggagctaccactaattggttatggttgattagacactaaagtaaaatgcgaatgaagcagagattcatcggatttgagaatttaattatgctagattaatctaacatttttttggtatcttttctcaatgttttgcatgtagtctttaccaataaattttaagccactaacttgtgaagggtgatcatatgggtatgcaatcaagaaagggtaggaggacctcggttgtgaggttgattggccgatcatgcaggttgcataggttgtagccgataacaattagatgcaagataaccatgccaacactagtgtttgcaaaatgggttgtgcaaggaggaagaacttgaagtagcaagtattgcatttgttggtgtggagatggacagaatagtacatggttctttcaaggtagccaatcaagcctcctcactcaataattccaatacaactgtctcaatacaggaaaaaaaatatccctatgtagaagggaggccctcataggttcaaactcatcattcagggtcatcaaaaattgcatgacatgcatgccatcacaattttcaaaaaaattgtgagcatcactagcccccttgaagcgaggtccagacaaggttaactaatttcaaatagcacgcataaaggatagaaaatcattactagactggcttgccttttgatgcatgtgatataaattccctaacagctgatatttgtgggcaatatttgaattggaatgacgactgacgataagattccaagcttcctttgttgtattaaaaagacaaatctagatttagatagatgggatcgaagtgttttgaaattatatgagaacatgatgacttttactatcccattcttccaaacgatccacaaatttagcctcggtttccttagaaattttagttagcacacaaatatctcgggtgacataactccaaagtcagcgtcctttcaagaagcttaatattcttgagcccataaaacataattaaaaccatttaaaataatctgaatgggtgttgagacgtccaattatatgtaataggcactttaccaatataaaaaccagcagaattgaatacgtcggagagtaggtatggacaaaacaagcccaaaaacaaatttaggatgtcaaaataccttgagaactggttggaaaacaccaaaaccaagcagaaaacgatcgaaccgattagaaatgtgacgaaacttgtctggtcgatcttatatgaaccggtcaacggtaaaaaaattagagatgacttggtactaatgtagtggatgacgttagtattgcgaagggccgttggtgcttgcaagcgagtgtctcagtcaaggcgcgtgagatggcgaggtgtggaggtgtgtacagccgtggttggcgaaaaaagttcataagctgcctcaatgaggggcggttaatcgtgggttggtgtttgttttttgaaataggtggcagaaggcatccaaatcaccaccgaacagaggcgacctccctaagtttaagacccggcagcgcgtgtggtggcattggtcgtccgttggcgacaaaatttcaggacttgtctcatttaagggcggcggaagtatgccaaataatagcaactaaaggccttggcctttgcaaagaataaggagagaggaagccggtgtgactggtatagtggcagccatcatgtaatagactcaatgaatgctttttaaataataatggctctgatatcaagttgagatttgtaatttgggatgaacgagaggaaagcatagtatattcacattacaaaatgaagactacaagcattcccttatatagagggtgagaaggcaattaagttcaattataattaatgttaaattacaattaacctaatctcattatatataagtctaacatctcttttcttttcatcttttttttttttaacttgagtgcggggggaagttggagtatctcctccatgtacaagaatgagataacaacatggaaaaacagctcacccttgattttagtgaaccaggccacattaaatgccgttgacttgcagttagttccggtcgttcattgtttaaagtttgattggtttctttcttttgtcaaaaaagtttgattggtttatgagtgaaaagagatgatccattttctgagtaacgaagtttttaagcttattatcagcctgaaggtttaattaataatataagctcactgttaagtgatctggagtcccactagtcacaggtatgttgcccctcgatcattcattatgtcccaacgttttggttggttcctttgtagcataagtttgatcacgccatggtgtaggatcacaactctagtcgtactagcacaatggcatcacaataacgataaactctttaagatgtagcactgatattttatgatgaatgtggaactccaatgacaatgtttgaggatgtcatgttgatgcctgaattttttttcgacaatttaggtaatctttatgtgaaaataataaaaaacatatctaataaaacatacataaataaataaatgataggaggcttacttgggtcttagtctagtttgcatagcctacaaaagctatccgatgatcattcgcggcccaaatccatcaaaatcagaaatggtctaattgatataaaaagaactcatcacgtaaacaagtctaggaaccaggctatcatccggattttgtgtcaataagactccatttatttcattaaagaaatagaaggatatgattcagaaaatatatttcttaaagtggtcgcttgtatcgcttgaattaattagctaatagaaaatattttactatcaataataatttatgtatccaaatttttgttattaatgttttttttcattcatttttataaataatacaagcaatcaatttaagtaaaatacttttaaaattatttatttttcatgaaagaaacgaaggtcagagcccgactaatgccccacgaagtaagaaagcagaggcctctctctcttttccccctgtcgcggatcactgaagtcgaaagagatgtcacagccgaaagccaaaaaaaacacagaatcgcgagattcgtttggagcttcttctatgcggacgccgatctcctgtgacgctggcactttttctccctactttgggactttttgtaccaaagcaatggcttgatctcccgtcgtacacggtacgcctatataacatgttcaacatgaacgactgactttagctgtctttctttattgagaaaaatagtaaagccaaaacgcatctcatcattttgcaatatttttttgtaagtttgtttggtgtacctactattattattgacgaaagttcatagaagtcaataaatttttcatatacattgtgccctaaatataacgcctacattgtcatcgttttggaatttatgttaaggatttgctaaaacgttttccaagagcaattgttaataagtgtcctggagactcctgcgaacaagatttgttaacagtttccatacacaattctttttagtgtcgtgtgcaatcaatgcttaggaaatcataatgtttccattaagtatgcttaatgactgttcagggcacccattaatcggacctaaatatgtatactaaaaccaactaaagctttttctcatgtttataaggtttgtaaaggtcaaattagtgccttcattttaggagaagttcatgaaggcttttcattggctcaaagcgaaaccaacatgctcgcttgctgcatggataattagagatattgaaaattagcagagcactataaattaacatgtcgagagaaaagtcaacttgtacaagcaatctttctatagttttatatcatactacaatttttcccgatggaaaattggaaatatatattttaaaaacatatatatctcaacattaatcatgcgtaagctaagccttgcatgtagaaaacaatatgtacacacgcacgcgcgcgtgcgcgcgcacacacacatatatatataaacgctatcaaattgaacaaatgatgatatagaagaaacacattagattaagcaaagaataacaaaaagagtaagcaacataaaggacaactattgggcactcattttcctctatggtattagagtacaattttcaagagtggtttgactttcttattgtacatccaatcgatcgtcacatatcaaatttttcgttttgatggaactggaccccagataaatagtatgcacccataacctaagtaggcggccggatcacaatttcaatgcaaaatggcggaatttgcgaggaaccatcgtaacatttctgacgtcaattcaccggaagcttctcttaaaatgcttttctttgttcttttttttttttttgggccttccaacgtcaatgctgccttgcccgagaaggcttaaaaaaacgcgtcgcaaacgtgtgtccgtacaagccaagtgctataaagccgttcatcgccaccctcgtcttcccgcagcttccaatcagtattcgctcatttctctagggcttacgcgcgccggctcgtgcgtaacattcagcttccattgatttgatcagagcatacctaaaaaaacatgacggtttgtgaattctgcttctgtgattatgtttgggtgtccagatctcttgtttctcctctttcatctctttgagttagctggtttcgcgtgtcgacgttgtctgtgcactgatccgcagaagaagatcgtgttgaaggttcagatgaagtgccagaaatgcagaaccaaggctcttcagaccatcaccgaagctgatggtaacgaccctctacttcccatgaacttggttttatgcttaggttaatcggcctcagtcgatgatgttttcatcgcgtctgatcttgaatcatcacttctgctcaacctcagttcctccaaaacgaattaataattttcacttcgactgttgccgctgttttaaattacacaatcaatttccctgacaagcaatgctgtcaacatatgcaggtgtaaactcagcggcctttgaaggagaagacaag

SEQ ID NO: 10272 - DNA, 1927 bp, Eucalyptus grandis
  Intron number 18 from transcript Egrandis_v1_0.001851m (lo cus Egrandis_v1_0.001851m.g) derived from phytozome v7.0 ( chr-ID scaffold_7; pos 24998052 to 24999978)
aaaagtcaaggtactcaagttttttttcttcccatatccatggcttcccgtagtcatttacaagagtaggcactttatttaaattagcaaagtagaatgcaatgtggaggtttgcaccatttgactgttttgaaatttaaattcaaaagagtttggggtttattttcagtcatctacctgtcactgatttattgtgttgaatccaaaaacattttccgcttggcttcttcatcatggttttgattgcataggcgggacatgctggaaaaaaaataaaacttcaaaattctgtagagcttactctcgtctatatttgcagtttaattcaaactatgctggccttaattttatgagattcaattagtgcagtaaagctagtcacctaattctatcaaggtgttcatctctctctagccatgcaaatatgcaaatacaatacactattaagtttttaatcatgctagcagctagtagccctcacctgttgggctcagaacaattgacacaattcgctaactccactcttggcatgttagcgtaagaagtgtgagggtgggaatcaactttggtcagcttcacttttgattcaatcttctagacaaatgatccatctcataatacctgatccactccgagattgtcatactggtacctccggctaaagtcgaaccctgtcctgctttcaaacagcatctgcttcagtaggcagtgacatagtttatgcactgatgaaaccagtgcaatgtccattttattgagaacagagctaatttagattgcttatgtggaaagctcgaaatatcttataaagaagagcaacttcgagaaggtaggtcttgaagttggaaatatgttataatgttgaactaatttagattgcttaagtttctggagattttgtttttctcggctactgctgtgataggaacttagtgcaacttgggttttattgcataactgagatatggctgatgaaggtaaaatgtcaaagttgaaaatggttaagtacatttttgtattttatttagaacatcctgccttgaaactcatgagatcatattattgggagatgcaaccttacaggatagaatgtcacttaatttgtcaagatgttcatctgtttctatccatgcaaatgcagtactaagtttctaatcaagccagtagctagtagcctttagcaatccccttgttcagaacaattaacataatccattgagttctctcaacttccttgctgttggtttaagaagtgtgaggatgggcatcacttgctctggacaactttagcagcttcactgcttattcaattatctagatgaatgatctatttcagaatccctcatcacttcctagattgaatttgtctggtacctcctactgaaccccgtcctgctgccacaaactctatgagatattcaacttagagataagcttccgtccttcagtgacaattttctgagcgctgatagaaccaatgaagattctctctcctacttttgtgttgaaattaggccatgtggtaaactggaaatgtttaataaagaagagcaacttcaaaaagtaattggtaggttttccagttgcagacatcttgcttgcacatgatagccagtttaaatggagcatcctgatgtttgggtttgtccccttaacctctttcagtgcatcagcaattcttttcttgtcaatatgcttgaccctatgtgatggtagaaacttcaagcaactagaagcattttgctcaaggaagcatggaatcttaatttttggggcttttctgttttatcaaaagaatcaacttctgagccatatattttgcgttgtttgtcacttgctggtatttgttcccttgcagtagtagaaaatatatacctctattctgtaagttaaatcgttgttctgtatttttctaggtctgagattc

SEQ ID NO: 10273 - DNA, 1994 bp, Eucalyptus grandis
  Intron number 1 from transcript Egrandis_v1_0.010052m (loc us Egrandis_v1_0.010052m.g) derived from phytozome v7.0 (c hr-ID scaffold_6; pos 36514634 to 36516627 reverse strand)
gtccacatcaatcagaacgagttcgtctaccgaaggtcagatttcagcctcttctctccgcattttttttttttttttctttcctcgctgctctgtctcggtgctttgcgcccggaaaaggacgatccggcgggagcgaggtcgagcgcgcgcgcgatgtgatgaggtgattcgtgcgaaaccaatcgggaggtggctcttgatcgtgtgcaatttcggatttggtcgcgatttagtgagcggtatgcggcattgagttgaagagttgggcggtgaaagggggaggagtgaaggtccacggaagttcgttgattcggtccgtgaattcttgaattttgtgcggaaagtggaatgagtttcgctgtttcttgcgagagaattaagttccatccggtttaggcttaagaagaggaacagttcttctcatttctgagactgggaatgtttgttagaaaaagttagggttttggtggagaaattacgagaatgaggagcattgcaggaggaattcgttgctacgtggagtagctatagtatcggcattatagttgctgtgattttgtcatttcacggtgaagacctacatgtcgtttttgcggtttttcaaacgttatattgttgtctctttgtcaaattccatcgaaagtatatcttcatgggttaaaggtggcagaggtgcctaatctattgcaaaattttcaatcaaggtcctcattttttttttttttttttgttgtcggatcctaaactatacactttttgttcgagttggtcattgctgacacatcagcatttaactacatcttagatgacacgtcaaccatctcgggttatcttttaacggaaggaccaacttgaacaaacaagtaaatagtttagggattccattgcacaaaaaaaaaaaaaagttgaggggcctgatcgaacatctagtaatcgttcagggacctccaatgtctttatccctattttcattttggaacttactaaagagcaaccttcgatttttaagaatatctgctaattgatgacattcactgtctatttgatgatcaagcgtgttacttgtgtatcagttttctgctgcataaattacttcgctgtggtggttgtgcaaaggctgagtgaccaagctaccacatcaatgttgctattaagcttttaaaatgaaatgactgcttttaattgtcaaacttgtgaattagtctacagtatgccacactttccagacatgtggtccagcaattaaattccatttggagtggtggttgctcacctcttgaaaactgctgaatttgaggccctgtatacatatccttttaacttataagcaagaataaggatgtttgtcttgattttaaaatcatttccaaattttcatttgggtgattgatcattgaggcatagttgtttctccttaacttgtttttgatcatatatattggagctaagtaaagttgttagactcggtcccaaaaaaagaagaagaagaagaagaagaagaagaagaagaagcttagttggaatttgaaatctcaaattgtaatcccatgaaggaatgctaaagttgaaaaaccaacttatcgttcaaatccttgttttggaatctataagtttgttgaagtattgtcccacattgctcgacaatgtgcgttaaatgcttttcatattcatgtagtctctttccaccaatcagcttaagctttttggttggactttctaacgtgatatcaaagccagtgctatctttttcacgaatgtgcgtccctcccccttggtagtcaaattccacatgcgtggtcaaatttctatgtgctgctcgtaatccagcttgcacatgagaggggatgttgaaatattgtcttacatcacttgacaacaggtcctatatgttctttatattcgtgtggtcttccttcatcgatgggcttaagctttctttggttgaatactaaataggcacaagaagcagaaagaagaggacatagctattt

SEQ ID NO: 10274 - DNA, 2002 bp, Eucalyptus grandis
  Intron number 4 from transcript Egrandis_v1_0.001303m (loc us Egrandis_v1_0.001303m.g) derived from phytozome v7.0 (c hr-ID scaffold_9; pos 4508896 to 4510897 reverse strand)
caacttgcatatagctgaagcgcaagaaagtggaggtacatttatttcttttcgtttaattaagcatttggaacatcattcatatttaatgcattcaaatgcttgttttttagctaatcattagtatattttagggttcaaaagtggtataagattttgccaacatgccatttaggaggtttcttgtgagtactgtgactacgtatccgtattagtatgatatgataggactgtgggtacaggaaacttcatccttgtttgataatgcttggtcggacatggttcattgaaataatgaatcaccattaatatcgacttttatgagatctccaactctctagcttttctgcaaagttgcatgaacactcctgatgctttgaaaactactcttgactaatctattggaataacaaaattcagcatgtcagctaatttggattgataaaaaaatgcacaataaagtcaccttatcgtattttggttaatggtagatcaaatcggttctcacagtgtttgagactaatttttcagaacagagggttgttcttgcaatttcaatgaaacaaaaggggcgcaagagtattctaacataagttaaatattgctatgaattttggatcctctttagttcagccatttcgacttccatttgaaaatgctaaagaacaaaaagagaaaaggaacaaacttctttccttgcctttccatttgtcctatttttgttgttttatttcttacccttgttctttttgtttgccaattattaccttattgagttaaaggctgtgattgttttcttgcttgtaagttgtaagtgggtgtaccaaaacatctataaaacaggtgtatatatgaatctttgtctcttagaattgatttgctcatgcttacccagaccagccattaattttttccgtttcaaccatgctcgagtatttactatctaccattcttaattttacaaaacgggcttttatatggtgatgttatatggtgtgggagaggttttcttaaaacatcctttctgatggaaatgaagtaaagataccatgattgccacagttatctaatgtcaggaggatttcatgggtgtcgacttctcagaatatgcgcaacccaccagatgtggagttgatgagttggtctctctttttgaatttctgtatagcgtactcaaagtcatgggaaggaggctgatggagcctggttcagaccagagagaggtggtgcgttctgagtgtggactttgcatgagtattaactcatagttttagaatgtttccagggatgtaatagtggtggataaaatggagccccgacattctactagagttcctttttttgtttggtgggatgcttgcttgacaatttgcagaagattattactaatgctgtgtgtatcataaggattatgaaatgggaatctcctgctgttattgggttcatcaattatgatattaggcattagctgtaataaacttgagttgggccctggcatcttggaagatatagagttgtgatttgagatgagtagatggcgttctggaaggcatataatgagcttttgtctatggtccttaaaggttttttagttatgccatatgagagaagttgtgaagccagaacctcttaacaagttgagctacgcaagagacagagtgtgttgcactaagatgattttttttttccaaggataacaccctctattgatatgttaggttccttgaacatcgatggaatttgttggcagttgtgctactgtcgtttgtgtgaaagtacttaggttaaaagaggacattttttcttgttcaaatgatttgagtttagacactgggaaacttactacaattttatttagcagtaggttcctatttttttgggtcagtttctgcagttatacgttaaacttgttgtcaggtgggacactttctttaagcactatatccttgttgattttgtcatatcatttattataggcgtttgctttccactgggaaagggg

SEQ ID NO: 10275 - DNA, 2047 bp, Eucalyptus grandis
  Intron number 1 from transcript Egrandis_v1_0.011369m (loc us Egrandis_v1_0.011369m.g) derived from phytozome v7.0 (c hr-ID scaffold_10; pos 25380946 to 25382992 reverse strand )
cgggtggaccccacaggttagtctcaagtctttttaattaacgactatgtatatatctttggtaatgtctcgtgctcattggttacaatgtcgaccttgtcaataaggtaagaagggaacaaatgtcgtgtaagtcaatcacattgtaaacagagaattgattgcgtgacaacctttaatattttttttccatgacagcctttaatttacttctaagataataatttattctgaattataaaaaatcaaataataaataattataaattattgtatggctcacttttttaagaatttatgatttataataaattattattctcacaataattcaaaaactgttagctagtcaaatcattataagaacgtggaaggttccactaaaaaatacaaggtttttgtataatctatactgtcattgattttgtctatcatatcactagcaaaattaaatctatataatattttcttgtttttgtgtgaagtatgagtaaatccgtgaataggtgtcgatggggctgaaacataattaggcgagtatagggaaataaatgtccttcgtttaatcccccctccccgatcatttgaaggataaaaagttaatattttatcaatcatgtgcatttctaggtgaggactgttaaatcttgtaccgcatttaatctgtctaaatatttgttggtttatgaagtagatagaaagtaagttaaaattcgaataagtgacccgaatacgaaagaatttacatcaacggcctcgtatacctagtctatccacaataactttttccttttaaattgctgaattaatcttgttatttgtgagccttatatgatactacatggatgatctgacattgtaagccaatcctaacttttcaacaatgagattctgtttaagctatatagtctcatttatgatgtttgatgtagttttgatgaacttccgcctcccacacgatatctcaattcataaaaaagggcacatgttcgatagtaaaataatttgcatgcattaaaaaatgtatcgaagtatgaccaactaaaaatacttttattttaatttacattcggttatgtaattcttagaggtgagcatatatgctaaacagcttattgggtccactcaagcatagtcggcccaaaaggcaaaacgagtgggcctagtaaatttctcctttgattcttacacacttggctgcggaattggccagttcaaactcgatcaattcatttaggacctgaccaagatttagtccaagtactcgtctccatcgttcggcaattagacttggtcattgggcaggcctacggaggattgggccggttctcctcgggctcgaacctttagaaatcccaccgaggcttggacttgcaggcccaagcctacccaagggaaaaatattgtgggtctggaaccgcccatgtgtccttttttcattttttaatatttcagaaaaaatttaaagaattatgaaaaatagatgatcaataattttagggtcttgtgttattttattttaatactctatctatgagtctatatttctattctacattagaaaattgagcttattttatccggttagagttttataaatgttaaatgtcaaagaaaaacttattaataaaatataattcatcaataatttaataaatatatagaaacgccggcccctaggcccttacccaggcgtagcttgctcactaacaggacctaaagtttttgctaggctgaaaaataatgggcaggcaggcatgttgctcgcccattgatcaagtctactaataattatctaaaataaaaaaattgcaataacattgatattatttggtgtaaacgtatgaaacatgatacttttcaaatgctctttatttttcagtagataacataagaagtaaacgcaatttagtagttatatatttattaggacatttttcttatagactttcttagttcataactgaataggcaagtgcctatgataatgtgttatactatcactgacataggtggaggtgctgggacacgcagccattggtgggtt

SEQ ID NO: 10276 - DNA, 643 bp, Eucalyptus grandis
  Intron number 9 from transcript Egrandis_v1_0.002446m (loc us Egrandis_v1_0.001847m.g) derived from phytozome v7.0 (c hr-ID scaffold_2; pos 14590213 to 14590855)
catctgaacttgacatatcttgtgaatacaccttggtacttcatctctttgagctttcttcatcttgttcttctaggaaattttgtgcgattagttttaccattctatgtttttttatttttatttttattttatttttttaggattttcttcctcagtgatgttcataagatgcatacatttaatcataaggtcaaaaataagatttcataggcagaataatacgggcatggggagtgaaatttaaatgcataattacagagaaagtacattgagagcacagattcaaaactggtaatttagctgaggattagtttgcaagagtttgctacttttattatttgtatctaggttgtaattggttttattttttgatagttaaactctgatgagtagttccactttaaatttcctgaataactcttatagatattctactctttttaatctctcattttcaaacatttcaggacgaaaggttttgcatcagctccatccagcaggttaccaacttatttgcctaactaattaagaagttttaatttcaagtgattgagaatttgatttatccttttatcatgtgtaattagatttatatttttctgcagcttgactttgcagtcacagtttcagcactgctggg

SEQ ID NO: 10277 - DNA, 7664 bp, Eucalyptus grandis
  Intron number 10 from transcript Egrandis_v1_0.010246m (lo cus Egrandis_v1_0.010246m.g) derived from phytozome v7.0 ( chr-ID scaffold_6; pos 36104574 to 36112237)
tgctgcaattgactcgggatccatcttattctagagtgatggttttatttaatgtgatgggcctaagttggcatgtccgcccatgttgggcctaaaagcccggcccacaagattaaggctcatagatggagggatatgatgaaggggtacgtttcttttttggagggaacgtataaaaggagaaagagagagggaggaacgtaccttttggcatattacgtacgttctttccaccctctctccctcccaaaagaaaacagtaagcaaaaggcgaatctatcttcccttcaaggccaattgacgtcatcggatcgaacgcgattagttttctcttcctcatatcagcgtcggtgtttaatctatggctaacaaggtacgctcgattccgtggtgtgttttaggatcggtgatgcatgtgtttttcccgggctcgtcttctgcattcgttttaagggttcgatttagtgttgaatccggtttttgggaatccgacaaacccaacattggtatcagagccgtagttcttgtttcccgatcattttccatgtttttcccaacccctttcatgtttatggatgatttcttattattttttcgtgaaattaatcggccgacaccgatcggggcgaaaaatcccgacacccgagcactattcatccctttttttcgagtttctgtaactcaaaattgatttctgatggcgttggatggaagggctcgtcgagacgatcgcgacgagtggcggaacaccgccaacggccgccgaacatgcccccacgcgccggtcggtcggtccaacccgacccaaccggcttgaccggttcgaccggtccgacgacccggcgacccgaccgttgaccgttgaccgttgacccaaaaaaaaaggaggaaaagaatgtgtttctttttcaattaagtttatgtggattatatgtgatcccttatttgttctgcatttgttgcaggaacaatgcctcccctaaggttgcgcacacctattcgcgcaattaccgataaataaaaggaaaggctttctaagttgatagctgagctgattgattatcgatgggagagtggtgacttaattgattacgtccttgaagtcaacaagaaaattcaaaaggtcatatggaatggtcgtcctatgccacagtctaagatggtgcgatttttcatgaacaccattccaccagaatggcaaggagtgttgaatcgcatatgggatgtcaacagagccgcttcatataggaaaattgtgatggattttatagatgatcattactagattgttacaagggaaaagatcaagaaattgaacaaaagatgatctttcccagttcgtatactgacttggtgttagatgtagaggctggtctttgttaagtgtgatttgtgaacatcttatgtaatgcttactacctgattattgttgatgtaacaactgatatgttagttgtattatgtgaaagcattattattctattggatgttaaatattatttgctttctgttattattgattgctgtgagtagttcatagaagttttttgtagcttcatagaatttattttgcataagacaattatattaatgatagttttaagttaggatttttggaggatgattggaaatatagtgaccttttgattctgaaaccttacttgaaattgttcattaatataatgggtatgtgcaaaatggatgcataaatgataggcattagtaattcgtgtatatatgtctgatgtgttcagatcaatggcttcagccacaaagagcatagttgccgagctaaacaaaggtgaaaagctcaatggtgataaggaagtgtttgctggaagagtaagaggcactaaaagctcttaacctgaccatggtagaacctgaagaaggaaacactgcactgtgcaagagagataaggaagcgtttgctgcatggaaaagaaagaactctcttgctcgcattacattgttaagtagcatggaaaatgtcgtcatgtgaaagtttaggcgttttgagaatgccaaggagatgtgggaagcattggcagcaaaatttggtcatacttcgctgaccagactgaggcagctcactattaggtttgactcttataagaagcctcattgtcagaccatgaagcaacattttagaaagatgtcaaacatgattaatgagctgaaagatgctggccatgtcctcactgatgagcagcaagtgcaagcagtgattcgttccttaccttagagtttggaacatatgaaggtgcacctgacccataatgaaaatatcaaaacttttgaggatgcagtgcgtcatcttgagctggaagaggaccgcctcttggtggctaagccagaagctgaaatctaccatgctggttctagctcacatggagcttcgagctctaagcgcaaacgtcctaactgatttgataaagggaaaggcaaggaagcaggtccttcagggaagaagcctaagcttaaccaacatgaaagaggaaaacgtcctcgaatgaagaaacttacaagggtgaagtgttacaactgtgataagaatggtcactatgctcgcgactgtcgtgagccaaaaaaagtatacaccccttgtacttttcagaactttgcttttgtgtcgagttctgtattcttgactgagtctaatcttttgtggactgtagattcaggagcgacagaccatgtagcgaaggatagaggatttttcgtggaattccgacgagtaccaactggaactaagtggatctatgtgggaaacaactccagagctgaagtgaaaggaactagcacctgccaactgaacatgcgtggtggacgcattttgttcctacatgatgtattgtatgctccggagatttgtcggaatttagtgtctattttagcgttggttaaactaggttttaatatgaacttccataatagaggtgtggatttgtttttggatacaaattactatggttgtggttattttcaggatgatttcattgtattagatgttgactatgttaacgcaaatgtttgttattcccttctcacgtctcctaatacatatgataatgatgtgaatatgtggcatgctagacttggtcatattggccaataacgtatgaatagactagccaaatagggcttgttgggcaaaattggaaaagtcgatttgcccatatgtgagcattgcctagtagggaaaacgacaaggaaaccatttggaaaatgtaaaagagctgaatttcctctgcatttaatccattctgacgtctgtggttcaatgaatgtgaaaggaaggcacggggctatttatttcatcacttttatagatgattatactcgattcggatatatctatttgatttctcataaatctgaagcattaagttgtttcaaaaggtttatgaacttggtagaaaatcaattagataagaaaataaaagtattaagatccgatcgaggtcgagaatatttatctgatgagttcagaaaattatgtgatgagaaaggaatagaaagacagttgtctattccatatactcctcaacaaaatggtgttgtggaaaaaagaaacataaccctactggaaatggttaggttcatgatggcgcatgctaacttacctatcactttttggagtgacgcgttgttaactgctgcctatatacttaaccgagtgccttccaaatcagttacttccactccatatgagttatggacaggtagaaaatcggacttgagttttcttaaatcatggggttgtgctgtctatactcatgagtcctctcacaagtttgggaaattgggtcccagaggaaagaagagtattttcataaggtactccgaacactcgaaagagtatgtgttcataggtgagcaggaaagttggagtataactgaatttgaatcacgagatgtcacattcttagaagatgaatttcctaagaagggcgaaataggcgaatattactccctatttgaaacattggatcaagataatgatattagtggagttcgtccaagtgggagtaatatgagaaatgacgaattaaattcaactcattctcaattgcaaccacatgatgaaacgacgttatcattatataatcctagtgggagcataatggggaatgatgtgcaaagtgtacaatctcccatacggcgaacaagtcgccaaagtattccccgtcgacgttttgacattaaaggggaaacttttatgattgctccgcaagatgaggatgagccaagaaatattaatgaggctctgaattgccctagtaaggaaaaatggattcatgcaatggaagaggagattgagtcaatgaagtcaaatcgagtttgggaactggttgatcttccaaaagaacgcaaagctattgggaacaagtgggttctcaaaataaagcgaaaagttgatggcccgataaaaaggcataaagctcgccttgtggcgaaggggtataatcaacaggaagaaattgattatgaagaaacattttctcctgtagtaagatttacctcgattcgcattattctggcaatagtgactagtatggatcttgagttacatcaaatggatgtaaatactgtttttctcaatggagaattagaggaagaaatatatatggaacaacctgctggtttcatagtgaaaggctaagaagaaaaggtatgtcgacttttgaggtcaatatatggccttaagcagtagtcaaaacaatggtatatacgttttcataatgccataatggcatgtgcttttacaataatagatgatgatcattgtgtatatatcaaaagatccaaagatcaatttgtgatcatatcattatatgttgatgatatactaattgccggaagtaatatggagtttgttaatactgtcaagagttggttgtcttccaactttgagatgaaggatatgggtgaggctgcatacattcttggagttaagatttcaagagatcgttcgaagagattgttgtctctttcgcaagaaacatatataaataaggttcttgaacgatttcgtatgcaagattgtaaacccatagacacttctattgcaaaaggtgaaggattgagccatagactgtgtccaaggactccacaagagaaggaacaaatgaaacatgttccttatgctagtgctgttgggagcttgatgtacgctatgatgtgtacaagacctgacatatgttttgcagttggaatggtgagtagataccaattcaacccaggtcaagcacattggaaggccgttaagagaatactgaggtatctaaagggaactgctgattacaagttgaattaccaaggaaaggatctgcgacttgaaggctattcagatgctgattggggaggagatttagatgaaagaaaatctacctctggatttgctttcttactgaacaatggcgccatatcatggagtagtaagaagcaaacgtgtatagccttgtccacgatggaagctgagttcgtggcattatcaacagcggtacaagaaggagtttggcttaagagatttttggatcatttaggtgtcattgaaaaagctgcaaatccattattggttaactgtgatagccaagcagctatagtgtacaccaaatatccaaaatatcatggcaagaccaaacatatagataccaagtataactttgtcaaagatatggttgcacgaaaggatgtgaacttacagtacatatctacgcatagaatggtagcagatcctatgacaaagccaatatctagagatgtgtttgtggtcatgtaaaatctctaggattgcgtagagtctgatgtactagattgtaatttccctgatttgttcacatttatgaaattttatttttcattgttaatgcgtatgaatctttgtttgatatttatgcatcttaatgcttagtgcattactttaaattaagaaagtatgtcggatagatataagattggcccactcacacgggtaatcgcctctatttactgtgtgataaatagagatgtgacggtttttaagcttattatctaggtgataatcgagagctcaagcttaaaatatataagtcgccttaactgagtgttaagatgaggacatgatatttactatgttcgaaagtaaaaaaccccacatattttactttatctgtctataatggcagatgtgagttatgatgaattttgtaaatgagtagatacgtgaactcaagttagatattgggtatgtctgaactatcatctgtacggtattgaaggtgtagacatacgctccataggaaatgagttaatactgtaatacgtatttcatactacgtatgcatgagacgaccaataagagtggcaaaagtttgatatcaacttttatgccatgtgagactcttgaggaaaagagttcctcatttttagtgccctcatgacttttacttattctcaagatttctacttagtgtttgctatcttaggatgttgccaatgatcatgagttgattcgatctaatggaacatttctagaaaagcaagctgaactgaaattgagagtttgaaagaaagaggaagatcgaatttggagaatcatattgtagttttgtgttcactggtcgaccaattatgactgtctttgggataatcataattgtgaatacaatatatatatatatatatatatatatatatatatatatatatatcattggttaaaagagatcaagagagatataaatgcgatcgattgatctagggtactgcatactaaatctactcagagtgtgatgcccattatgagctgctatatattcccaacagatgtatagcaacgagctctcaaagtatgctggtcgcacgaattattcaccggtatgaatgttaaagagaggtaaagagaatcccgttcagcccaccatgtgcgagtgggagattatggttttatttaatgtgataggcctaagttggcccgtccgcccatgttgggcctaaaagcccggcccacaagattagggcccatggatggagggatatgatgaaggggtacgtttcttttctggagggaacatataaaaggagaaagagagagagagagagagagagagagagagagagagagagagagagaggaacgtaccttttggcatattacgtacgttctttcctccctctctccctcccaaaagaaaacagtaagcaaaaggcgaatctatcttccctttaaggctaattgacgtcatcggatcgaacgtgatcggttttctctttctcatatcggcgtcgatgtttaatctgtggctaacaaggtacgctcgattccgtggtgtgctttagatcggtgatgcatgtgtttttctcgggctcgtcttccgcattcgttttaggggttcgatttagtgtcgaatccggtttttgggaatccgacaaacccaacataaaggtttcctttatgcccgatccgtcactggatttctattttgatgtctatttctccgggcggcagatgaactggggaagatatatttggttacagatgaaagggtatgtaccaaaccagagcactatctttataaattttcccattatagtttcgttctttgttgtccatttttttcatatagtttatggttgcaatgacaggttcaagtggcgatttttgatcttcctgaggagat

SEQ ID NO: 10278 - DNA, 1031 bp, Eucalyptus grandis
  Intron number 10 from transcript Egrandis_v1_0.017099m (lo cus Egrandis_v1_0.017099m.g) derived from phytozome v7.0 ( chr-ID scaffold_6; pos 52297132 to 52298162)
ttacttcaaaggatctaataagtgtctctggggtagttattatatacttaactttctgaattcctggtcattcattatcctttgatatatgtatcccaatagcgtgctactatcagaaaccaaggttatatcaaactgaataattggatgacaatcatgtgctgtctttaaacatgaaaagggaagtgttttttcttcaggaaattaattttgattctctttttccaaagtgatcctggactcctttgcctttattctggtgtaacaatcataatttgcttgtgattttaatatgaaaactaagatatttgttcttcaaatgagtaagctatgtagttttgtttgtctgagtcttttataaaccatgcgcccaaatagttttgtccccacaaagcatccgtggtagctgcactttcttcatcctaattggtcaaatggactttaaagattgcttgaagaatacaaaggatcttggtttatgagtattgggtccgattctatgacatggttggaagaggcctgagttcaaggcaaaggatctccagcttgtataatggaatcccgcatgatagtgtagtcctacttttggtccctcttcaatccaatttgggaccaattctgtagcattcaggatatttctatgctagctgcatcttagaatagtattgttttataaactggatatctaagcaaaagatttccttttcaaatgggaacttaaaatctgggacaatatagcagtgatcctttgctaggaagttgttttccttttcattttcctttttgaggtgattatagtcttctggtcacgtattctagtattaggatttataactgctggatgctagacagattggttttagctgaaggagagcactttctaactgttgccttcttgtttttattctttcgagacttattatctctgtttcctttctttctcatttttccatctcagaatcacttgtatatgattcctacatcttaatttatcaggtaatcccacaggaggttgtcggggcacttcttgc

SEQ ID NO: 10279 - DNA, 7481 bp, Eucalyptus grandis; identical to SEQ ID NO: 10226
  Intron number 9 from transcript Egrandis_v1_0.004118m (loc us Egrandis_v1_0.004118m.g) derived from phytozome v7.0 (c hr-ID scaffold_7; pos 18392094 to 18399574 reverse strand)

SEQ ID NO: 10280 - DNA, 1099 bp, Eucalyptus grandis
  Intron number 1 from transcript Egrandis_v1_0.018293m (loc us Egrandis_v1_0.016329m.g) derived from phytozome v7.0 (c hr-ID scaffold_7; pos 6331432 to 6332530)
gccaagacccccgccgtcaagtgggtcaaggagtactctctttcgatcaatctgcgtgtgttttgaggaccaatttgtgatttttttcctgttgaattatgctgcctggaggaggaatttggggatttctgctgtacacgccgtcgtagtgggaatttagcataaatctcatcgattttgttaaacagttctgaagtgggcatgaatctcgagttcctgagtacatgtgagtgaagtggcaattggaaaaattgcgaatttaagtcgttgctgctgtaatttgctgataattgctcaggccgggggaggttgtggtgcaatctggtgatggggagttggaaagggctctctttggcgacatctaatgtctgaatatagcccatcttatctagattatgcatatggttatttgagttattgaatagtcttcatgtttgagtttggatcattgctctgcgttttgcagactcttgatatgagtttgttttcatgtatggggatttgttgatgtgccacttttggtggaatggagtttttttaaagtcacactggcagaaagtgctttggtagttctatcttgtccgggagttcatcaccagaatttttttattttttttatttttatttttattttttaaatatagtgtaaatttcaatcctcatggacatgtatgtgtgcatgcttgcgtttccctattttaacatcaaatagctgtatcagaatacatcttttacttggacttgtttttcctcggttgtaattctgtgtatgttttggtaatatctgatgtttccagagggcttaacctattggcatggaaagccatagcattagaagtgtgtatttggactcttaataagcttggcttctttagtttgcttgttttccaagggattacaaatttctgactgttaatcatgtgttaggcggtgggtgtactgagtttactaccatgagtttttttgacacaaattgaaagctctttcttttgcgctatattcttgtattatggtggttctaagtgctgcatttaccatcttattgtgtgaattgaattttatatatgacgtagtgcatttctttttagggtgccacaag

SEQ ID NO: 10281 - DNA, 1178 bp, Eucalyptus grandis
  Intron number 10 from transcript Egrandis_v1_0.016583m (lo cus Egrandis_v1_0.011742m.g) derived from phytozome v7.0 ( chr-ID scaffold_11; pos 40233742 to 40234919)
ggatcgctgttgaccggagtttcaaccaaattactgtatgtatagatttctttgctctaaaagtgccattaaaattgtaagacattattgatgctcccaataatctattttagttttccttttcctgcttggctgctcagtttgtaagatagatctgagttagctgttcttcttttattagtatttttgtcccaaaatttagtctcggtttacagatcatctccatttaggagagagtttgcattccgttttaccattgctcatctgcatttcagtcacttgtgtatcgagtgcagcattctgttgtttaaaacctttctgtggtgaaactgcaagctcttcagcaatagctaaccaacgcaagatcatggccgggagaaacttgtagcgaagaatacatcctaaagccaaagccaaagacagagtgtcacagataaacatgagccatattaacctttggctgttctcattgtactagtttgagagactacaagtttggccatgatgtaggaggctattagtcattgtaatagcacaggcttgtctttgtggcaacacatgcaaaccttgattcaattagacaccgttgctttttgagaattgattatgttgattccgttaaggagcacctaccaagtacagaaaaaggcacataaaggagacttcaccacaaactgcctgcactatggggaagatttacagtattagaatgaacagctattttttgtgggcgtgacatctcaactgaggctctcttttgaatattaaggaggtctgaaagatgaaattaatgctgagtttgttatcattgtgttttggttcttttaatctccgtgatctgctattagtgtctttgtaactgacgttggtgatctattttaattttctcccatttcatctatcccattgtcatctacgccttctcaatttaagcatgattttggtaatatgccatgcatgctgtatcaagatgttatgactacaggatctctttggccttttttatggtaaaacaactatctacatagatataccgatttaattctaacatttcataaatctttgcctttatatggcatccgctcattcaagttatctattggtatccatcatcgtaagatgaagttgattggccaattaataattgaaagcaccttctgttgatttcctgcaggtag

SEQ ID NO: 10282 - DNA, 1606 bp, Eucalyptus grandis
  Intron number 1 from transcript Egrandis_v1_0.006020m (loc us Egrandis_v1_0.006020m.g) derived from phytozome v7.0 (c hr-ID scaffold_9; pos 412560 to 414165 reverse strand)
ggtaagtagagtggagtccatattttgtgtaagaaactaatctttacaagtaagtataaagattgttttcacaaaaataaattaattagtacaatgcacacatgattataactttgtaagtatatgtatagatgcttcatcttataaatcctaaaaattcttaagttgcttaagttaaagctagtaattccgtacatgagttggtaaatctaaggtatagttaaaaagataaacaaaaatatggcaaaatataagataagttgataattaaaagaaaaataattttgatgagtaattcaaatgaaatttgatactcaaaattagttgataatttgattgagaaaaatatgtaagccactctaattaagattggcaatttttaaaatgagttcgtgagtaactcaaatgagagttggttatccaatagaaaagttgggaaattaaaagaacaaatagcattggtaattagtaaaagttggtaactcaaaactagtaggtaattagttaatatgacaaaagttggtaagtagctctaatttatgttggtaatttcatataaaagttagtagattgaagaccataagtaatgaaaatcaaatttggtgagttagtaattggttatttgctaattataagagaatttggtgatttcataaatttattagtctttttcccccaacaatatttttggcattgaagaactcattgaaattcaccggcacggaaacaaaacatctatttcattcggtaaggtctgtggctcttttcttttggatccttgttgtcctcctcgaagtataataaaagctcaaaacgtttggtttgtgggctctttgagttgtttgcattttatttgggtcaattgagttaggcatattttcaattttgacctacccagtgctaaaatcgttaccggtggaatttcgagttcgaaaagtcacacatggctaaccataaaatagacgagcaaaaaaaaaaaaaaaaccatagaatagacacgtggctctttctagttatagaaaatagacattaggacaaaatgttaagtagtgttgttgcactgaaaaagataaaacattaaaacttgatcaaccaatggacaaaatgttaagtagtgttattgcactgacccccatttcttcttcagcaggaataaaacagttcgcaacgcttgatacaggataattagtctgtacaggccatgtaaggcaatggcatcatgctttagtgtttaataattttcggatcgaaatcttaattgctgttcaaagtctgtcctaaatagctccttttggttaagtgtaatcatatataatagtcaaaaagaaagataagtgaatcgtcttgtataaatcagaagaacatgaaccacttacgtagatagatacatgaatcggttgactaaaagtggaatcctaaacttgttttgattggtgctgagctctcagagttctaattcaactaagtgggaatacattttgttttggctgtaattatctaaaaatttggcacgctgctttgtccttgttggccagtgattgactgttgattgcttattcaaattgctaaatcgatgctataacttctttttccgtttttgtcaggg

SEQ ID NO: 10283 - DNA, 1446 bp, Eucalyptus grandis
  Intron number 5 from transcript Egrandis_v1_0.006829m (loc us Egrandis_v1_0.006829m.g) derived from phytozome v7.0 (c hr-ID scaffold_5; pos 7682090 to 7683535 reverse strand)
cgactaccattaaatctgctgtaaaaggtaccctgtaatagagttcaatttgatttgctagctggtgttctataaatagctgttttttttcctgttgattcttttttttttgccttacctcctctcctaaagtcttgaactgtcaattgattgtcaacattttctccctgattgtttatattcccatcaatcctatcattcagctgctctgcaaatttatgtaactaggggatgcttcgtactcaccaaactgatattttaacacaatgtgattcagagctttaaggacacaaattcatgggatgtttatgatcatggaacgatttccacaaattctggaacttgcagatgcaagagtcagttcgttgtttttatatgtagctaacactttcttcattgaccaaatatagacagatcacaattgaaaatcatctctgttatttatatcatcttctccttttctgttaaggagtgagattcccttctcttcatgttttgcatgatctacgataattacctgattctgcaattgtgatgcactgaaacatgtattcattagtactctttcagaagaaaaaaatggccagatgcatcagattcgggcaaaggggagtatattagatgctgcaaaatcaggcgtaacaggtcagattttgcttgtatgcatgttcagtttgctaagagtgtttgctagttgccttgtttctacatttgttgcacgttcttatgtgattatgaactcacatttttttttctcggtgaaatcaaagttgcctgttaggaaactttcgcacttgtcataggcaaaactctatactgcttaatgagatggatttttgaaattccttacatatgacagatatcgcacttgagttaaaatggaaaaaatgttcagtagatagaagattcaccaaattaaaaactatgtataaaggtgctggctttgtgcttcagaggtggtctaaggttgtcctttcaattggaaaatccgcaatttaccttgtcaggttatgttcttgatattttcctagctctagcaccatgctttaggtattgaaaaatgagtcccatttaagagaaccccatgcaaaagaagagggcatatgggctaagttacatggattcctcagtgtattcctttatgatttttacattttctattgaagttttcattaacgagctggttgctcgttctacttcccaatagattttctaataaagttttcattatgtagccagttattgtcttgatatgactttgtatttactgcctccttttagcttcaggttactacaataatgaaatcaataacaggtccactattgtccttcagccagttttgacacccatgagcatgtgaatgttcttttgtgggctatgtgctcctgctgttttgtattattctgagcatgtccttagaaattgacattttcctgtcatgtaga

SEQ ID NO: 10284 - DNA, 8079 bp, Eucalyptus grandis
  Intron number 2 from transcript Egrandis_v1_0.019044m (loc us Egrandis_v1_0.019044m.g) derived from phytozome v7.0 (c hr-ID scaffold_10; pos 12199603 to 12207681 reverse strand )
cattcaagtacgcctgggtgcttgacaagctcaaggccgagcgtgagcgtggaatcaccattgatattgccttgtggaagttcgagaccaccaagtactactgcaccgtcattgatgctccgggacatcgtgatttcattaagaacatgattactggaacctcccaggctgactgtgctgtccttatcatcgattccacaactggtggttttgaagctggtatctccaaggatggccaaacccgcgagcatgctctccttgccttcaccctcggtgtcaagcaaatgatctgctgctgtaacaaggtatgctgtttattctaggttgctgttagtatattgctgtgtgtgtgttgatttacaattagcttataattctttgatgacagatggatgccaccacccccaagtactccaaggctaggtatgatgaaattgttaaggaagtctcttcttacctgaagaaggtgggatataaccctgacaagattccatttgtccccatctccggattcgagggagacaacatgattgagaggtctaccaaccttgactggtacaagggtccaacattgctcgacgccctcgaccagattaatgagcccaagagaccatctgacaagcccctccgtctcccacttcaggacgtgtacaagattggtggtatcggaactgtccctgtcggccgtgttgagactggtgtcattaagcctgggatggttgtcacttttggtccctctgggttgaccactgaagttaagtccgtggagatgcaccatgaggctctccaggaggctcttccaggtgacaacgttgggtttaacgtgaagaatgttgctgtcaaggatctcaagcgtggctacgttgcatccaactcgaaggacgatcccgccaaggaagcagccaactttacctcccaagttattatcatgaatcaccctggccagattggaaatggatatgcccctgttcttgactgtcacacctcccatattgcagtcaagttttctgagctggtgaccaagatcgacaggcgatcaggtaaggagattgagaaggagcccaagttcttgaagaacggtgatgctggaatggtcaagatgattcccaccaagcccatggttgtcgagaccttctctgagtatcctcccctcggtcgttttgctgtgagggacatgcgccagaccgtcgccgttggtgtcatcaagagtgtcgagaagaaggatcctagtggtgccaaggtcaccaagtctgctgccaagaagggcaagtgaatcgtgcggttgagattcgacatcgtatcacatgggagtcattgcaataaggcgttggtcattgtcagctgtctgtctatcggtcatttaggggtttggtgcgctggttatcaccatctcatgttcctgtcctcatcgagcacgtggttgcagaactgggtgctcgataggcggtggcagattggggtcgccagctcgagtcaattttgagtcttgcgtttgtgcactggcatttgtactgtctttgctttctttccgtaccagctgagagtctactattggtcatttttcaatgcagttcaggccttcgtattatgccccctttgcatggtatattatcaattggtcttgctgttgaaaaagcaataaggcacgtcctgatcgcgcgtagcataacaagagcagctgaaccatgtataatcatcttcgatgacgaccgattttcaagattactgtggtaatgatgagaattaattggttctccactgcataaaactcagtacttttttacctattaagaaaatatttggtataacactattgtggactagcttataaactcgaaaggagttaccgacgaaatgtcagttcccgaaattcttgattgaggccgccgacaatgagtgaaaatgatcgtattcttaaatcgaattggacaagagacgacgaaatgtcagttcccgaaattcttgaatgaggccaccgacaaggagttaaaaatgatcgtattcttaaatcgaattggactagagatttttggctacaggacctggtagtccttagatcaaaatgccccgcgtgtttcggaaatggttccgtcaatctcagaagttgctcgagccgtgagtacgcttccattcaaatttgtcgtaattacttaacgggagtttagtattgatgagtttgtcgatcatcttctcttaagccttgcgaaggctttcattgataatttttgcactgtgctttgttgattttcttcatcggcttgttcaccgatggctttcgttctgaccaaatgctgctcttaccagtcaatctgacacttgtcaataactagagagtcggccactttttagtgctccacatttgcacgactcactaattcggcttcttccaaactcgcctattccacgccatatgactcaactctaacatcattacttcgacataaccggctctttcaagtacttgactattcctcaactactctggcccatatatagttatagtttcatgcaaacatagtcgatctcaaaattagctcgaagtgtgagcatgcttgaactcgatttgttgtaattacttgacgagagtttagcatgcttcttggaattattaggggcatgaagagcacattgaggggtccatggtataaaattaatagttcccaagacagtaatgctatccaacgacacaaggttgttttcttaaaactttcgaggggacttctttttagttttttaaaatcacttatctatatcataaaactcttgaatttcagaaattatgatttacagagtgatgaacggagaacatatttctaaaatcgtgcttaatatattgagctaacgctctaactcttaacttttgtcggcaccgtgcttcgaggaagaaggaaaagtattcagaaggtcgtgggaatagtgtacatggaagagatattttcggaacgctgatcttattttgcttcttatagaagttatccttgtacagtcggagcccaagggtaatctcgtaataagacaagcgtgctaggacaataataggcatatcgggatcaccagagatgaaaggaccacgtgcatcctgcaaaatggtttttctagacagaagataattatgaaatgtgaagatttttctcaatactaaaagataaaaaaagtcggtccatgtggagaatcctcggaggctctccgcctgacacagatagcttgcggtcaaattcgtcgttcgaaaagtaaatccaagagccagaataatcacttaggagcggccgtcaaagaagctttgattccatcgcgaacaattccctccatctccccccccccctccttaaatcttttagcaaaatcctccaccgaagtccgaagtcatccaatggcaaggggaagcatgggtcacactcaaaatcgacctaatttctattatttttattatttaaaaatacatagttgatgacgatacaaaatttctcttcttaaaatatatatttatatgataacgataagaaatttctccctctcaacaagcgataactaaatgtggcaagcgaatagtgaccaacggatggccaggaaccagtagctgctgaagatagtgagcgactatcgaccaacatatggtccaggactgacaacgactgatggctgcaaatagcgataggtgagcggacagttagtagcgaggacgagtaatggaaagattgtttatttctcatttctattttagaaagagagtataatttttttttactttttatttatgttccaaatttatttctagattgaaaatttgctctaaaaatacaaaaataaaattacgttatcgaacggagttttatttcaaaataatttttaaaaacaaaaaaaatagttttgatcgaaataaaatgattttgatgtacacgctaaatttttcagttttttccctcttaaaatttctgtatattcctgtcgttttcttcttcttttttctcattagatctaatgatagttttcaatttaaataaaaatatcattagatcttctttatcgccctgtctttcgaaaaaatgatggattgcaatttgactcgagaaagacagattgtgagaaaacgttctttgttgattttgacaagaaaggaatatggtacgaaatgcaaaggaattttaagtgtaggtactaggaaagaaaaggtcacaagaaatgtaaataatattggaaatcaaaaggttgccagaaatgcaaattttgcaagggaactaaagataaaaaggcatgtcgtctcctctcgggtcgccctgggtttatgccgccggctgccagctgtacggcgattcctgagtcacaaaaaagaaaagaaaaggcatgccgtcattgattgtgtgagtgttaatgacaaagattatatcatggatttttatatcccactaacatcagttagtacgtatgattatggattttgaatctgtaaataaatttctaagcgtatatgcattataaacacctgacaagattacaatgattacctaaaaaaatttacaattctccagaatattgacatagtagtcatgtgctgatgttgattcattgtctgtcttcgattgatgtgttcacatgctttcattgagttcattaatttcacaaccttaacgcttgaccaaaataataggattatttagtgttgataactttattgatcaacttctcttaaacatcggtgaagttagacaattttcagactacgcattgttgattttcttccttgtcgacaagtccgtaattcacctatcatcttgttcgccgatgattttttgttttgaccaaattctattctcattgattgagtccaccggttgtcaataaataacacgtcggctatttttcagcattcaacatttgcacataacttactaattcaacttcttccgcctcccctattatagtccacatagacccgttaaacgggtgggtcaggtcgggtttgggtcgggtcataaatggtccaacccaaatcgacccatttaacccgtttatgacccatttattacagtgcaaaatttttaacccatacccgacccgacccgtacccgatccatacccgacccatttaacgaaacctaaaaaagtttatatatatatttttaaaatgatattgctaaaatggttttatacaacacaaatttaattgataatttttataatttttaaaataattattttaaaaaatttcgaattttaattattttttattttttaaaaattaattttttaattatttttatttttaagaatataatatttaattttttttttctttttctttttttcttttttcttcttcttctttggtcagccgccggccacgacgacagccggcggccggccacaagcgagcctcaagctcgcccggctcgccgacgccggcgagctcgaggctcgccagatccggcgagctcgagtctcgccagatccggcgagctcgagctcgcccgacgtcggcgagctggagtctcgccagatcggcgaggctccagatccggcgagctcgagcctcgccagcgtcgggcgagctcgagctcgcccctcgccggatctggcgaagctcgagcctcgccggacgtcggtgaggcctccgcctcgccagatctggcgagctcgagctcgcccctcgcccaacgccggcgagttcgagtctcgccagatcagcgaggctcgcctggccggtcgccggccatcgccgtgccggcgaccggaggaagaagaaagaaaaaaaaataattataatttcggtttttataaaaaaaaaaaaattgtaaagttaaagagaggagagagatggtgggattttgagtgaaaattaataggttcatttttaatgggttgataaatgggtcataaatgggtcaactctctaacccatttaaaatccatatatcttagtcttgacccattaaaactcattaaaacccattatgggtgctttatgaaagaaagcagaaagcttgacccattaatgacccatttaaccataaataggtctataaatgggttatgcaacccatttaacaccctaagtccacatgactcaattcccacattacattgctactttgacaaaatcggctcttctggatatttgaatggtccccaactactctcgccaatttattgttatagttttcaacgagcacaaatgataaacgatcctaacgtggtacgcaaggcagatatcatatctccgttcgattattgtgcaatttcggcctacttcggaaaaaagggataaatttcgattggtttgtacgtcgtatccccttagtcaatatatctttcttagtatcttttggaaaggatggcggtggaagagcatctccacgtcggaaagatgcgcaaattatttcattgacacattatcgcgtctcttttgcgattttttttttctgttgcaaaaaaagaaaaaagaacaaaaagaacaaaaagacaaaaacctcaaaccaaacgaaaaaaaaaaagaattcgttttcgagaagttgttcctccgccaactgtaatattttaatcgccagcaaaaaaggtcgggacattttcccatcctgggagcctccactgccttgctccccaagcaaagagaaaacgcccgagggcaatttcggaattaggcgctcgaagcgggggcaattgcggaatcggagcgtcgcgagggtgggaagcggtataaaagcgagcgccctcagaaccctaccgtgccacccgcgcattcatttccccgtcgtctctttcgctggttgattcactggttttcgagattctcggcggccgagattttccgaggtgaggtcgtttttcgtcttcttcctcctctggttgcttcttctgctcatgctctatgcgttccgttcgaccgcgtgatggattggcgtcgatggtgttcgttttgcttcgcttgaactggtgtggctgtgctgactcgacgttgactttccgaacgtgctttttttgttttgtttgtttttttttttttttttggctgggattcgttctgcgtctgtcgtctgatcgatcgttgccggcggaagtttcgttttcccgatggcgtagcgcgagtcgtgtggagtcgatgatcgtcgccggcttccgattctggttgatcggtcctgctcgagcttcgcgagtctatccgcgtctgattgctgtgcgattcggaggattcgatggcgtcgttacgttttttcttttcttttcttttctttttaatttcctgatgagggagtgtattgcgtgggcgccgggaatgatcgacggggtgtttcgggggtgtgcgatgaatcgattatagcccgagcagtgcgtgctgatggtccgatggttgttgtgctgcaatcggttcttgttgaatgggaatcggcttcccaacctgtgaacagccagtttgttcagatatggtctgtactgcgttttgaattttcttattcgaaatatgcttcgttgcgctggtgatggaggtgacatcatgatagttttcatttcgttgtcgatgacagtctgtggatttcattagcatagcatcccagcccgtttactccccattttatcgtttgaattctaacgaaggagtcatggaaaatagggagtgcagtgattttcaattgaccatatggatgttgatatgtgaggctgaatttgctgtcttacaaatacaatgcatttttcttgtacaaatcttgacaaatggtgtatcttcgcatttatcttgcatccactttatttcattttgttgctgtatttcctttcctctctctttacccgttgtccaatttctctccaatctgagaatcgtttttcttccttttcgcagctttaagccccatatctcgaaatgggtaaggagaaggttcacatcaacattgtggtcattggccatgtcgactctggcaagtcaactaccactggccacttgatttacaagcttggaggtatcgacaagcgtgtgattgagagattcgagaaggaagctgctgagatgaacaagagatcgttcaagtacgcttgggtgcttgacaagctcaaggccgagcgcgagcgtggtattaccattgatattgc

SEQ ID NO: 10285 - DNA, 1628 bp, Eucalyptus grandis
  Intron number 1 from transcript Egrandis_v1_0.009195m (loc us Egrandis_v1_0.008080m.g) derived from phytozome v7.0 (c hr-ID scaffold_2; pos 37581441 to 37583068 reverse strand)
tactccttcgctcaggtgggtccttcgcctctccctctgtttttgctcctaccttcgtaaagcgccgtgctctgttgttgttgttgttgttgttgttggggtcactgttgtcgggtcactcgtgcgcgagctggaacgttgttcttttgggctgagatattgattactcgtcggttgatcgatcgttcgaacgttgcacatctcgcgtggcgtcggcagttggctgcggaaatggtgtctgtgtgtgtcattccttcgcgtgttttgtcggtgacggttttgcgtttgatgcggtcctctgtctgtatggtcatttctgtgctctcagagctgtagcatcaatttttttttattttttttatcttttgcttttaattgcttttaattcaatcgcctggtgtttgagtggctgtaggtatctatgtttttgcatagttttctttataaacacatttgaagtacatttttctaaaagtgatgcttttatcacttacaaaaaggaacgaaaggaataatattttcatcgttggcaaaatatttagacatattttaattaaaacattttgtgttgactaattattttaagctatagaagtgatattcattttctatgaaacaaattgagccttaggtacaaaatgtaaggtttttatgatggatgatgaatccgacatatagcttggagattcagtgggactggctcacaaatatgggtaaacactcacacgtgtgttatatattgctgtatgtacaaggtgtcggtagctgtcgtgctggcagtcgagttcattggagtagagccattacaacatgaaaatcgataatcagttttaataattttaagagagttgtcataataaagaacagaagaaggcttgcataggacctgcttctcagtttgtcttcgagcatttgttattgactgcgatatagcagtgtatctcttaagttgatgcgggtgcttacatctcgagggagtggtttaggtttgaatggtgtccactttaaatttaggtctgaatgttgtcttagcagtcatttcttttggcctgatctttattaaattgatgaacatcgacgtttttcattgaggttctggaaagggcaacattcattttagccagcattagcattttgattagttcttttgctggaagatatatggatgctatcataatcagagtcaggagaagagtatgcttcctagtttacatcttaaagtaatctctaagatgatttcagaagatacagctgcagcttttagatggaggttgacattataacttgaaaattacatatttttgttagatgaatctcctgtgtatgtgattgttgtgtggtaaaatagttttttgttcattcggagaaatgtggtggagcaaaacttttattctaagcacttttacatgaaaggttttgcgatttaaaggaaagtaattagaagttttggagtgtcttagctttgggtgtgatcttctgttcctgcttttctgttattacagaagtggagaacaaatccactaaggaagaactatcctgctatgtatatggtcattatgggtcagaatgctgttgcctaattgcttctccactaacttgcttaaatacatgtgcttgttctcagaggg

SEQ ID NO: 10286 - DNA, 5870 bp, Vitis vinifera
  Intron number 2 from transcript GSVIVT01011284001 (locus G SVIVG01011284001) derived from phytozome v7.0 (chr-ID chr1 3; pos 10568508 to 10574377)
gttgagttttgtggcagataattttcttccattaggtagcaatgttacttcgatggtgcaaactttaatcctgtatattcttgagctttcttgctattatatatgtttcatgttctaataataatttactttgtgcttgcgttatttctttgctgcattgtttgtagagccttgacctttgtagggttgctttgaattcatatacatatgtagcattggtccaagtatatagcattggcataagaatactttggtacctgcatatggaacaataaggtgcaagcaacatccagtgaatggtgatgcttttgctcaacgacaccattttgttgagaagtgtgagtgcaaatagtttggtgaattaccatgattagcataaaatgaattcatgattgattttatgtatcccaatgcattggattgaagaacttctaatgagttcacgaaactaaacaaaaatttcatactttaaaaattatattagatagtttagatctactttagaaaaaagtagtgctgttacatgagagtaatcatcaatacatatgacaaaaaaaggaagggaataaatgaaaacttatagtatgcaaaggaccctaattgtccatgtgggctacattaaaagacttagattgatgactatgactatgatttgaaaaagactatgctgaggcttgcccaattgaccaacttctaaagctagacacatggtttgacatagatgattaaaaacaacagatggatgactcaaatgaaatgcccatgaagagacaagaatgggccattcaataccgacgaaagaggttgactaatatctagataattcagcttatttttcttgtgcctcctgttcttgagaccttgaaagaagcatgaaatgggagaaatgttaaaaacaatttaaggttgtagtcaatttacttgtagaaagcaaattggttgaaaaattaggaatataacaacttagtagggtgtagaacacctttcattgactgtgcatgttaaccttgatattctagcttgagagtttttttagagtttattttaatttcatgtgttatattaagagtaatttcatttattagttgatagtggtattattgtattcttacttaagaatataaataaaaataagaaggtacatggaagtctagttagacaaacttcaatatttctgcactttcctttttctcctgtctaatctcacaagtttttacctcttaactatataactgtttagggaaaagtgtgtttccatatacctatataaaaaaaaactacaaaataggaacccaactttataaaatacaaatttcaagtagctatttaaaataattagcattttatacactttatggtcaaaggtagtacctttgactatttaggtattaccttttaatgatatagatactacctttgactatcctaagtactatctttgatcggtgagtgcatgaaacttgaattatttttagagggttcctattttgtgattatttttacatcagtgtatggaagcacaatttttccaactgtttaagtgttttgtacatgtgacattttgtgcaaactagtattggttagggtcacgtcatgcttggatggtttaagcttaaccaaaacaaaagatactggtttcattaaatttttttaccccacctaggcatggttaggatttggttgaagccttggaaacttgaatttaactaatgcttggcttaatatgtatcattgtatatatttttatgacatatgaccatatttttaatataagatgtttagatttgttgttgtttttttattttttttattttttggaggttaaaaaattgaaaattttttcaattgttacaaattacctataacactatgaagttaggtgatgattgaaagtttggtgtcatggaaggtgttgggttaggttaaggtttgctccaaggtgggtggaggtcctaaggacaaaaggctctagcaatcataaagaatgaaaaatatcttacccggctcaactactaattggtgaatatttaggggacgattagtttgtggttggatgtttggtactgggttgggtggaggtcctaaggacaaaaggctctagcaatcataaagaatgaaaatatcttccccgactcaactactaattggtgaatatttagtggatgactactttgtggttgaatgtttggtatggggagtatgtgctcaagaactaatttctaggtctttctccttgctaatttatgggaatgctttgggtaatggtctgctctctctcgtgtagatagtgtccactctataccaatggattctcaagactttaaaatgaatttacatggttaaaagaatttcctacatatatagtaccataaactttttctcttatatgtgggatgtcacaattaccccccaatgcagacacgatgtccacatgattggggggctaaacaaatagacactctttgttgggccaaacaaagacattaggcatagggattgactttgatataatttataatgacttgctgcctcttgtctagatattgtccccttcggccctgaagactttaaaatgcatctcctatatctgatatggaatatcactctttgattatagattactagtgcttaaaaggaggttaagggaattggaacatgagattctttagtcctttcaaaggtcaagagttaaagtgaaaagtaatcttcatggccatcacccataaatataagatcaaggaggataggggggacttttttttttcttggaattacttcaataaaggttgttttttagcgaaacctttctttaagttggtcttctctagcactaactctctttttccatcttctttagtgtgagggtttgtgctcattctacgatgggcttctttctttgggaagcaatttgaggcaagatcctcaccattgattggatgatatatcaaggtatccttattcattgtgaggtggcttattccttgtagataaagccacttttgtgagatctctctatcatggttcaaagaatcgactaagattggtacatcttgcttgactcatatttgtctcgtccattgccatgatgagtttgagacataagtagagtatcatgcaattcaagcttaacttggtcacgacttggatctgaatcatgattagccaaatcatgagacaacttggagttgtggcaccatgacctggatccaatgtaaatggaagaaagaaaattagataatcttaacatttctcatagatttcctacatcaatcaagaaaaaatgcctccatctatgagtaggaataataaattgaaaatgatttatttttgagcaatcgttgacttgttataattcacatttctttttattattttcatttttattttcatgatatatatcaattatcaaaatttggtattgggtgtaaaaatgggtggtaatgttttatgagttttcaattcctaatactatcataaacaattcaaatgaatgcttttataactatttagataatgtgaaatgtgatgtgtgtttttgttattaatttgttgagtccatctaattgtaattatttttctatttctttttttttagaaatttagagttttttaattagcatattgtgtgtattacccaataacaatctttataaagtagaggaggaattggttgatcatgtcttgcttcattgtgctaaaatgagaatataaatggcacttattattctcattgtttaaagtagagtgggtgatgcccgctatggttggtgaaacgttaccaagttggtatgggacttttacagggaagaagtgcatgaaggtgtgaagggcaactcttttatgcttattttggatcatctggaaggaggcgaatcattgaggcagagtcattgtctacgaagaataatcagttcattctctcaaaaatgccttttcatgctttccctagctttgggcaagaaagtcctttagaggcgcctctatgtctattctagattttattgattggttgtgctcttattgatgtaagaggggtatcttttatcaatctctccatctaaatgtccctttttgacatctctgtatgctccctatgtattttggtgtgcccactattgattaggcactattaataatacttttgcttgtcaaaaaaaaaaaaaaaaacacaatttaatatgttgagaccaatttacttcttagtgggccggcctcttgtactaacaaatttaaaggatgtcctttaaatgtcatttagctcagttggcttgtggtacgtacaccactagggttgggccaccattaagagtagccaagctgtcttttcaattgtatagcggagttttttagtggtttagatcaggtttgtatatttgtggaaggattcctcgtccctctcatgaaatctctatatgatattaatacaattcttgtttctagtaaaaaaaaaaatgttaagaccaattcgccttgtaacttgttgagtcgacaattgatattgcaacttttaaccatgctttttggtgaattgacatgacacctttgtttcctaaacgaagaggaaggaatggaagaatgcaaaaccctatgcatatctagcatacttagatgaagtgaaattgagacattttttgaaccaatggagagttttaagttaagattaaatgactttggcatgaagtctgttcctatggtcagggaattccttaggaaaaagaagcctgtcctttatgggttgcattaataggttattgttagcttaggatcttgtttgaggtttttttccatttttaatttgttttttacatgtgtttcttgtatggttaacttgtatcagagctcctttttgacacttaataatatattttttgcacctgttaaaaaatataactacaaagctacctgattcatacctaatctgagcaatccgataagttggttcatcaggagttcatcttatccaacataggacttggaaaaactttcaacctaaggtgaggttgggttgtgatttggttgatctccaacctgatagccctgcgttgtggccttactattattgagataatatcgccgaaaaaatattcaaagaatctaaagttataaattaaacaatttttggagttcaatttcttttagttgttaaatagtttaattgaatttactacttagtcttgaagtgatgacaaagcttttcagtttaaaatactttaaaccttcaacggttatgtttcaacactaaagtttaagtacttaatctttaattctaccaaacatcattgagaaaagaatgatggaaagtgaatcaagagtcattgtccctggattttaaattcttcctatatatttatatagacaagagttactgttttatggagactataattaaatggtgtatttgtgagatttatggataaataccaattgagggctagatggggaaattaaggagagatggttccatcatatactgcatggacctacctgcaccaaaagaaattatatggttctggttgaaggtgctaaaaagagaaaagggagggtaaacataatatggttgagtctgtgcatgtgattcaacatttgatatcgatcttgatgtagtttaaggtgcagttggatttgtatagctcacttcatttatcggggataaggttttgttgaattgattttaaaatacattttttttcttgtttaaaaacaaaatgaagttcatgttgtttaacctttgtctgcaatttttcccctggaacctttgtctttattgttaattagaatttattttattatttatttatttatttttttgttgttgtgcaaaactgcatgcatcagctctagtcagtggagtggcattgggtcttgcaaat

SEQ ID NO: 10287 - DNA, 26849 bp, Vitis vinifera
  Intron number 3 from transcript GSVIVT01021220001 (locus G SVIVG01021220001) derived from phytozome v7.0 (chr-ID chr1 0; pos 2679908 to 2706756)
caggtgggttgaactagtatctctcttaataaaatgtttattgtttcttcgtaccatgtttttgcattttatgggtactatagcaaagttgattacttctagttgcttttgagtcgtataacagattccttccaacacatcattgtataacagattccttccaacacatcattgtataacagattccttccaacacatctatggtgccttagttgatcaaacagaaaaacaataagaaaatgatgagacaaataaacaaaatttggaggaaaaaagattagatggcatataaattcattgttgaaagtttagatcttgcttcactaggggcagcccaaatatcaaatgtttaaattttatttgtttcttgattgaatatattcaattaataagacaaaaaacagtaaatcccacaagagacatactataaatgtagaacctcctataaagtctctcaaaagtttgtagatataaaaacaacgagtcaatccaccataggacaaatgaactaattatgaaagaacgagtacatagttttaccagcaccaaactctaccttttcctaagatcttacactgactagcacctacacttgtctttagtttcacgacgctcttcacttctgtgatgcagctcccatgtactctttagtgaacaactcaacgtcttgaggggacacaatcaatcaccgtgtttgagtgctttccaagaatgtcacaccctaactttcaaattcatgaattaacacaaaatgacaaggatctaactcatggttttgaaattggagatggactgtaaactcataagctattaaatgtccataattttttaaaacttttagatcttgtgatagcttttaatatgaatgaaccaaacataaaataatgattaattggtttggaaccttttaactcacatgtccactggaactttaacatacatctctagcatgcccattataatgataatatcataaattttcaatgctaatgcaaaataaattcaacacacatgctcatcaaaataaagttcccaagtaggtctctatagtgggtaacccaatttttatatatatatatatatatatatatatatatatatatatatatatatatatatattccaattcatacaaatatctagggttaaatcatagaatggacattacatcaaacaacacgtatgtgagtttcttatgtgtcaacttcttcttcctagttatacctacaaaacattgcattataggggaataagctcacagctcaataggttttaagtgcaataatcaacaaatatcatcatgcaataatcaaagatgcaagtcagcatgtccatgcttatcatgctccattaccatcatgagataatcacattaacaatgttcatgcataacatgcttcatgcttgttacctcccttaattggttgagaacttgtagaatcctatgtaaagatatccttgtcttttcaaactcccaattaaaggatattgttccatgtcttaggctataagcgtctgtgtgtgaccaatgctaatgtgaacctaatagaaggccacatataagagataacaactcccatattaatgtgtgatgtttttaggactctaacctaaggataaatcttatacattgtcttttgggacttacaatccaagggcaaacccagctctgcctttagagactacaatctaggggcatgaccaacctcatacacctgcatcaaagtattttcctcaaggatttagggattttcacctaaggacctgttgagagagagagagagaggagaaaaaccttattcattcattgtaatctctacttacaattgagagatatatatatacaaggctaggagtcctaactaccatacatgtgacctatattaacaaggaaagatagtatactatacatacattatattcaacactccccctcaagctggagcatatacgtcatatgcaccaagcttgttacaaatatatttaatcctaggacctctgagagatttagtgaagatgtctgctagttgatcatttgaattgacaaaacttgtagcaacacatcctgatgcgatcttctctctaatgaaatgacagtcaacttcaatatgcttggtcctttcatgaaagactggattggatgcaatatgtaatgcggcctggttatcacagatgagtttcatctgttcatcctttccaaatctcaactcctgaagaagatgtctcaaccatatgagttcacatgttgccaaagccatagctcgatactcggcttcagcgctagatctggccactacatcttgtttcttactcttccaagatattagattacctccaataaaaacacagtaccctgaagtggaacgtctatctgtgggtgagccagcccaatctgcatctgtgtaaccaacaacttgagtatgacctctgttctcgtacaatacaccttggcctggtgtacttttgatatatcgaaggatacggattacggcatcccaatggctatcacatggtgactgtaggaattgactaacaacactcacaggaaaagaaatgtctggacgagtaatggtgagatagttcaatttacctacgagccgtcgatatctcccggggtctcctaaaggctccccctgtcctggtgcaagtttgacattcggatccataggtgtgtctaccggtttgcagtctaacataccggtttcttccaggatgtctaaagcatacttcctttgggaaaggaccacaccagaactagattgagctatctcaattcccaagaaatacttgagtttccccaagtctttggtctgaaagtgggtaaaaagatgttgctttagtttttgaataccatcctgatcactgcctgtaatgacgatgtcgtccacataaacaaccagataaatacactgccccaaggagttatgatgataaaaaactgaatggtctgctgtactgcgaagcatgccaaactcttgaacaacagaactaaaacggctaaaccatgctcgaggagattgtttcaagccatatagagaacggcgtaacctgcacactaaaccagactccccctgagcaacaaaaccaggaggttgctccatataaacttcctcggcaagatcaccatgaaggaaggcatttttaatatccaactgataaagaggccaagaacacatagcagccatggagagaagcaagcggacagaagcaatcttggcaacaggagagaatgtgtcaccataatcagaaccataaacttgagtatagcctttagcaactaaacgggccttaaggcgatcaacctgaccatcaggaccaaccttaactgcatagacccaacgacaaccaactgtagatttaccagagggtaaaacaacaagatcccaagtgccattagagtgcagagcagccatttcatccaccattgcctgtcgccagcctggatgggaaagagcttcatgggtgctctttggaagagaaacagaggatatagcagaaacaaaagcagaatagggtgaagataatcgatgataactcaaaaaattgtaaataggatgaggattacgagtagagcgagtacctttccgaacagcaataggtaagtcattaggagaaggcagagccggggcaggtgaagccgaagggataggaagtgagtcagcaggtgcctcaggaaaagggagaggagcaacgacacgagggcgacgatgataaacctgaagtggtcgagggggcataacatcaggtggggagacaatgggaatgggcaagacttcagaaacaggaagagactcagaagtggtggaaaagaatggtgagtcctcaaagaaggtgacatcagcggagataaagtaccgatgagtctcaagggaataacaacgataacccttctgaagtttggaatatcccaagaagaggcacttcatggctttggcggaaagcttgtcctgtccaggagtgagaatatgaacaaagcaagtacaaccaaagacacgaggaggaaggaaataaagtggttggtcagggaaaagaagggagtgaggaatctgatcgtgtaagacagaggagggcatacgattaatcaaataacaagcggtaagaacagcgtccccccaaaagcgaaaaggaacatgactatggaggaggagagtacgagctgtctcaacaagatgtcgattcttgcgttcagctaccccattttgttgaggagtatgagcacaagaagactgatgaagaatcccatgatgagacataaacgaagtaaattgggctgaaaaatattccctggcattgtcactgcgtaacacacgaatagaaatattgaactgggtttggatttcagtataaaatttctggaaaatagagaataactcagctcgattcttcattaaaaataaccaagtacatcgagaatagtcatcaatgaaagtgacaaaatactgaaatcctaaagtagacgcagtccgacaaggaccccaaacatcagtgtggacaagctcaaaaggagactttgcccgattattcaaacgctttgggaacgagacacgagtatgtttcccaagctgacatgactcacacggaagcgacgacaaagttgaaaaacgaggaaccatcttctggaacttggagagactagggtggcctagacgattgtgaatgaggagaggagcatcagtggaaatgcaaactgcaggagatgaatctgaggtgaggtgatagaggccttgagactcacgtcctatgccaatcgtcttccccgtactccggtcctgcaaggtcacaaatttatcagaaaaggtaatagagcaattaagagtacgagtgattttgctgatggaaataagattaaaaggacattcaggagtataaaggacagaagtgagaggtagagaaggcagaggaagggccaaaccaatacctttagccacagtttgagaaccattagctaaggtaacagtaggtaaatcagaggtagtagtaatagaggagaaaagatccttattaccagataggtgatcagatgctccagaatctagaatccagggtccaagagaagatgtgtgggtaaggcaggcagaggcattaccaggctgggcaacagaggcaatagaagcctgagatgtctgagatgcggaggagctcggaggctgagacagcggagaatcagaggactgggccatatgggcagtgcgaggaggtcttccatgtaactgatagcaacgatcgcgagtgtggccaagtttattgcaataggtgcaatgaggacgttggcctctacctcgggtaccactgcgtcctcctcgagaggtagtttgagaaactaacatagaagaatctgaagcgctatcagatgacaaagtctgagtggacgagatacggaggaggcgagcaaacacatcatccaaggacggaactgatgaactaccaagaatctgatcacgaataggctcaagatccggacggaggccaataagagtaaggaccatgaagaacttgtcaagctgtgtttgttgagccccaacatcaggagtaagaggcatcacagtcaagaactgctccttaagagaggcaatctgaccaatataagtagatagatccaagtcctgttggctgagatggacaatagcagaagccaccttataaagacgctggatatcattcgtatataatcctttggcctgagtccaaaatttaaaacaagttttataggcctgaagatgaagaagaatccggggatcaaccgattgccataatacactacacaactgtgcatctatcttcctccactgtacgcggtcaacctcagggatatctgcctcctgggtaaccaaatgatcctcatatccttgacccataaaccaaagttcaacagaggcagaccaggagagataattctcactgccaaccaatttctctgaggtaatcagaggagatccagagagaacagacgtaaagatctgatttttggtgggcatattcacgtatttggatcgaagagagccctaagatgggttcagatttcggcggagagagaaaaacagtgaaaccacggctgtgagaggtgcaatcaatggagaaaaaaggtcgtgacgtgcctggagaggaagagaagcagcacccaagcctcggggatggagggggagccctgtcggaggtggccggaatggcaagaaggccaaaaccagggaaaaaatggagatgcagggctcggggaggactgccggagggctagaaggccaagacggcgccggacgagcctggagaggtgtcggaagtggccggaaaatgggccacgcgccgtcacgcgccggcgcgtgggtgacaggccggaggagaagggaggcgcgtgggggcgcgtgagatgccggttgccggtggggtttccactggcgtgtagatcagcctccggcggttcggaatatgtggtcgtttcccggaaaaaaggtcgccggaaaatgtcgccggaaaaggttgccggcgtgatggagatccgacggcgatgaggttgtccggggtggttcggaaagagagtgaggggaccggagtgaaaacacggtcacgggacggttcgccggaattgagtacacgactaaaccgaaaaaaaaaattaggttttctcctttggctctgataccatgttgagagagagagagagaggagaaaaaccttattcattcattgtaatctctacttacaattgagagatatatatatacaaggctaggagtcctaactaccatacatgtgacctatattaacaaggaaagatagtatactatacatacattatattcaacaggacccaaggccccacatatcataacatctaagaatcattgtcagaataataccaaaatgtcaaccttgggagtattatcttacttgccaatcaattcaagatagtgcaccatagacaacaatctttgagttattaatccatcaactttatatatatatatatatatcatgttttctccttttcgttaagatgacaaaatatatgtatgaatgtgtttatatgcaagaattcaccatgttttagtatgataaatagcatattagattaccaagcattatatgatatttacaagacaatccacgttcaattctcgttattcaatataagtatttttcattatttccatgtcaataaataccatacaaggccgtgatcattttcttaaatcattctagttccttaaccatgtatgtgagtcaatcttggtgatactaatatcttactcaacatgttccacatgtttttctgctaataaaagtgagatacaaggatacacttctctttactacatagttaatcaacaacatttcaataataatgaaaaattattagtttaatcatccttgcaattcaaaccattagatactccaattttgaagttttaagctctattaaatgcataaaatttaaggtgattatatgccacataatatttgagtcaaacacgaaggtgggtaaccaaattgtttaaatcatgttcttaacctcacttaacatttctcacaaattaacccatattttatgctaaaacttggttttgcattgacaccctcactcaaccacacatataccaataggtgcttaataagtatattttcaaatatggctgatcatttgtcaatctgaacttaaaatatgcacaaaaagtaattgatttcatccaattatacttgaatttctaccctttataaatctattttacaatagggcccaaccgttcaatgattaaccatatattttagtttctaacatgcagttaaactaaccaaaataacttgcttaataataagttaaaattaattccccattgcacatcccgcatgtttttcctatctctaaaaacttaagaattctgaatactaagaatgtgataacaagtcttatttgtgtatacgtttcatctctgaatggaattccaaaatcaaactccacaactaaagaacagaaactaaaatttgaataaatttaatacatcaaatctctatttcaagagcttcaaaataaatacctactaattcatggaatcaaatcaaaatttcaagcaaacgatataaataacctaccttatccaaatttcaacatgaaatatcatttcctttccttttctttgcattttcttccttttaaccatgcttataatgtaaaagaatggaacctaatgaaccaactcaattgagtttatcaaaaccaatctttaattgcttcaaattgattttagaagaaaaattgttgattatgtgctccaaaggaccacttggaacataacttttgtgaaaactcttaacttctttttttcccccttatctccctcattttctctctagtttcagctatctttagcagctcttttgggctgaaaatgaggcccaacaaccccttaaatagagttagagagaaagcatgaggtggcaaggtctagggtagccatgaagctaggcttttctatttataacttggtatcccaattttcactaatataattttccaaatctcaattcagccattcaatttatcttaatcgcaactagagtcctcgttccttaatccatgatattaagaagctaattaattgcaattaaccctaaacaaagtataattgataattaatcataactagtcttaagctaggattagccttaaactaatcaatctataatcaaacacaattaaattcgatgaaacatttacttttcaatattaatgggcgttacactaatccataagtttaaggcattaaattctaacctacctgaaatacatctaaatctaactttcatgtttcttatagccaactaggaattaatatgcaaaattaaggagccacaataaagagcatccaaatattttaacaatcctcctcgagctagttcaaggatgtcttccaatcctagctttcttgttgtaaacttagatataggcctagcaacaccttcggtgaagagatttgtcgcatgcctcttagttgaaacaaagggttgtgcaaatttgttctatataaatatttttttggataaaatgttagtcaattttaatgtgctttgtcatgacccaaattccaggcgatcgagaatttggcccatgaccataggtcaaaggtttgactctaaaggttcttcctaatccaaggtggcagtaaaccaaaatgctataatttttatttttttgctttaaacataaatcacactagagctccctccaactaacattccaatttatcaatataccaaccattactcaagagcaacaagaaaattcaataacaataagatctacaactcaagtctaaaatgaaagtctacagtatgagcaaatctaatccaaaataatacgattacataatttaacaatccactagaacatgttttcaaataaccaaacacaacaaaatatgacaagtcctctaagttgctccaaaatcccctagggtatcttgaagcccttcctatcccatctttggattctcaggagtcacatctgcatctaaaaaaaatataaggggtgagcattccacattactcagtagggtgccttacacccaagggggttaatttgtgattaccaaggttcaagtgtacacaaaataaacattccaccataatttaatcaacctaaacatttcagtttccataattataatagttcaacaattttcaataattagtaaaatgcatgtggatatgtaatagacaattatgcaatacattgtcgttcttaggctttcaccgaaggatacgcgtctatattcaaatacactctccattcgaagtcttcccggggtaaatttttgagtctttcaccctagggatctcatttccttcttaatttgcctctcatgggcctttacttttcatcatcattttattattatttttttttcatttcatgcaacctttcaacaatttttttatttttccttcacacaaccatgatgcatatggaatacaataaaattacatatcattatccacgaatatccaagaaaattctcattaacccaaatatcaataaaacacaatttatatcataatttttatttattcccaataattccaataatttttaacaaccaaacacaatcattttccacaattaaattatcaaaaacatcctaataaattctcaataatcccattatcaatcaaacataatttctaccataattttatttattctcaataatcccaataatttttaataaccaaacacaatcattttccacaattaaattaccaaaaaatcccaataaattctcaataatcccaatatcaatcaaacataatttctaccataattttatttatcctcaataatcccaataatttttaataaccaaacacaatcattttccataattaaattatctcattatcacaaaaattcaaaagaaatttcctaaatcatccaataaaatttctcaattcacaaatctctaagttggattttggcttggtttgaggcagcctctagtctaagaataaacctagctaaaagcgaagtaattccggttgggaaggttgaagacattgacgaattggcaatggagttagggtgtagagtggggtttcttcctactgtctatttggggctgcctcttggagccaaccataaggcctcgtctatgtgggatggggtggaagaaagaatgagaagaaggttagccctttggaaaagacaatatttgtcaaagggcgggagaattaccctcattaaaagtactttggccagcattcctatttaccaattgtctctctttcgaatgcccaagctagtagcaaaaaggcttgaaaaattacaaagggactttctttggggagggggaagcttggaaaggaaaatccatttaatcaattgggaggtggtgtgcactcaaaaggagaaggggggtctaggcattcggaagattgatctcttgaacaaggccttgttgggcaaatggatttggagatttgcctttgaaaaataaatcctttggaagaaggtgatcggggtgaagtatggtcatgagggttttggttggcgaactattgaagcacgtggatcgtttggaatgggggtttggaaggagattttgaagaaggcgaactggtgttgggatagcatagggttcaaggtgggagaggggaccaaggtcaatttctggactgatcagtggtgtggtaatgaggcactgtcccaaacttttccccagctatttgccttagcggtccataggaacgctacggtcaatgaagtgtgggattcaagccttggtcaaggaggttggaacattagactctccagagattctaatgattgggaattggatgctataggagagctgtttcatatgctgagggacttgaggatttcttcaaaagaggactcagtgatatggaaagaagggagtcatggttcttttcggattagggatgcttataagctgctggcagctcctagtgccatcaccttcccgaaaaagagcatttgggtggataaggttccaaccaaagttgctttttttgcttgggaggctacgtgggagaagatcctaactttggataggctccaaagacggggttgacaccttcctaatcgatgctttttgtgtggttgtgaagacgaaaatgtaaatcatattcttttacattgtatagtggtcagggtcctctgggagatcgtccttgccttgtttagggctcattgggtgttcccaaagacagtcaaagaggtgttacttagttggaggggcccctttgtggggaaaaagaggaaaaagatttggaactccatcccgttgtgtattttttggacggtgtggaaggaaagaaatagattagcttttagggggggctttttaactatacagaaattgaaaaattcttttgtatgtaatttgtggagttgggctagggtgtatatgggagaggagtcctcttcgcttttaggttttttggaatggcttgcggttccttaagggtgggtgaggttttttgttcatgtgttttttgtttttaggctactatgtatacttcctgtatgctttgtgtcttttcacccttcattatatttgtgctcatttataaaaaaaaaaaaaaaaaaaactcctaataaaaaaatctataatttttttttcaagaaaaagacatttaattaaagttttaggattaaaactccttaccacaaatctaatggtccattcgttgaaaatggaatccgatattgtacaaatgttcttcgtgttaagtagagtgttaccttaaaatttcacatgaaacaaatgtcgtttggccattgaaatggtagactgaaaaacagagaccgaaaaacaacggtgttgtctactcccagtcacaaagaacgcctcccatttcttctacttttttttttctttcccactttctaattcttttatctttttcaccctttttcatttctaattgagtaagccactaaatgtggtggccaacccaacccaaatatattatatatatttattatattattaatttagttttttttttcttcaattcaattctttttcttttcttaattcatttttttttctttcattttttttttcattttttttaactacacttcactaataaattgtcaaacaccaatacaaatattttaattttctttaattaaactagttaattaaaaattaaattaaattaattaataatcaatttaagaaaattaaaatatttttattggtgtttgagaatttattagtgaagtgtagttgaaaaaaaaaaagaaaaaaaatgaaacaaatgaattaagaaaagaaaaataattgaattgaagagaaaaaaaaactaaattaataatataataaatatatataatatatttgggttaggctggccaccacatttagtgatttacttaattagaaaaaaaaaagggtgaagaagagaaaagaattagaaagtgggaaagaaaaaaaaaagtaacaaaaaaaggaggcattctcgatgactgggagtggacaacactactgcttttcaaccggccatttcgatagccaacgacgcccatttcgtgtgagatttcaagggaacactttactcaatatgaagaacatttgtacggtatcggatttcgttttcaacggttgcattgttagatctgtggtagggggttttaaccctaaaactttaattaaatgccattttcttgaaaaaaaattatagattttgttgttaggagttaaatcagtagtatttgtgaattgagaaattttattgggtgatttaggaattttctttggaatttttgtgataagaaaataatttaattgtggaaaatgattatgtttggttattaaaaattattgggattattgagaataaataaaattatggtaaaaattatgtttgattgatattgggattattgagaatttattgagattttttggtaatttaattgtggaaaatgattgtgtttggttattaaaaattattgggattattgagaataaataaaattatggtagaaattatgcttgattgatatttgaattattgagaatttattgggatgtttttagtaatttaattgtggaaaatgattgtgtttggttattaaaaattattgggattattgagaataaataaaattatggtagaaattatgtttgattgatatcgggattattgagaatttattgggatgtttttggtaatttaattatgaaaaatgattgtgtttggttattaaaaattattggtattattgagaataaataaaattatggtagaaattatgtttgattgatattgaaattattgagaatttattgggatgctttttataatttaattgtggaaaatgattgtgtttggttattaaaaaatattggaattattgggaataaataaaattatgatataaattgtgttttattgatatttgggttaatgagaattttcttggatatttgtggatgatgatatgtaatttcattgcattccatatgcatcatggttgtgtgaaggaaaaataaaaaaattgttgaaaggtttcatgaaatgaaaaaagaaagaataataaaatgatgatgaaaagtaaaggcccgttagagacaaattaagaaggtagtgagatctctaaggtgaaaagacccaaaaatttatcccgggaagactccaaatgggtatggatgcgtatcctttagtgaaagcccgagaacgacagtgcattgtattactatgtgttacatatccacatgcattttattaattgttgaattgttataattatagaaactgaaatgtttgggttgattaaattatggtggaatgtttattttgtgtacacttgaaccttagtaatcctaaattaacccccttgggtgtaagacaccctattgagcaatgtggaatgatcaccctttccttatattttttttagatgtagatgtgactcctgaggatccacagattggacagggaaggcttcaggatgcccaaggggattttggagcaacttagaggacttgtcatattttgttgtgtttggttatttgaaaacatgttctagtggattgttaaattatataatcgtatatggacttattttggattagatttgctcatactatggactttcaatttagacttgagttggagatcttattgttattgaattttcttgttgttcttgagtagtggttgatatattgataaattggaatgttagttggagggagctctagtgtgatttatgtttagagaaaaaaaaaaaatcagaatgttttggttgactgccagtttggattaggaggaacccttagggtcaaaccttcaacctagggtcatgggccaaattctaggttactcgaaatttgggtcgtgacaacgtggtattagagccaaggttgcaataatgccttggggtcagtgtttgtgtgtattgttatgtttatgatttgctgtatataattagttaatgagttgattattaattaatttatttaattgcttattcttcatgtttgaaaaatcttgctatggtgcttgctaatgatagtaagaagtgttatggtgttaattatgttgaattatgtattatgattgtatgaaaatgaaagtttttaatagttattgaagaatttctgaactcctttattgatatttaatcggtacacaccatacacatatatatacacaaatgactaaataagaaaaaatcaatctagcttaattctctcctaaaattaggaaactaaatcataaggaaatatcctaaatgatctctccttttttattcctaaattaaagtcctaactttggcattatttcaacactccccctcaagctggagaatatatatcatataatcccagcttgcaagttaagtcttcgaagttaggcctaggtaaagctttggtgaggatgtctgcggtttggtgcttggtaagaacatagttcaatttgaccgtctcactagtcacattctctgtgataaagtgtctgtcaatctcaacatgcttggtcctgtcatgatgcacggggttctttgctatgcttatagctgcctgattatcacacatcatcagaattggagatgaactcgtttgtcccagttcactaagaaccctttttatccaaatcccttcacagattccctgtgcaagagctctgtagtcagcttctgcactacttctggctacaactgattgcttcttactcctccaggtaacaagatttccccagacaaaagaacaatatccggaagtggaccgcctgtcaatgatgtttcctgcccaatccgcatctgagtatacttcagtgtcacggttctctatctttctgaagaataggcctttccctggtgtcatttttaaatatctaagaatcctgtagactgcttccatgtgttcctcagtggggctgtgcatgaattgacttacagcactcactgcaaagccaatatctggccgagtgtgtgagagataaatcaagcgcccgacaagccgctgatatctccccctgtctaccggtgtactttctttctcgataccaagtttcttctgactatccttaggagtatcaattggtttgcatccaagcataccggtctccttaagaagatcgagtatgtattttctttgagagactacgattcccttccttgatctagccacttccataccaaggaaatatttcaaatttccaaggtctttaacttcaaactcttctgacaaatacttcttcaaattctgtaactcccccatatcattcccagatagaataatatcatcgacatagactatcaatatggccaatttcccggcatgagacttcttgacaaatagagtatgatcagcctgaccttgtttgtagcccagcttcaggactgcttttgtgaatctatcaaaccaggctcgaggagattgtttaaggccgtacaaggatttttggagtttgcaaacctgattctttgccatactttcttcgaaaccaggtggtatttccatgtagactttctcttctaggtccccatttagaaacacattttttatgtccagttgttgcaagcaccaatcttgattgacagccaatgagagaaggatcctgatagtgttcagttttgcaacaggagcaaaagtttcctgatagtctatcccataggattgtgtaaaccctctagctaccaaacgagccttgaatctttcgactgatccatctgctttgtattttatggtgaaaatccacttgcaccccacaggcctcttcccaaccggcaaatctgtgatagtccacgtcccattcttctcaagtgcatcaatctcatcttgtactgccttcttccattctgaaatttttaatgcctcttgtattgtgttgggaacctgagtatcatcaagagaagtagcaaatgctctgtaagatggtgataacccttcatacgtaacataattcccaattggatgatctgtacatctcctaacacccttcctcaatgcaattggcaaagtagaatcatcaatgctgggaattaacacctctccagccctatcctcacctatgttctcttcaggaagacttgaattggagtcaatatattggccacatgttgactgtgatccgtgctctaattcctgtcttttcctcctcctgatgtaaacttgtaagttctcattagcaagttgtggggctataggttgaataggcatgggagactggatggtcacgggagaaggaacatttgtgtgctgggctggctgaactgatggcggcatgggtgtggacaactcagtgggcgcgaattgggaaggaattgggaaggatttggtgactctgagtgaaaagaaggtacaccctcaagaaaagactcccaaacttgatgttcattcatgctctccccctgaacatgagatttgggatagaagaagacatgttcaaagaaagagacgtccatggtggtgtaaaatcttttgttggttggagaatagcatttatacccttttttggttggagaataccctagaaaaatgcacttatttgctcgaggagcaaatttgctacgattttgaggatacacatgaacgaatgccgtgcaaccaaatactttgagtggtaaatcagaagaggcggcatgggtgtgaggaaactgttttaagaaaagttgacgtggggattgaaaggtaagcactctggatggcatacggttaatcaaataggtagctgtgagaatagcttccccccagaaatagtttggaacattagaggaaaacataaggcaccgggcaacctccaagagatgtctattcttgcgttcagccaccccattttgttgtggggtgtcaatgcaagaacttatgtggataatgccatgattttgaagataagtactgagactactagtaaagtattcctttgcattatctgacttgaggacttgtattttggaattgaattgattttgaaccataagattgaaggtttgaaaaatgtgcccgacctctgacttttctttcataaggaaaacccatgttacccgagtatgatcatcaacgaatgtcacaaaccatcgagtgccagaaatattttttatccgggagggaccccacacatcactatgtactagagagaaaacagtcgaaggtttgtacggaattcgaggatatactgttcgagtatgctttgcaaactgacaaatttcacagtgataagatgctggatttttattgataaataatttgggaaacaattttgcaaggtaaacaaagctaggatgaccaaggcgatagtgtaacattataatctcactatctttattgaccttagaatttgacacagaattgaaagactctgacatactctgagactgtacgcaacttgcttgagagacttggtttgagaattggccacatgaaaggaggtagagcccggaacacagttcaacactgccaatcatcttccccgatttcaagtcctgaaaaacacacaagtttggatagaatttagtaacacattggagatcatgagccaatttgctaatggacaaaagattacaatccaagtttggaacatggaggacagagtcaagatataagtctttagtaagttttatagaacctgtcccggcaatttttgactttgaaccatcagcaatatggacggatgaatgaccattacttggcttgtaattttgaagaatggcagcatctcctgtcatgtgatcagaagcacctgtgtctactatccacgacctcattcctcctcgattagcagtgaaggctacatcggtagtactgccactgccaacttggcttaataatttctgtagcatctccatctgctctttgttgaatggactcggctcgggaacagatgtgctctcagagttggcagccacgtgtgctctgccatctctgtcaaaccgtggctttggtttccaatcagttggtttgccatgaagcttccagcaagtctccttataatggcctggtttcttacaataatcacaccaaggcctatcccgtttctgacgatctccaccactactattaaatgaccgagcagcaagggcagaggcatccaatgttggggcaggttgctcttttgatcccatcatcactttctttctactttcttcacgcctaacctctgaaaaagcctctctgagacttggcaggggtttaatgcccatgattcggcctctaacatcatccaattccctgtttagtcctaggaagaacttgaacagtctcttttgttccacaatttgcctgtatgttgctgcatcatccgaacattttcatgagtgagtctcaaataagtcaagttgctgccaataccttgtgagtgtgttgtaatactgagtaactgactgctctccttggcggaagtcatgtagagctgattcaacctgaaacagttctgaagtattttcagaacttgagtaagtttctttggctgcatcccatatgtcctttgcagtcccaaacaacaagaaattttcgcctatgtcattgttcatggaattgataagtcatgacatgatcatgctgttttcaatcttccacttcctgaaacccggttctgtagtttctggcatgactgcttctccagtgaggtactcatcctttcctttaccgcaaatgaacagcaacacagattgtgaccactgtaaatagttatggccatttaatttgtgtcctgtgatgagaataggagaggaatcattgccaccaaggtttggaatttcaaatctgccccctgattctggtgacgtgacgctggatacttgtgatgatgccattccgtattttgtcatggaccggaaaggtagaagaacacttcccaaggcacgtgcagggactggagttgagaaaaaatagccggaggacgccggaaaatctgatcagagggcccgcggaagcaaaagaaccccaaaagaggcacgtgcagggctcggattgcacaaacaggtaagaagggtggctggtcggcgtcaggcgagcctggaggaggaagcgcgtcgccggaaaatggctcacgcgccctcacgcgccggcgtgtgagatgcagtcgccggccggaaaaacgcgcttgggcggcacgtggatgggtttctggttccggtgctttgggacaaattggagatctcctccaggcactccttgcggtgtagaaaaaaccgtcgccggaagttcgccggaaaagttcgccggaaaagttgctggcggtgagtgttttctgacgacgattcgactgaccggaaagcgttttctcccttggctctgagaacagggactgatgaccggaatgagagagagagagagatgatcggattgagatatggccagagagatctggccggaatgagtgatggcctgaataagaggtggccagaagggattagggtttcagaaaactggctctgataccatgaagaatttctgaactcctttattgatatttaatcgatacacaccatacacatatatatacacaaatgactgaataagaaaaaatcaatctagcttaattctctcctaaaattaggaaactaaatcataaggaaatatcctaaatgatctctctttttttattcctaaattaaagtcctaactttggcattatttcaacagttattgaagttgctaaattgttatatgtgaatttattttgctcaccttggaagtgtggttggattagggcttgttgggatttgaaatgacgagaaggtcaagaagaggaaggacggaaaaagatgaggaattggaatgttagttagagggagctctagggtgatttatgtttagaaaaaaaataaaattcagagcattttggttgactgcccgcttggattaggaggaatccgtagggtcaaacctttgattcggggtcatgggccaaattcttggttgctcagaatttgggtcgtgacatgcttggtccagtaatgttgaatcgaactgtgaacaatgtaaaaagctgccttgttgtcacaattgatccgcataggttcttcaaggttaatgtacaattcctttaaaaggatcttttgtcataagagttcacgaatcctttaagccattaccttaaactcaaattctgcacttgacctggccaccacagattatttcttgctttgccaagatattggatttcatcttgtgaaagtgcaatatctatatgtagatcttctatccataacaaatccagcctattttgcatcaatgaaggcttccactaaatgatcatttttagagaacattagaccgttctggagagttaccttaaaagtagtgtagaattctttgaactgcatccatgtgatcttttggtgggaagtgcataaattaactaatgatactgttatatttgaaaacgtttggtatcttctttctcaaccgaattcccttttgtattaacactaagcttatctttttatcagtaggagtgtcgatagatttgcatcctagcattcatgttttatttaacagattgaggacatacttccttggtaagacaaaaatccccttttttgatatttcaacttcaataccaagaaagtacctcaaggacaccgaacatagtatgaattctctcagcaaaggactccatatcctagcatcattcttggtaagtattatgtcattaataaaccatgaaaatggtaatttttttgtgagatgcctgcttgatggaaagattatggtcaatggcttggaaggtatccaaacttaagccaggacttagtgaacctgtcaaaccacactcaaggagactgttttagcctataaaagtatcttttcgtcttacacatgttgctgccaccatgactgttcttgaagcctggaggtagattcatgcatacttcttcctcgagatttccatgcaagaatgcatttttaacatctagttgttatagtaatcaattaaaatttattgccaaggttaagaaccctcatgatgttcatctttgcaataggtgcaattgcgttttactaatcatcattctgtcagcttcctcttgtgtctgtcaatggaatcatctgtgttgttcttgatggtaaacactcatttgcacctgtcttcttccttcttggccactttgttccttcttaagtatcatttttatacaaggcctacatctcatcaaaaatgacctcctttcacttagaattttttagagcttcttgtatatttattgggattatttccaaggacaagatagctataaaaactctgtaatttcgggtgagacaatgcaaagaccagacacttaatatgggatgtttagtattggttccaagagaatattaaggtctttaacatggggttgagacatatctaattttggattggatggttgaccatgaaatggagaggggaacttctacttgtcctttgcaagagctttcaacctgtttcactctcttcttgagtggacttgtaggtcggaggctgctggaggggttatgggtacatttttcagttcctacctttttaatattggtttgctagtttcatccttaccctaaatctagtgaataagtggagtaggcactggttcgtgcatccaagttgactgcacttccttgtagagatgctccccatgaagatcagccttattgaaataagcttgatactctcaaaaacttacatccatagaaaggaaccttctccttgttcgagggtgataacatgcatacttgttttgagttggtgaatatctgaagaaaacacatttaatgggtttgggatgaagtctggatctttctctatcatgagcatgagcaggtacaacacaaatccagagagattgttatagggaaagaaatgttttgggcatcaatgggaaattcgaaatcaagaatttttcaaggcattgggttaatgaggtaggttgcagtaaggacatcactccaataatgtttaggtagttttttagaaacaataaggcttggtttctttctaaatctgtctattctttttcttagttactcaattttgttagtgtatcaacagatgaggtttgatgaataattccactcttaagaaaaaagaaccagggactttgctaatgtccattatcagatcttagaacacaaagattggaattttgatcatgttatgaaatttttttaaagtaacagtaacctcatatttattttgagtaggtaaatccaagtaacccgtgtacaatcttcaataaaagtgacaaaccatattaacctaaataacaaaggaaccttctaagaaccccaaacgttactatgtatgtaagaaaaaaggaatttcagatctcttactactggaaggaaagaaacatgagattttttgcaagagcaaatctttcacatctgaattttgaaagatctgtagaacataacttggaatacaaaatactgagagatgaaaactttcaatgtccatgtctaagttgaagcaacgaaatctattactctttcttttgaattccaccaagaatagcctgaacaacttttccctcctttggttctgggcatacaatccctctctctccttagcattgccaatcatccttctcatggttaagtcttgaaaaacacatcgatcaagtgaaaaagtgacctaactgtttagggattttgttatcttgctaatagataacaagttacatgataacctaggaacatgaagcatagaagggagttaaagagggttcaagagtaatttttccttcagcactgagcactgactgggtcaatgactgacctgccacctgaactttcttctttgtacaattttgataagaataatttggattcattagtcatgttgtctctggctacagaatcagtgatctatggacctacagttaaactttttgaaactgattgaaactaaaaggccgatcagatattacctaattgtgcaaaggcacaagaggatgaagggagtgcttaagcatttgtacaagagctacaaatgatctttggtaaatagagactgatttgaagttgaggtggggttgtttttctcctcagaatctttaagctccatggaagcaccttcataattccatttttgtctgaatttaggctttccctgtagcttctaacatctatccctagcatgcctagtttattacagtaatcacacagtaaggtctctgtttcattatttgcccttggtacccgcttgtgtgattctagtggaggcttatcttgaacaggttttggtgctggactctttggcacagatgaccccatcataaaagcatttcttttctcttcacctaacacccgagcacacactttggagatgggagagtgtcccttacaagaatttgaccccttgatatgatccaattttgggttctatccggccccaaatttcaaaatcaaaccaacctagatcagttcttaaagttaaaccaaagacttaaccgtctactactgagcctaaataaaatagatgttggcatattaaatctattttcacaacgatgatttataattttaattcactaataacttaaataaaatgcttgaactaaccagtccgctggcaggaagtgggactagacatattacttagtcctaaagtgaatcaactatggaaatatgacagagtccagaggataggcccatatggtagcctatttatatgctaattttgttgccaagaggttaaggagtctatatggagaagatggagaggaacgatttttccatcattgtttatgtcctatttttgcaagtccacatgggccaatcattgcatactatgtgtctaatttatgacttgtaagctccatcttgacatgatcaatgataaaaatttgcatgtttagtgtcacatattcaagacaactccccagtcccctttaataagacacttgatgtgccttgcttcgggcgatgcatggacaagtccatgctcacaagtctccctacacatctgatatgtcatagaaatttgagcatggatatgcatctttaaatacatccccaagttacccaaattcccatggaacatggatcccacccatagtggatgccaagggggtctctcttacttttcctcttagtgaaggtgacactatgttcacatgagagggatataggtgggaggggatgtttccaccattgatacaatactgatgctaaaacacctacttgagtcggaagtttggcttatgaggtccaaaatggtggtggagttggcctttcctaccaccaagcaccttgggactggtctgatggtcttggtttggtgactagacttggaggctcgttgaggtggaattgacatatatcaattttgcttctgctaaaatgagagggaggattgtatatctatgacaagtgtcatctctacaggtttcacgcatccttgaataattaatgtgagatttactattttggagcattatgaaaaggctccactttctgccaaacaaaacaagaaagcaattcctgccctcctggactctcattgatcccattgccgttctccccaatcccctctcgcctcttgctttgctccactctgctctcaaactcttgatacttcattgtcccttgtggctgacctcctacaagtaagaacctaacttaaaccactcattaatgtgggaaagattccctttgtcataaaaacagcaaatcagccaccaggtctgccacacttttaaagcaaaaagcataggttcaatttcagttgctgcagtttaccagattccttgcttattgaactaaactcattcaattccatcaattcaaaagaacagccagccagaaattgaacaagaccaaccatgttttgggttgggccaagtgaactctatgagatggaatttgtttttctatttgaactttgaacaggtctggatttgtctaccattagaataaaactcaatccaaaaatgtcattcagacattagatttctcataaaaaattgtttatttttttatttttttattttttttatggtttttattcagacacaatgtttaaaaataagacttaaaaacaatactaaaacatttgaagtctgtcaagacttcagacaaaaaagacaagcgaggacttaatcatatgctagagctactcattaggactgccagttacatggtagaaaattaaacagcccaacagcttactgggctctagttactgagcataaccaaatctgccaggaaaaaacactaaatggatctagtctctgtctgaacacttagtttgattaaatactaggttgtttccaaggcacctagatgtccaaatcttgtgcccaatagatctttatatggtctccattggttagaatgaacttgctgtcaagttgttgtgttgttattgttcctctctctctctctctctttctctctccccctccctccctccctctccctctctccagttcatcacggaacacatgcagattttgcacataatgtttattttataatagttgtcatgtcttccacagaatgcaacagggtccacagaacaatcttattattcttgagcttcttgtaattatcagtaggaaattccttttccaaatacattcatattagatatgtcctcaaaaagttttttaactttatgtgcattggctactttatttatttattttgcagtgctcacctgtgaatttcattatgcatcatgagtactagccatggtgatggtttaaaatgctctgctcttttagctgacgtgaactgattgagcattgacaaacagtcacaactccaaataatgagatggaatgtgtaaaagagattctgccaccacctacattagtctcacatgccttcaaattttatatggagtacgtggaactcctaactggatatagttctctgacaagttttaggggtttg

SEQ ID NO: 10288 - DNA, 9130 bp, Vitis vinifera
  Intron number 2 from transcript GSVIVT01024453001 (locus G SVIVG01024453001) derived from phytozome v7.0 (chr-ID chr1 6; pos 2750843 to 2759972 reverse strand)
tggacattagcactaatctgctttgtcgtttcctggtaattctcaactatggcatggtgaaattcttattcaaatttgattctttagatgtaagccttttgaaaaagtaaaataaggaggtcaaatatgagtatatatcactttcatcatctgacatatatcctgccttttgactagcccgaatggtaaattgttgcagctgggaactattgatgataatcatcatctggagccagtccaaacaaagaacttatttggctatccttattctcctccccttttccataagaatacacacatgcacacatgctagtggtagtattttgccaaatccgaattttcctccttgaaaattatttgccatcattataggtgataaaaatgcattgaggcttgaaaatagacctgttatgcaacaggagtaagatgtgcatccttcttcccctggttttgtggactaacatttaatagcccgtttattcttaaactatctccagctctgtctctcaatgcatgtgtgtgtttcttttttttctattgggtcaaaaaatgaatttcaaccttgctgaaccttgctgaactagggtgtttattgaacttgctaaggacccttattcatgttactctaactaggatggctttcaaatttaggatttttgaagactgagagcactctgtaaccctaaatccttgtttgagtggtcctaggattggggttgccaactactctcttttagagtttgtttattgtttagggaatggttatgcagttgtgggatctcctctttgtattgtttcacttttgcctcaggcgtgttttgaaggattttgtgccccatttttgtttggtgccttttaatattcagccatccaattgtcccataaaccagtacttctcaatcattgttttggtttctgtaagtcattagtttgatttggagcaactaactgggtttgattggtaagaccttctgttttctttgatcgcgttctcccatttaccttaccacaatacaaggcacatgaggccatccagcagtgcaaattggtataagaagagctctcacctactgcttatggattgtagaattgaattatggtttaaagtcatagtatcggtcattgactcgaagggttccaaggcacatcaatctcagcttgtgttaggtgatattgaaaataagattgttaagaagttcaaaaaattataaaaatattataaaaatattataaaaataatttaaaaaataatataattaaataagcttaacaaactaataaactaataaacttaaaaatatattagcataataatgaatggaatggtttcaatatattattaacaataaattagcatataaaatgatacaccatatatggtaccattatcatataaaataatacattacctaaatcgaagcagtttatgccataccttagcatataaaataataattttcaaattcccaattccaaaaaccattagcatataaggcaaattgatgcccttcataacacacatgagcatttcaagccacaaatcattcttatataaaaaatgcatttaccctttttctttagattcccgatcccaaacaccattaacccacacgaacagagagagggtacccagtttgctgaggtagagagcatcctctatagcgttcacccacaccacaccaatgacattacagagatggagcaaagaggggcaacaccaacatgtggcaattgccatcaatgaaagaatttgatgtttctcatcaatcaggtgatcaccacaatgacatcctcggcatgaaggatgtcttctttcttctttcttcttcatcatgggttcatgggtcttgaaaaatttttccttttgaagagaatctgtactttttctaagatttctcagtttttgttgctctttgttgttatttgaaagggaaaaaaattatttctgggtttaattggagaatatttcgatttctcagcgatcaactcggaatctcgattgagtcaaccgattcttggccgagtctgtatttaaggtggtattggatatcggactcagtagggaaaggtatagtgcatatacgactcagctgagtccagtatggctctaccgatactttgaaccttgttatggagctgaacattgtatcaggaaaaaaccaatggtacttggatttggctatgggtgtgaagtgtgagtgtgtatctaggtgtttgatccttcacatcctcaaattttaggatttagagactcaaataaaaaatgatctcaaatggtttttggataagccataattaagggaaataatcaattaaaagtaaaaaaattaacatatcctttgtttaaaaaaagatctctttcttttctgttttatactttcaaaataatgaatatctgaagcacaatatgagtatttgaacaaggatccccgcatccacactcgatactgttgttatgttgtgttgacatgaatatggtggtgaagttgaagagtctgggtacacaagaaaaaacaaacaatcacatcttgtgtatgtacattaactctggtttgttaggcaccctttaatctattatttgtctatcaaaaagatttggtgaaaacggtcctagatcatgaagtcccagaagactgagaggaagtggaaccatccatgtggagtaattgctccagtttgattgggaaaactagcaaatgaaatagttctaccatcagtctctgtgaagctttggacatgaactttcagattacattcaaatagtacctgtgctaataatggtccttccataggtttctttgtagaataggataaaatatgggtcattctggtcctgttcaagacctgaggagtcatttcttcacttagatgtgctgagacaacactgccatttctggaatactgagatagtgctttgaacttgttatcatgcctcaaaagttgttcatgggagcttccaagtcttcataaaaccctcttcaaatttcttacccaagcttgtgtggaagcttgtaccatgtactatatatctttttcgattgtaactagtggattcctattatgctgtagcaaataccttgtatgtaactggaataaaatcatttaatgaagaaacaatttacaaggaaatttactatgcaaaatagttgaaaagagggcaaataagggaagaggagtagcaggagatatatacaacaaaatgcttaatggtggtagaaatctgaagtgctatcaatcttggctagagatgccagccatgtaattgatgggttctgggatctagtttgctgaacccaattaatcttattatcacaatcaccttgtaatgtgatgtggagtagctctcaagatttgcagtaagttctgttccttgtttataagaataaattcttttcatcattatcatcaccgatcacatctcctgcctatgttgagtgtgcaaaacaaataattcttcatcagtccaacctattaaaaactttcttctagcatcattcgtctttgaatatgtttgaatgttctaatctgtgctcttattcagtagtcattttaggcctgttattaggtttactgatgggcatgtgcaattccagtgttgtcttttgttgtccttatgcctatcaaaaaaatcttttgccttgccatttactagtgcaattcgttcttatcgtagctgcacttagtttatgtacgtgatgttttcttagtgttaacgtcacagttcacaaaattaattttttctttaagtgattgaaatacgtggtccagtccaaccctggtttagtatagttggtttcaaatggtcatgcgacatgtcaccatggcatgtatgcttagggctccactctccaatttatagtttgtcattctcctccactcttttatggatgattgtggtttgtctcctccactctattttgaaatttcatttttcttgtttggttagttttatgtattaaattactaaattttaaggattttcttcatgcttgtaacttgtgtttacccaccctttagtctctttggctagggggtgtcatctgtgcataattctaagtaacatagtacggggtttaatacatccataaccaacaagacaagctaaatcctcaaagtttcttgagttaataatgttgtgactggaagctcttctgtttcgtttgaacccatatttatgctagacacaactatagagtacatcaaacatgacctttgtgacatcaactatctgctaggtatggctggcaggctggaggcatttgtgtatctgcaaactcttttcaataacagtataatttactaggatcttgtaaaaattgtatatgagagtcaggagctacttagccagtcttagcaagtatcactgatcaatgcctactgatagaaaaataggtattggttgcttcgttttcttcacctgatgctttttaaatcaagtggccttacaacttggtatcctacatccattaggtgatagccgcaattttggttccttttatcatctttgctttagcgatctaatatgcttctgtggaacagcttagaatctttatttttctaggttctgaagtagattttgattgattttttaaagtggtgacatcaatttaaatatttggcatttttctagccatccagaagttttaccttggcaggtgtatatctatgttcatttaaagtttaacctttagaaatcaacaatctaggggctgcttgcccatatagaaaaatcaaaatttctgacttgcttagcaatatggcagtcttaagaattatggtgatcgaagtctgcacaatgaccttcaatgtttatgcaccttaatagttttgttgtgttcttgaatgggacaattctcctacttctagaaaattacaagtctctaagcttctggttccatcattgaagactgtccagctttgagtatagcacttctcaatggagtaaccatcatagattttttttttccttcattggctttattattgttgcttcactccttgtcaggtttttttgatagataagaagcaattgtattgaaaggtaccaaaaaagtttaccaatatacacatgatgtatgcaacaaccagcaaaaagcacaaaaaaaaggagaaaaacaaaaaaaaaatacttcctccctcaagctgaacccgaccaatcaatgaaataaaaaaaggacatcaatctattgcctataaacaacttgatacaaactacacagaaatatgactttctgcctatgcttagagagctcctcattctcaaacgttcttctatttctttccttccatattatccaaaaaaggcataaaggagcagttccccaaacttttatccgcttcctccccacaaaagagccttgccaacctaacaaagtgtctctgaaggaggagtgaatcacccatgagataccaaaaagagagaacaaaagctgccgcaacgctcttgctttgttataatgcaggaggatgtggtcaattgactcttcatgagtgtgacatcgaaagcatctattggctaaagaccaacctctccattgtaaccgatcaagagtcaaagcttttccccaagttgcctcccaaacaaagaaaactcgccttaggtggaacccaagcattccacacaatactagatgggaacaacttagatctcccctcctccaagttagaggaaagagacctaatagagaaagttccattctttacctccaaccagcacaccttgtcttctctttgggtttatttacaccaatatatgggactctactaaacataatagtgagttagagtttctcactttgtttccttggtaaaattttatccaaggatagcatgactttttaatagaatattattttcagctttctaatattttctaggtatttcataaaagagagggagagccagttgcttgtcgtacttgcattttcaatttgactaggtatttgaaaatgtggaaggtgtgtttcaaactaagtgtgattctcatggaatcatggaatatgtaggattagatatttgcttgagattgccaaaccctaatgcttcatacaagtattgcaaggtattatgtggatattactctcaccacatgctattttattaaattgatcttgccttgattatttcttaagggtctaatcttgtatttgcaatatccgatgccattctttgagttggctagtagtgtgtaattttttgcaggttttcactcagcatatgataagttagttcattttgcaaacttaggtcctgtttggtaactgttttttaaaatagttttttttcctagaacagaaaaatagaaaagcacatttgggaactagaaaacataaaataattttctgttcttaaaaacagagaacaagagttttcaaagaatatgaagaatgattaaaattaaaacactacatattaaagttatttttaaacatatctaaaaatatagaaaacaggttatgaacatttttttgttcctaaatggacatttgttctataaaacattagagaattgttttcaaaaactatttttcagaacaatttttgaaaacacttcccaaatagagcctaatatattttttaataagatccttcttgtcattgttatcttgttatttggtttctttttaggtacatccttcttttcttgacatggtagttttctagacattagtgtgcttaaatttttttttctacagttcatacgcccattgctaaccggttccacatatcaccatggaactaccttaagtagtgtcacatccagcctcagaaagatcaatctacctacctgtccaatcctgtacttagtgcttatctaggatttgcgactcccacttataatattcacatttccgaatgaaaaaacacttagtgccacatcatgcatttgaaaagattgggtcacatttatccccacatccccacatgttcttctttggcttgtcccttgtttttcatttctctgcctcagttttatacctaatcatttgtccttttcctgctagaatgattgatgtaagacaaatgaaagtccaatgccctatattggctaattaccaacgttggctgggccttatatgtggagctgcccctacctcccattagtgtaggcttttgggagtgcatgtggcctcccatcatttggtatcaaagcatggtttagcctagctcaccctatgcttgctgacacgggtgtcaacaattgaatgagggtgtctgaggtaggatggacaaaaggccaatatcccacatcggttggttactaatgttggttgaaccttatatgttgagttacctttacttcccattagcttaggcttttgggagtatgtctgatcccacatcaaggatgcaatagatgaagagatgaaagcacttcataagaatgttacctgatatcttactccacctcttggaaaataggcagtgggatgacttggtttatgctattaagtactatactaatactgatggttccattaaatgattaagggcttgatggtagctggggatatatcatccaacatttggaattgattacttgaagacttctcatagcggtccatcttactttgtgacagttatttatcacttgcagttattaaatgtggcctctttttttcacttgatatcaacaatccttttctccatgttgatctttagaaggagatccacttcttggtatgttgctcaaggagagtcacttgaagtcacttaaggtgtgtctaccaaagaatttggtctctgggcagaaacaacctctcagagcatggttttgataagtttagtaccgtcagttctgagtacgcataaagcaaaatatggtaattccatatttttggaaagaagtgttgtagttattactagaagttagatagagggtctgagtaactttgagtttgacctggttaagcatcttcatactaaagatttaggtcattcatgggaatagaggtgacaaggtctaagaagataatttcttcctcacagtgtttgtgactgcccagcaaggagagaagagtaaagtggggtgctaaaccagtcaaaatgcacatacatccaaatatgaggtttgatattctgccaggtgaattgcttaatgacccagtaagatattggattcttgtgaagttgctatacttgactgtgttttgagttttgactacatattatctttgcaggaaatattgttagtttaggcattgtatgtcatatccagaggttttgtgtttagaccatagagtcatctcaatgttgtggggttttttttgtctttttattttttttccataatttaaaattttggatagagaatatttccatatatatagactgcttgctagatatacaccttattggtaaacttgcttggcccaagtaatggtgcacagggactgttgggaaatagtcaattacccttgaggtggatgttaataatgtgactgggtattttgatattgagggcataaatcatgtaaatgtaccacacaatggctcttggccaatatttgggaccagctaacaattttgagaaactttggctgaagagttgcactaatttaatgcatgctttctatttgactgtatgattctgtctctccaagcagattcaaatgccaatgattaccatttgtgctaatcatgactaaaattgattgttcaacatggttggtagtagagcctcatttggtgagaggtcatgtgttttgagtctcaccttataatatttatttccctaatttattaagcctaggtgtaagcccaaaagaggctgattgtaatcgtttaccagtgagtttgcgtcccttcacatgcaggtatggggtccacgggtttgtgtctctccatgtgggtagggaacggcatgtgagggagggtgttagggtgcatgacatatattctggcccaaatctataaacttaagcttttaggaaaatcagttattcaacaacttcaaacagttgaatgaatcgtgtttatggcattctatattgatgacctcccactcttaacttctttatgtaaataacttggttatcttttttgttttttcattttggttgataatgcatctgttaaccccccatctcatgcaggttcacatttgtcatagcattccttctgttgctga

SEQ ID NO: 10289 - DNA, 6360 bp, Vitis vinifera
  Intron number 3 from transcript GSVIVT01031545001 (locus G SVIVG01031545001) derived from phytozome v7.0 (chr-ID chr6 ; pos 17309566 to 17315925 reverse strand)
gcgattgaggtatttagtatatgcattcaagttcttgtcattttattgatccttggtttgaatttttttttttatggatttcgttttggtctagatggttttttggttatgtggctatgatttatgataattagtctcaccagttttgcaattatcatttttccttctctttttgtttttttgaaagtgtttatataagaggaagaacaagaaaggattaggtataattgttcccttgattgattagaaaaatttacaggggtattaatacacactgtactacttaaaaggaaataatcaaagagtatgatacagccatgtgagccctggattcactccttaatctgctatgtattaaaaaaaatacaaaagattctggatagattttgggacataattaggtgctaagaatctgctttaattctaactcttccccataagctggtgtgaagatgtcatgcattcccaacttgctaactatggagtcaaacattgttcttgagattccttttgtgaaaatgtctgctaactgatgtttggttgtcacaaaagatgtggaaatttgtctactcttaattttttccttgatgaagtgcctatccacctcaatatgtttggtgtgatcatgttgaattggattatgcgcattgttgattgttgctttattgtcacaatagatcttcataggctctaatttaaatgcattgactagaattttagtccacaaaaatttactggaattcagcttcagcattagatcgtgctacaagcagatatgtcttacttcctcatgcaacaaaattgcctcccacaaaagtacaatattccaatgttggtcttctatccataagaaacacaaacccagtttgcatcaatataggcttctacttggagatggccattcttaaaaaacagaagtcccttggagtagcttttaaatatcttagaatttacggaactgcatccatgtggcattccaatggtgactgcataaactgacttaccatacttactacatgggctgtattaggcctggtatgggataaaatagaacaattttccatccaacctttgaccttcttttgtcaataggattctcttctatgatggaccctaatttatggttggggttaatgtgtgtgtccgctggtttgcagactgtattccggtttcttttagttaagttttgcacatattttcattgagacaccataatattgttgtttgaccttgctacctccattccaagaaagtatcttagattccccaagtcctttatctcgaattctttggctaagcaattcttcatgcctttgatttacccacattagcatttgtgacaatgatttcatctacatagataataaacacagtaattttcatacgtggtgagtgtttcaagaataaagtatgattcgcttgactttgaaagtattcataggcgcgtagaaactcaacaaatctttcaaatgaggctctcaaggattgtttcagtccatatagtgatttatttgatttacacacttttctattgtgaaaagggtcctcaaaaccaggtgaaaaaaccatgtacaccttttcccctaattttccatgtcaaaaaagcatttttatcatcaattgatgtaatgactagtctagattaattgccaatgacaataggacttttatgaaattcatttttgcaatgggggaaatgtttcttaatagtcaaaaccatcagtttgggtatatcccttcacaaccaaccttactttatacatctcaatggacctatcaaccctgtatttgatagtgaacactcaattgcaacccactgttttctttcctcttggtagtttaattagttaatcatgttttgtttttatgtaaagctctcatctcctcaaatatagcttccttccaccttgaatcttttagaggcctcgtatacattgttgggaatagagatagaggttaatttagtagtgacagcttaaaagttggaattaagacaatgaaatgacacaaaatttgaaaagatgatgtttttaacgtcttataacactcttcctaatagcagtagggatatcaagaacggtatcaagaaaaggtttagaagaaggaagagtaataaaattacttgtttccaggtttgaagattggccatgagaaagagatggccttcctctgtttccttcttgagtaaaccagtgaacttgacacattttcaaccctttccaactttgcgttgccctccttgttgttttcttgattcctggtatctctttggttgctaggctgatcaggaacactagtaggaacacttgaaacagcatttggtattggatagacgagactcaactaacatggggagtgggacagatcttttacatcacttgttttctctccttgaagatcagtcttacaaaaatatgaaagttcttcaaagaatttgatgtccatgggtacaaattttttcttggtaggaggatgagaacatttcaatcccttttgagtaggagaataacctagaaaaattgcacctaagagctctaggatcaagtttagatctttgtatactcgggagatgaacaagggctaaacatccaaagaccttaataggaagggatccaaatatgttgacattaagagacaaggtttttaggacctgaattgaaagagtacttcaataacatcttggggattcattttcttgaaaatgggattataaacctttcctcatgtacaaatacaccccaagaaaatgaagtggttgagagcaaaaataggcatttgttagtagttgctagggctttaatgtttacccatagtgtcctaaagatttattggaatgatgttgtctaaactgctgcctatttaataaaccgcatgccttctaagacccttaatctgaaacttcaattaaaatgaggcaattttgaacttatctttgagaagataaatccaagtcgtgcaagtacaaccatcattgaaacttatgaaccatttaaagctgaaataagaactaacttgagatggaccccacacatcactgtaaacaatggaaaaaggaatctttgattttttttattactcactagaaatggaacacaatgacttttggataattcacaaatttcaaactggaactcggcatttcaagactagaaaaaattgtataaaggaaacaaaagttggatgacctaaccatattgcaatagctagattttcttctctttattcttcaatgcttgggtaacatgaacttgagggtttttcttcactttactacttaggagatataacctgatttctcttcaccattgccaatcctcttccttatagctaggtcctaaaaaacatagtgagtaggagaggaagttatagaacaatttaatgcatttgtaactttactgatagagtaaaaaaatggatataggaacttaacctttaccatgagtggaaataaaggagccattggcaagctttaccttgtcttttcttggacatggattataggttaagaaaacatgtgaatcactagtcatttgatttgatttgatttgatttttgctttttttaataggcaaataagaaaatataatagaagcacccaagatgaggtgtgctaaagtatatacaatgtaatatgcacctaaaggctaacctaggaaagagggggaaaaaactccctatccttacttaaggttcaaccaatctacaaagtctatcatagacattacgtggtcctttatactttaagccattcctaaaaaataggtataaaataagaattgattgtttggtcctgttcgactccattaaaaaacctcctatttctttccatccataaatttaaaacaagtgcccttcaagctttcttttgtttattccccacaaatgagtcatgtcaacacaacaagtttcctttaattgtagaatgcatcatccaaaccaccccaaatagagagtaaatcaactggttcttcatcacctttgcacatgtaatatctatttggaaaaatctatcctctccttttgagctgatctagcatcaggagtcttccccatgctacttcctaagcaaataagcctacatttgtacagatccaaggattccacagtatgattgcgaggaaaggtctctacctcccttagctaaggaggtgtatagggatttaatagtgaacttactgcacttagtctccttccagctcagtttatcttcctcatcctttttaagcgacaaagaatgcaattcccttaaaaagagcacttcctcaagttcccaattattgaattgtcttgcgaaacagggactccatctaccctcctccctgaccagcccccacacctctgcttcccaatcatgtttggtagttgctataaagaataacattgaggactcttcaaaggataagtcattgcaccatctatctttccaaaattttaccctcctgtcattctcaacaatgaaacaagacctactttttacaaccttccattcatttctgattgcctttcacgcttccacccaatagttttcccacacgctcccaccattcccaacaatgaaacaagacctgtattttatgacctcccactcatttttgatagctttccacaccctcaccccattgctgtcccgcacaccctataaacaccatccccttccccttctccaaacttttctattataaccaatttccataagaactctctttttgttgcaaacgtccaactccaattttcgagtaaagccttgtttgaattgaagagattatgaatagcacgatccccatcctttttttccaaacaagcaacagaccacttacccaatcatgtgatttgttgcctttgaatcaatgatctatagatattacttgattaagtgaaagtacatgaatggttagaacttccggtttatcccaacattttgtacaaggcctccaactgatttttggtgaatggtgcatcatctgaatgctaagtagtaccacctgtaggttcagagttctgagtggttacacttttctaagctttcttgtagtgttgcttgtttcctttgtcactaagaggaggttttccatgcagcttccaacacatttctctagtatgtctcggtttgtagcattaataacacaagtgagtgtctttttctttatttttcttcattcctagcttaaactgatcagtagaattgtggcttatggggctctcctgaatagttttgagtgctgaattcttttgcggattcaatttcgtcatcacaatcctatggttctcttcactatgcatatagttcttgtatggaaggaagaggttctttaccgagtatatgatccctaacttgatcaaactctggattgagtccaacaaggaattcaaaaactcgatcttgtccaacatcccagccagctttgctgcttccacagaaagtgttgataaagttcaaactcttgccacagggctttcatagtgctgtaattggcggtcacagtgagttccctctatttggtgtcatggatgtcatcttcaactcaaaaattcaagcaacatttcccttctttgaatacgattgggataccacatcccaaacttccttggccgaagagaggaatagaaatggtttactaatttctggtcgcatagagttaatcaaccatgatataatcatggaatttgagcatcccatgattcaaaggaaggattaaaaaccttttggttccttaatagtaccaagcaaatatcctattttcccttttacaaaagagttttgttgacagcaaccactcaaggaagttttaaccatttagtttttcagaagtaatttgtagagatggattttcataatggatgattgattttggccgagggatgttccagcagtagtttttgacagacttctgccattggtaaagaactaggcagaaagacaagaaaaagtggctataaattccaaacttgttacaaaagaccaaagaagaattttgcaggatgagatcagcgatgaaggccaaataaaaacaccaggaaagcaaattattggattctttcctgctctggtaccatatgagtggaagagcaagaaaagattatgaatacttcttcccttgattgattagaaaaatttacaggggtattaatacacattgtacagcttaaaaggaaataatcaaagagtataatacaactatgcattcagagaatcactccataatctgctacctaaaaaaatacaaaagatttctttaaattattaactaaaccatcttatatgaatctagacagattctaggacacaattagatactaagaatctgctttaattctaacagtttaatgtgatttatatcaggggaaaccaagcctacacaa

SEQ ID NO: 10290 - DNA, 7914 bp, Vitis vinifera
  Intron number 16 from transcript GSVIVT01036006001 (locus GSVIVG01036006001) derived from phytozome v7.0 (chr-ID chr 4; pos 7088750 to 7096663)
gagtttattgttagattaatcatgcctgcattcacggattataaagaatcaatctattataaggcagagaagattattcaatttttaaagaacaggaatctttccttgttcttttgactgttgtggtagtagaagctttataccactctgttgtgcaataatataaaacataaagcaagttcacatacaaagagacacaaagtttaatgtggttaggtaatgcctacattcacagattatagagaatcaatcattataacaaaggcaatattacagggaaaagagaaaacaaatacaatacctaagccttgaaacaatctatgtttccttcctgttagtatgtacacacttaacttcagccttgctttaccatatgtttctcaactgtgccaaaaggaattatctagcaattagctgttaaactgacagaaatttgagactctttggaaacagatagagaatgggatgttaataaattaaagttacttgttttatatgactgttctttgaatacaagaaatgggagaaagcatgctgggaatgagttttctgaaaacaaaatcaaactcggggaagaaatatcacttttatttgaatttcttttttgtaatatactaagttatattatcaagtcattagatgtttgcaaacttttagaggatttcctatcttttacaatctatttaattctaatcttgcttcattttctgtttaaacacataaaatgtgctgccacagtttctttatgggtaaatgccctttgattggcatatgtatgtaatatacttatgtaagaatgtagttaaaaaattacctacctaaaataggtggcatttgcaccatgtgatgctttacaaaattatttattttcatttttgtcccaaacaattttctcatcttagaaatcatttatttgcttgaaaagtgtggatgcctcacaaacttaaaagtcctcttagttagttgaattttttgtccataacttcgaaacagtatcatggtcaacatatcatgatattattattgttgttgacctgatgtggttgttatctcttgaatgagcacttaaaataaaaaaaaataatggctaagatcttgctatgtttgaaagcagtaagaattatcaaataattaacatttaattctccaagtacttggataaaccccataatagtgtgtgacctaaaaattttctcaaatgaattgtaaattaatcaatttggaatactttaagttttttttagtacagtggcccatattcataggcataacagaacttcctgcaaataaaagccatttaaaaatcgcctgaaccagactactcggtggactcaaaatgcacttctataaaattggaaggcatttacttcctataaccaatagatatctgatatcataaatgtattaatagtaacttttgaaggacttattggaatggtaacaaactcagagtttatcaggagaaaaaagaaagtatcagtttagaaaccttatttactccatgtaagccatccttagtaagacctgtgctaccttattttttatgataagtaaagagttatcctacaaaaaaaaaaaaaaaagaaagaaagaaagaaagaaagatagatcaaagtccttgtaatggcaacttgcaaccaaaaagaatcaaaagagccaaaaccttgaggaggttgagaaagtttgtgaataaggatccattccataacctccatttctccatgaaaagacactcttagccgagaggagctttaacttcaacaaagtcatcttggcctcttcatttttcctattcctttcttttgaactattatgaaacatatattgcaaaagtcagaatacttttaacaaagtcatcttgacctcttcatttttcctattcctttctttacaactattctgaaacatatcatgtaggagtaaagatatttatggaatcttcctgaatgcacaatttccaacttctaactcaagaatccaaaccctgggatagcccagtggagtgtaaagagagtgagaattccaaagcaacttggtcattaagactacgctttccatagcttctatcacattcatgcacatgatgggtcatttggttcgctaagaggagaaaattttaaaatgctctcttttgtttctatgtatcaggggagaaaccaagaggaatggggaaattaggtaagggaactccgatccaccaaaactatcctctcagaagtcaacagtgaggcattttggagtggaaacttaaataggctatggagtacaatatattttgttaggataggcaataatttgttggaataggcattttttttttaaaattagctgtatatttacagctgtattattcccattgatgccttctgcaatgtataggatgttaggatatttttcctagtttagagctctataggtcaactagtgtattctatatatcttgtgatgtttttttctaagtaatagatcagttttttataactctttcacaagtctacatggcatcatagccatttaggctcttggatttacaggcagccttcattattgttctattttaggtggagttaatagccaccattttgtgtcctatttcatagccttcatcgtcgttatccttttcatttatttctcagttcacagcctttagtcttactgtgaaatctccttctcattcatttcctactgtcatattccccttcaaccatgtttgaaacacctaagcccatcaacaccacttcagtagtagcttctctcagcgccttgaaaatcctaccattcaaatcgccacgtcaaaactaaatggcagcaactttatggagtggtctaatccgtaaaaacttctctgagaagcaaagagaaattcaaatatgttattaggacaaaaagaccaccatttgaaagtgatccttagtatgagatttgagaggcagaaaacttaatggtaatgtcttggctactacactccatgcaacgtaagattagtaagacatatctacttcttcccatggctaaagacatttgttaataagtcctattccaaggttggtttgacctcctaagtttttcagatcaagtggcagattatgactaccaagtaagggacttccaagtgtcatggaatactataactctctcaaagggttattgatggagttagatctctaccaaaacatggagatgaaatctactgttgattcaaagaagatgagggacatgttggaaatagaatgagtctttccatttttgttgggacttaatcctgaattagatcaaacatgtgaaagaatactaggaaaagacctttttcctgattttaatgaagctttttcacacatttgtggggaggaaagctgcaaagaattgatgggcaacaaaactgaaaattgtgaaagtctcacaacagaaaattctgctctagcaatgatcaaacaaaaccaaattgtaagtgacaacaagaaactagtggacacagataaaatgtggtgtgactattgcaacaaatcaagacacacaagagccatgtgttggaagctacatggaaagcctcaaaaccagaaacaaattggcaacaaaggaggaaatcaacctactagattaggacaaggcaatcacacaaccattgttaaagaaaaattagcacagatgggatttaataaatctgatattgagaggctgaaacaattgttgaacgagttggagaattctaatgcaaactcctcatcatattcaggttcgtgttccatggctcaatcgggttgttatttttaggatcatttggggaagacgattgggcatggtaagctaaaagatggactgtactacttggagaccattgcagaagtggaggtaaagagtctcaatgcctagtttcagcccacaaaactggtttggaccaaatcgttctttggcataaccgtttaggacacccccctccctttacctttgttaaaaaggttgttttctctcatttgagaaaataaatattagcaagttccattgtgaatcatgtactcttgctaaacatcattgcttgagattttcaataaaagagattcaatttgtttccccattcagtttaatttgtttagatgtttggggcctatcccgtgttaaccaatatttctagtgctcattattatttttatagacaattgcactaggaccaccagggtttatctcatgaagttagagtctaaagtgctcttaattttttctgtatttcacaaatttgttaacactcaatttggagccaaaattcaaacagacaaagaatatttcaattaggaattgatgaattacttgagcaatgaaggcattctacatcaatcaacatgtgttgatacctcacaacagaatggaatgactaaaagaaaaaacagacatcttttagaggcagctcgtgctttcttattccaaatgaaagtgttgaaacactactgaggtgatgctatactaatagttgcatacctgatcaatagaatgccaacaaaagtcctagaaaaccaagcactagtgaagaaactcatgacactatttcccaacttttaaggagtagtcgctttaccaccaaaggtcttcagatgcgtatcctattttcatatccatggccaattacgtggaaagttggatcctagagttgtgaagattgtgttcttagggtactcccccacaaagaaaggctacaagtgctatcaccctcctacgaagaagcattatatcactatggatgtgacttttgtaaagaatcaacaataccttaataacacctatctttagggggagaatatatcaagattggaagataggtgggattcggatgtggaaaaagaattgaaagaaggaacaaatatcattgctgctgaaaagaatgatgtagttgctgctgaaattattgctgaaatgaatgatatagtggctaaaattgtagataaagatgatgggaatagaatggtcgtccatccaagttggagagataatcccagaaatccttcctataatcaatcaaatagtgtttcaccaacaatacctgctgaaacttcttctaatgctctgacaaatgatgaaaccatggcggagagacctaagactccaattttcaatgtgtaccccaggaagaaaagatccatcattacttctccaactccaattgtcaaccttgaaataagtaatgaaaataacgataaacttttacctttatactcctctcacaagttgtctcaacaaatacccacaattgttcaagaagccttaaactcaaaaccatggaaagatgccatgaatgaggaggtaatagtatcgaaaaaaaaccagacttaggagattgttgatttagtagaaggaaacacacccatggattgaaaatggatcttcaccatgaagtacaaatctgatggattaaaggaaagatgcaaggcaatacttattgtcaaatggtacactcaaacttatggtatagatcaccacgagacatttgcactagtggcaaagatgaataccatttctttggttgtcattaaggattgatctctatatcaatttgatgtgaagaatgcattccttcatggagatttagaagaagaggtttatatggagataccactaggatgcgagaagagaggacaaaaaaacaaggtatgtagattgaaaaaatccctcaatggactaaaacaatcacctagagcatggtttgggagatttaccaagtctatgcttgatagaggctattcccaaagtcaaggtgatcacaccttattcataaaactatcctcaattgggagagttactatcttaattgtgtatgtggatgatattattgtgactggtgatgacaatgaggagatgttaggattgaaggtctatttggtaaaaaaatttgaaattaaagaccttggaagtttaagatattttctagaaattgaagtagtcagatctcaacaaaaattttttatctcccaataaaagtacactcaagatctccttcaagaaacaggtatggctagttgcaaacctattgatactccaatagaggctaatcaccagttaggagaaaaataagagaaggaagaaccaactgatcgaggtatttattagagaatgggtgggaagcttatttacctatcacacacaagatcgaatataacttatgttgtaagtgtggtaagtcagtttatgcatgctcctcttaggccacatcttgaagctatttacagaattgttagatacttgaaaggaactctagggaaacaactcttgtttcagaaaggtgacgagtttaagttagaagcttatacaaatgttgattggactggttctatgacagacaaaagatcgattgtggggtattgcaccttcttaggagggaatttggtcacttagagaagcaagaaacaatcggtgatggcttgttctagtgcataggcagagtttatggcaatgacgcaagggatatgcgaattgctttggctgaagataataccctcagatttgaaagtgaaagtgaagagtccaatgatgctttattgcgacaataaaacaactataaatataacatataatccagttcaacatgacatgaccaaatatgtggaaattgaaaggcatttttataaaagaaaatcttgactatagacaagtttgtactccatatgtttcaccctccaaccagcttgcaaatgtgctcacaaaaggattgtccaatgaaaactttcaacagataattaacaagcatggaatgcgaaatatctttgcatcaacttaagggggagtgttagaatagacaataatttgttggaataagcattttttttctgtaaattagttgtatatttagagttgtattattcccattgatgtgttttgctactataggatattaggatatttttcctagtttagagctctataggtcaactagtgtattctatatatcttgtaattttttttttctaagtagcagatcagtttttaaataactctttcacaagtctacatattttataggtgtaagtatttttggaagcgcagggcccatcctttctaaaaatcagtcaaaaggaattctggaaaatataaaatgtgattatggttaatagtaaagaaatacataaataaataacaatgatcttaaagaacttgaatgatttggccatttcctaatgcatgaagtgagataaaatgaggatttaatcatactggaggacaagcagtagaattaaaatatatgttcttttgttgcttgatgtgcatgccgaattatgtcaactcaatgttccttttcaaggaaaatttttgaactgatgctttggctttgttactttaactggatgctgcttagcaccacaacttttaggcatttctaccactaacatgactttctactctctaaactcatctaaattcttcacttccaagtcatcaattattatttgtttgccagcataacttgatgatcatggacttttgatcctgtccatcgcatattatgcttggtttgttaagtcagacaacactcttgagtaggctatgctctagaatcttggagtgtgacatatatgtatcatgagccagttcatgtttatatttttcgacagcatgcatttgtttgtttttatttatttattagttttcaattttcattgaggtagtttgccaacttccaatctaatttggtatagaatattgtggaaattgctggggaacctcctaaatttcttagatattaaaccgtgcgtatgacatgcaaataggataggttgtagtaaaattttcataaattaagtgcttttgaatggtatatagataaaaggtggctgtggccactcacactttgggccaagcagtttctgcacagaaacataagctgagattattaattatataagtcacaaactgttgcttgcaattttacaggta

SEQ ID NO: 10291 - DNA, 14464 bp, Vitis vinifera
  Intron number 5 from transcript GSVIVT01036598001 (locus G SVIVG01036598001) derived from phytozome v7.0 (chr-ID chr1 3; pos 18971083 to 18985546)
ttcaaagaaggttggtttctgcaaactatttatgtttcatattctttacctttggccttcctgtagttctcgtgaataatgaaatgtgagaattttttcttgtacttgtatattattatttatgtttcatattctttacatttggcttccctatagttctagtaaataatgcctatagttctagtgaataatgaatatgagaactttttcttgttcttatattttattattattatgttttgaggtggatgaaaggtttagattactattattgtttaataattttttaattacatctatggtgaaaaaaaaaatcaatatgatttacgtgattgtgccactgaggttctgtcttgtatgtattatacgagacacagtctagatacaattgtagttgagtatccctattaggtactcatcaacctaataattttaagaaataaagtatgaaaggatggatatgaaaggatggattagctttatgattaaccatattttattcttttattaattgttcatcttatcgatatttgattaaattgtgtgttgttggaataatgtctctaagggggtggcgggaagatggcattttgctggggatctttactataggtacccagagcttcctttcatgattccttccatattgggtaaaagtagattggaaatactcacagttcttattcaatgggataaattgcttgttcagtttttctatttggtgagtcgatatcattatcacatgatcagcaaattagctaaccgtgttaagcaaacaagcaattgactttttttctattgggtaaaagtaaattggaaaatacacattgttctctaaaaaggaacatcttatcagttgggacctagtgtgtaggcctaaagagtttggcagtttagagtttgagaagatttctttgaggagtcaggctttattagggaagtggctatggaggtttcctaaggaaagttttgccttttagcattaggttattttaagtatatatgtgacacatcctaatgggcgagacactaatattatagttagatggtcacatcaatgcctttggaagaccattgcatatatcttccagttttattctgtacacactcaacttgtaaagggtgatgagactagaattcgcttttgggaagacatgtgatggaggaatcaacctttgtatttatagtttccaagactttatagagttgccccagagagaaacctctccattttaactatctttggttatattgccttttttttattggaatcttatttttcattgcaacctttttaattgggaaattgaggatctccaaagattgctgacttctcttattcgtgtacacttgtttccatttgttctagatgcgaaagcatggacactttcctctttatgtttatttttagtaaaatcgtttctgttagccttatccaatttttcaaattcagtttccttccatctagcccatttcttgtggaaatcaaaagtcccttcgagttcaagaccttcatttggttaatggtattcaaaaaggtaaatacaaatgacatgctatagttgagaagattttacaaagctcttagtcccgagtggtgcaccttatgtaggagtggagagacaactaaccatctatttctacattgcccgtttatttcgggtctatgacatgggctatttagagaggtcgggatggtgtgggtttagcctaggagcttaagtggcatgatgatgatctcttttatgcgttttgggaaaccactagaggcaagacctcatggaagattgcttatctcactttgatttggattgtatggagagagagaaatgctaggatctttgaggacaaatggaaggtgcttgagatgatgtgagacttagttcatttctatgtttctttttaggtctcctgcattgatgcttttaaaggtattcctttgtatgtcattcaactcagttggagttcagtatgtacacctttaggcatgggctaattttgtggaggagcctagtggtgcttgaaaagttgtaatacttctattttttgttttttgtttttctgtacaaatctccttgtagagtagggtttttttcgatgttttgatcaggtttgttgtcttcatcaggttgtgtatttatggggaggatttctcatccttttcattgaaactgctatctagagcactcttgttgtatcacaatgaatcaagatgtgataaaatgattcttcactatctttacaaaggcaacatctattgaccatgggttatcccctcttcattaacgtatctatagttaagaccctccccttttcccccaaaaaaaagtttcctaagcaagaaaacatgttctaagtagaacataggatcctcaaatctctttggctaagaataataaattattctcatcccttaggaattttcaatacgatttgaaactaaagtttcccctcctatcatctttccaaagtaaagtgtcatccccttctcggatttttaatgggtaaataagctccaaaaaaatgggtcaccttctctatctcctaatcttggaagggtcttcttaattgaacctctactccctttgttacctcctctctcccataaatttgcaactatagcatttttggaggatgctattatgaaaagtgaagggaatacgtctttcgactaaaactcccctacccatctatctcaccaaaatcttatacgtctaccatttccaatttggatagttaattggaagttgaactcttcccaaccttttctaatgtctttctaaaggctcatcccaaaagaataatccttcacctctctactagtccatccctcttggaatttccgtgaatgatcttcctccacaagctccttcgctcaaaacaaaatctccataatcgtttgcctggcaaggtttgattaaaattctttaaacttcttagcctaaccctccatgcttcttatccttatagacacctgaccaatttaccaagcgaatctttttctttctcttgtatctcctcacaacaagtctctttgtattctctctaatttgatcttcacttttttggaaattgcaaagagggacataaaatggatagagaggtttgatagagtgcttttaatatggacaagtcttgaacctctccttgattgaatcccacacaccacaaagcttgtgaggggccctaaggggtaaaccaagataagatgtaggaagtctccctactttatgcctaaaaagagaagccgctttatccacatcctttacctaccccactggaataatttcatttttttgcatatttattttcaaacttgacaccattttatagcaagtaaccatccatttccaaattccaatatctcaactaatctacattatcttcacaaaaaagatgactatcatttacagatctaaacctattaaagggaataacctatttataggaaataatttaaattcaaattcaaagaataaaatattctaaatatggataataattcctaattgtgagtagtgaattcaaaccaatctttccacactcctcaagttggcttgaaaatgtcttcatacctagcttgcaagttatactatcgaattagccctttgtgtatcaccttagtaaaaatatcttccaattgctcaattgtaggaatataaggcatatagattaatccaccatctaacctctctttgattaagtgtcagtcaacttttatatgttttgttttatcatgttgaaccagattatgtgctatattgattgttgctttattgtttagacagagcttcataggcataggacttgccactttaaggtcttaaagtaacttttttagcaataaaagttcacaaatcccctaagttgctgctctaaattcagcctctagctaccataatttgtttctttcttctcgaagtcactaggttgcctctaataaatgtacagtagcctgatgtggaccattgatttgttatgcttcctgcccaatcaacattggtgtaagctttgaattgcgagtggccatgattcttgaatagtaaaccccttcagggtttcctttttaaatacttgagaattcaataggctactccaaaatgttgttctcctgttggatgcataaattgactcactatacttactaaacacgctaagtttggttgggtatgagatagataaatgaatcttccaactaaccttcgaaactgctctcgattcaccaccttatctgcacttgttggttgtagcctaagattgggctctattagggcttctactagttcataactaagtaaaccagtctcctaaagtaagttaggtacatattttctttgtgacacaaatattccctttttagacctcacaaactccacatctaaaaaagtatcttagagcaccaaggtcttcaatttcaaattctcttgcaaggaacttcttgaagacctttagtttccctacaccattggtaaggatgatgtcatccacatatacaatgaatatggctatcttagctgtagttgagtgcttatagaacaatgcgtgatcaacttgcctttgttggtatccacaccttttgatagccttggtgaattgatcaaacgaggctctaggtgattgttttagtcatagagacacatacttttccatctccaagcagtgctttcaaaatccagtggtaggttcatgaagatctcttcttctagctttacatttagaaaagcattcttcacgtcaagttgatgcatcagccaactcaaatttgcagcaagggataatagtagttgaatcaaattaacatttacaacaagggcaaaggtctcctaatagtcaattccataagtttgggtgagtcctttggctacaagccttgccttgtacctatcaatgctttcatttgcctggtatctaatcatgaacacctacttacaacccatgatccttttatctcttggcagttcaacaatttcctaggtaccattcctcttaagagaattcatctcttccatgatttttgtccctcattcaatgtgacccaaggcttcttgtatagtttaggcagtgaaacactagagagattagaagtaaaggctttatagttctgagaaggtctatggaattcgacatactttgcaattggacgcgtaatgcgggaatatgtgccctttctaagtgcaatgggagcattgaggttgttgaatataatgtatttatagtgtacaatctttctttcctttcttaatataggtcacatatatggtagttagttcaacctagccttgtatgtatatttctctattgtaagaagttaattatatatgaatgagaattaaggttttctttttctctctttcaacatggcatcagagccaagagagaaaactttattctttctagtttacccgtgtaattaattccgggaatccagtgaccgtgtttcattccgatcaccttttccatctcccaaagctggtcaaacatatcgtggtcagaataccctcatcaccgtcaacatttttccgacgatattttccgacaccgaccacatcatcaggagcgcaaagaggggatctgcaacttttctcaaagcaccgaagccaaaaaccaatccacgcgcctcccacgcatcgtttttctccggcggcttgaatcccacgcgctagcgcgtgagggcgcgtgggggcacgtggcccactttctggtgccaagcttctaccagcaggttagtctggcactgtcttgcacttctaagcctccatcaatcctcttcgaaccttgcttctccattttttatttttttttggcatttcagccttcgcaggtcttcttttagcctcctctggcctccaacggcagctctcttccttggccgagacctgtgtgtgccttgggaaggcctcttcttcatctccaatcaccctttttctttgtttgggtcccgacataccaggttcttcttccacagctgtgatccgacctccctttagggctctcttcgatccaaacgtgattcaatcttaggtgaagtggatatggcgactaaaaatcctatttttacatccatcatctttggatctcctactatcacatcggaaaaattgattggtaatgattatgatgcctatctccgatatcaagcagccacatcagcttctgttgcttctgttgcctagaccgataatgtctctatctgctttactcagtctccttctcttggctcgtggattctagattctggagcatctgatcatatctctggtaataaacaccttttctcttctattactactatctctgctttacctactgttagtttagctaatggttcccaaactatggctaaaggtattggtttggctcatcctctcccttccctacctctccattctgtcctttatgcccctgagtgtccttttaatcttatttccatcagcaaaataactcgcactcttaactgttctatccatttttttgataaatctgtgatcttgtaggaccggagtacggggaagactattggcatagggcgtgagtctcaaggcctctatcacctcacatcaccttcatctcctgcagcttgcatttccatcgatactcctcttctcattcacagttgtctgggtcatcctagtctctccaagttccagaagatggtccctcgtttttccactttgtcgtcgcttgcgtgtgagtcgtgtcagcttgggaaacatactcgtatctcgttcccaaatcgtttgaataattgggcaaagtctccttttgaacttgtccacactgatgtttagggtccgtgtcgaaccgcgtctactttaggatttcagtattttgtcacttttattgatgactattcaagatgtacttggttatttttaatgaaaaatcgagctgagttattctttattttccagaaattttatgctggaatccaaacacaattcaatgtttttatttgagtgttacgcagtgacaatgctcgggaatatttttctacaccctttacttcttttatgtcccaacatgggatcctccatcaatcatcttgtgctcatactcctcaacaaaatggggttactgaacgtaaaaatcgacatcttgttgagacagctcgtaccctccttctccatagtcatgttctttttcgtttttagggggatactgttcttacagcctgttacttgattaatcgtatgccctcatctatattacatgaccaaatccctcattcccttcttttttctacccaatctctttatttccttcctcctcgtgtctttggttgtacttgttttgttcatactctcacacctggacaggacaagctctccgccaaggctacaaaatgcatcttcttgggatactctcgactttagaagggctatcgttgttattcccctgacactcatcgttattttctctccactgatgtcaccttctttgaggactctccattcttctcatcgtctgaatcttttcctatttctgaagtattgccacttccctatatatctcctcctttagatgcgttctctagtcctcttcaggtttatcatcgtcgacatcgtgttgttgctcctcctctctcttccgctgaggtacctgatgattcacctcttgtcccaccgatttctcctaccccggccctgtcatctactaaccatttgcctattgctcttcggaaaggtaatcgatctactcgtaatcctcatcctatttataattttttgagctaccatcgattatcttcatcctattctgcctttgtctctactttatcctctgtttctcttcctaagagcactagtgaggcaccttctcatcctgggtggcgacaagcaatggttgatgaaatggctgctctgcactccaatggcacatgggatcttgtttctttacctcctggtaaatctacagttagatgtcgttgggtctacattgttaaagttggtcctgatggtcaggttgatcgccttaaggcccgcttggttgctaaaggttatactcagatttatggttgtgactatggcgacaccttctctcctgttgccaagattgcttctgttcgcttatttctctccatggcagctatgtgtcattggcctctttatcagttggatattaagaatgttttccttcatggtgaacttctcgaggaagtgtatatggagcaaccacctagttttgttgctcagggggagtctagtttagtgtgcaagttacgctgctctctatatggcttgaaacagtctcctcgggcatggtttggacgttttagttcagttgttcaagagtttggaatgcttcgaagtgaagcagatcattcagttttctatcaccataactcttcgagccagtgcatctatttggtagtttatgtggatgacattgtcattacaggcagtgattaggagggtatccaaagactaaagcaacaccttttcaaccactttcaaaccaaagacttggacaaactcaagtactttatgggacttgaaatagctcaatccagttcaggtgtggttatgtcacaaaggaagtatgccttagacatcttggaagaaactggtatgttagaatgtaaacctgttgacactcatatggatccaagtgtcaaacttgtaccaggacagggggagcctctaagagatcctgggagatatcgacgacttgtaggcaaattgaactacctcaccatcactcggccagacatctcttttcctgtgagtgtggttagtcaatttctacagtcaccatgtgacaaccattgggatactatgattcgcattattcaatatattaaaggaacaccaggccaaggtatgttgtatgaagacaggggtcatacccaaattgttggttacacagatgcagactgggctgattcaccctcagataggcgttccatctcaaggtattgtgtttttattggaggtaacttaatatcctggaagagtaagaaacaagatgtagtgaccaaatcaagcgccaaagctgagtaacgagctatggctttggcaacatgtgaactcatatggttgaggcaactccttcaggaattaagctttggaaaagatgaatagataaagctagtctgtgacaatcaggccgcattacatattgcatccaatccagtctttcatgaaaggaccaagcatattgaagttgattgtcacttcattagagagaagatcgcatcagggtgtgttgctacaagttttgttaattcaaatgatcaactagcagacatcttcactaaatctcttagaggtcctaggattaaatacatttgtaacaagtttggtgcatatgacatatatgctccagcttgaggggaagtgttgaatataatgtatttatagtgtagaatctttctttcctttcttaatataggtcacatatatggtagttagttcaacctagccttgtatatatatttctctattgtaagaagttaattatatatgaatgagaattaaggttttctctctctctctctctttcaacagaggtcatgtgaagcattatttagattactaaatataggaattgaacacgaggttggtgaagagatacttgtttcatccagaggcaatcatttgaagaagttgcttggctgtgactttttattccttcgagagtagacacccaacttagtttgggtttgtttttttggtaactctcgccttgaattagaatctataatgcttagtccattaggtaaaggctgagcaatgggtaaaggcttgatgggtaacatttctaagcgggatttttctgggtcactcggtagtgacacgggtaagggtcccattacttaccaaaagggatcttagctctcaataccctcccattgaagatgattttttgtgaagtaaggtttgttttgggaaaatgtcacatccatagtcaaaacaagtttctttgaaataggattatagcatttgtaccctttctatttaggagaataccctataaatacacatttttctacctgaagatcgagtctagaacggttatgtttgtggatgtggacaaatgcagtgtgattgaagattttcataggtagagaagtaaagatgcgaatatgtgggagaatgacctataatctatttagaaaagtgtcaaatttcaagactttggtgggcatcctattgattaagtaagatgctgtgagaacaacctcaccccataagtattttggaactcccatagtgaacattatggacctagccaccttaagtaaatgcagattttttctcttaactataccattttgttgtggagtatgaaagcatgcagaatgatggataatgccattttctttaaagtatctaacaagaatagagttgaaatattccttcccattgtcagttttaagggcttctattcgactatggaactaggtttcaatcatggaatacaactctttaaacactccctcgacatcagatttttttttaagagatacacccaatagactctagtatggtcatcaatgaatgtattaatccacttagttgaaatttccaacattttgaattaggtaaaatggtttggatgaggcgaaaaataaacacagtgatgtttagataattggcaaactttgcattgaaatattaaaggattcaaatttttgaacaaagttggaaataattgtttcaaattagaaaaactaggatgacctaacatattgtgccataacattatatcatctttaacaggaatagaaatcacactacaactcgcaacttgagtttgtccacctttgaggaagttgttatgaaaataatagagtccgttaaccatcctagcattgctaatcatcctcatcaaatgttagtcctggaattcataactagagcaaaaaaattttgcaatacatttagaatctttggttattttgctaattaaaaaaagattgcaagaaagattaagaacatgaaggacagatttgagaaccaaattttgatacataattatgtaaccttttcctacaattagagacaagttgccacatgtacttctaatttttaagtgaccagaacatggagaataagtgtgattgattggtcatgtgatcagatgtactagaatcaatggtcgatggtgctgaatttagggaattagtgaatgcactacctgtttgagccaaagagccgaagggcacacctgaaagttgttcattgctaaaaagaatatcggtttctactatagcttgcattccattagccattcttttcttcaggttttctttcctttcaattttctagttttccattcaatttccaacacttctctcaaatgtgccaaggcctgttgcaataatcacactagaattttggcttttcatcaagattcttcaatgtttgggctacaagtctctgattttatgctgctgcagtggttttattggtagcattaagtgttgaattttcattgttggacatattttttcccatcatcactcccttgcaactttcttctcgtttaatcttagagaatcctttattgattgagggcaatggctctttttccagaacactatctttaacttcatccaaatccttgtttaggtcgactaaaaattccataacatggtccttttccacagtcctctgatattgagcactgttgtcagcacacgaccattcaaagtcatagaacaagtcaagttcctgccatgaacttttcatcatattgtaataacttgttacagacatattctcctgcattgtatttatgatctttgttttcaactcataaacttgtgaggaattgcccaatctgagtatgtctcactcattgcatcccatagttgtttgacggtgctgagacacacatgtttggttgatctttggttccattcagttgacgagccatgataaaattatagaattctttacatcctagacatggtatatagggtcatcacattttgaggcctatttggtaccagtcaaatagttgatcttactccctcctctaatgaagaacttcacggattgtgatcactacaagaaattcttttcatctagttgatgaatagtgatttgcaaagattggacttttagcagcttggttgatgaaatctgaccattctgagaagtctaaatgttagaggaatccccctgaggtttcattagaggatgctccaaacatattagagaaatctttcaaggaagagaagaattaaagatgaatatattgtttctgcaatccaaggtctttaaggggactcctcttactgtgttacaacttgattggctagtggcgtgtaattcctttgggttggtctagtctagagagtttgttcattattacattgtattttcttgttttcgtattcttataatttagttttctttggtgggaggattcctcatccttctcttgtacttcttttttctattaatatattcctttgttgtttcctatcaaaatatatatatatattgtttctgcaaatttggtacacaaatcaaattaagaaaagaacaagaaatttggaatataaaccagattaagaaaagagaaaaaaaatctggtagaagaccagatagacgtggaattatttattattattattattattattttacgagtggttagccaaagacactcaaaagttcatctatggttaagggtggctccgatgtcatgaacacaaagataaattcaattggatttttaattctcattattgcagtgtacatagaatctacaatcataattctagatacaatagtctaagtctatttaagggactaacctatttacaggaaataattaaaattcaaattcaaataataaaatattctaagtatggataataataattttcagctgtgaacctcctaattttcagtagtgaatctgaaccaatctttccacaatttgttctcacattgttccttctcttatgagcttccactgaaacatttttctttagtagggattggctgggtggtagctaagagattttagatataaatatttgttttgttgctttggaatgaaaggaagaagtaatcatggttatatgcttgaaatttgaaagaatgtgaagatctttgacaacaagtgtggcatgaatgatactttgtgcgttaagatattgtttatgtcttcatttggatgtctttcactatgggtttggtggaactcatttgagccttgttttgatgatggccacaagcttagaggggacaaggaggaagatgagttttgtttttaacagatggctctcccatgagcagactaaaacttaaatttgatggttgcttgttgcatagtttgtttgaaaagcttaaatggaggctcattgtagaatttctattttgatgatgggaaaatatttaagaagtttctattctgtgaaacagacttatattcctagtttcctagtttaactgagacttttttggtatagcaaagttttaaatagatcattttaaaaggttttaaataggtaatggcataatttagaaactttattctaaatatgattcactcagggtttatgttgtgtgtgtgagagggggagggagggagagcgggagagagggagagagagtgaggtggagtccaagcttgtgttcattttttgagcaaaaggtgaagtccttgaaggattcaaggaaattttcaatgctgtgattcaggagtctgatctttgtttcactaaagggatgattggcagattgcttacatgaatgaatgggcaaagtgtaattgtagttgaagtggtgacaaggggtagatgctttttttatgcctcccctttaggtagttcctaattagtgagaatgtaatctcaatttctattgtagacatttttttagtcttttatgtagtcctggacactcatttttcaaggatttctcatcctatgttctatacgaagttttacttttatataatacattacaagtataattttttattggaaaaaggtaattacttcttaatcagcatggcattttaaaccgggtcttggaacttcaccttcactggttagtaactctgctttagcactgggacaattgtgaatagtgtaagattttatgacattgatgcctacaaatttactttttgattctaagctaattttacccctcctctttatagagttacaagtgcctaaaagatgtgactagctcactttggtattgagttggctggtccccagtaaacatttggcttatgcagatgcaggatttctggcatttcaagcaacatatatatgcaattttgtgttgaacttatactattctggacaatatattatcctactgaaaaatctaaataaattcttaaaactcaaacatcaaattgaatcatataaaattggattattttgtgacagttagttctttgcaaggtttactttttttagtaattttgatttctaatctgggatggattctttcatgcttgtctcagcttcaaaccaccaaattcttat

SEQ ID NO: 10292 - DNA, 2750 bp, Vitis vinifera
  Intron number 1 from transcript GSVIVT01036648001 (locus G SVIVG01036648001) derived from phytozome v7.0 (chr-ID chr1 3; pos 19770410 to 19773159)
ggtcattcaaactcatcaacttcgtcaggtctcgggtgagctttcatttcttctcttaaagcaccctatgttcggttgctaagaaaattgattggttccacttcttggagaatgcttttctgaaaacggttctgtgttaatcgtttttttttttctcttcaaattgcttcctttgctccgttttgttgtttgtttgaatttcacagaaatctgtcttcccctgtttagttgtcaggaagagggaggaaaggagaagaaagtgaaattgggagttttatgttttcggttctgctttgaagtctggttgagtggagttttaccttttattttgagttttgttgggtctccaatgaatgtttatctatgcttcataaactttaacttctatcttttcttggcaaccaaagtcacattttttgtcttttaataaattgcaaagtgtattcacggtcatgttcctattatcaatattctgattatataatgatcataaaattttgaaataacaagaatttggtattgtgcttatggtgctttggttgacaaatatatttgtacgcttgtctgttttcatggttatatggttccaatgtgataatggaacctttgaaagattctttcctttccatgtgaatgagaaatatagttattagccaattgggtgtgacaagatactgctactggatactcatggaagctctttcgacagtttgggcatacacagttgagtgtaccaattgaaggtacaaataacagaggaaattctcatattgtgtacaattatgagctacccaacttggatttccataatacagagaaactgtgatagaaattttaaatactttatggtaggtatcaattagtgtcagatttcatatacttatcataaaataaaataaaaattgtgtcagatttcatatgtaatatgcacatggctgatgatgcttttcttgaaaagtcaagaaaaagagttcaaaatcggaaaaaaccatcttatcctattgtgctatagctctatctatgcatatttacaattttgttaagtgctttttgtacctagaaacaaatgagttggtcttggtgtttcttttatatcctatggccatgagttgtctcacagggaagaaaagtttcaggtctgatttgtagatattcacatataatagcgtctatcacttggcatatggtcaaggtacccagtttagaattattagatgctgaaccttttcctttcatgcaggcaggctatggctgtaggcctgtatatatttgggtggagtctgagtgttagaaaccgtgtcgggttgtttagaaggtgaggtatgtggttaagggaaaatttctcatcaatgggtatttgagagggtcatattgatacatgggaaattacttttaagttgtggagtcctgtgaagcatcagctcaaatcaagagcaggggatgggatgcaatgttgggatgtagatgatgctgtcacagctgcctattccttgattcccaaaccttttggccttggctaagaatgtgcgtggtcaaacgaaagagcaagtctccttgtgattgtcttcttcaactgaaactttcaagactgggcacttattacaaccaacttgctactttatattgctttatgcttgctcaatgataaatattgagtgtgagagtttagatttggggtaaggcatatggaccattgtaattggatactacaatgttcaagtgtccccttaagaatatgtggagttccaaatctccctctagacttcacttgtcattgttatccgctgctactgttcaactcattatttggagataggtggaaggctgattttgcacaggtggattgcttatcattacatcttcaatttgctccaatgagattgttcaatcgctagaaattgctcggtttatggtattttgtggcaccatatgaaataccacccattagcatagattatcttaatggaatacctactgtccattgacatgatcctacatggcaggggagccacatcctgtatgcttcaagacttacatgacaatgttcttatttcttctaagttaatgactatcatctgatatgtcaaactttaaccctaaccaatcatatcctgatctgatctgttagcatctatgtaaattagaaggtgacagttcattgcatccctttattctgttttttattttagatatcttaaactttagtggttgacggggagtaaatgttactattacttttctgttttttgatattatttaattaggatataggtatttatcgagagagatgttgatggtagttcttctaatttgcgaagaagatgtgattttgtaaacttttacatctattgtgtcttagttttcttttgttgcttttttcagttttaagagaatcagatattcttgtcattataagttgcagaagtttataaagaaaattgtctttgcttccttgaaggcagctgttcaattttcctttgctcatgaatcaataatttttacgacatgcaataattttgtcaatccaatcataaggaagtcacattaaggggtttcaatgcattttcatcttccaagtttgtttataaatttttaatcagcataatataggatttcatgtttttggatttgtgagccagcaaagagaataatttactgcaaaacttaatgttaatgtctaactagttgctttttgtttgtcttctatgtttctaggtggcagaaaataggtgttggagttgcgggcttgt

SEQ ID NO: 10293 - DNA, 5693 bp, Vitis vinifera
  Intron number 1 from transcript GSVIVT01003641001 (locus G SVIVG01003641001) derived from phytozome v7.0 (chr-ID chrU n; pos 11433491 to 11439183 reverse strand)
ctccttaactgcacttctggtctccaggtaattttttgggcgtcttgtttttcttttatttttactataagtatttgtttctaatattccagagaatatgttatattgatgaatttgaagacaacttatctcttggtccagacaacatttagatttaggtgcactaaaatttttttattgtttgctgttggaaatgagaattgtttttaacttccaataatagagagaaaatgatgatacagaaaaagcttgttcagtaacccattttcaataactgtgtttaaaaacatttcttgaaaatgagtcatatttagaaaacattaagatgttgtttttcctgttctcgagattgcaagcacatttacaattcaaaacagttcaacaacaaacatattctttctttacacttctcaaaatgcaaatgtttccaaaaacagccctttccatttcccctgccaaacagtccctatgttctggcttagggtaaaatgggttaagtggcttctcaaaacttgtccacaatgttagactgaaatcaggggacatttttgtttgctcttggtacaatgttgttgagtattccaactatgataaattatgaattctttcacttctcgcttaatgcatagtaatatcaggtttatttttatgttgattgtctacttggatattttgaggtcagtggcttataattgtagaaggtcacctccaataaacttgtgcaatctacaaatttccatttcaaaatgtgttacgtaagcaggtgacctgattttgggattgaacatgaaatgaagtcctcgtagtcatgggctgaaaactggattcatgcattgaaaattgtaacttctgattgtttttctaatgaccttggattttagcttagctgtttagagatataattgatcctagattggtaccaaaatcattcctttttcagtcacctactgggaactttaacctcttgagagtgttttctttgaattgttagccattttatatgaatttataaaatgaactttctaatgctgacttacaaatttcactgaattcattaattgtgacccaaaatttcatacatatgcaattgttgtcacaagctgtgatggaaaaattttggggttaataagcactggaaaattgggtcagtttgggggtttcatataggaggattgttcagtatagattagggctataagtaagagtgacaatagttggtttaggtttctgggctatggcagtagctagttgagggtttaaataagtaaataaatatgtaagaagaattgagaagaagaaagagataattgtagttctacactagtaatgttccttctctctcaggaagtctcaacaatgtattgtattagatatagggcataaaaatttccatgttcttgctttagggtaaatctgatctttaggcgacagcaatcagattctatggctataacaaagtacatatacatgctattggtcaggtgatctgcctgtccaattagggttggtttgggacatgtgtgacttgtatgatcttgaagtgggctgtggaacctagatctcatgtggtgggattcatcatgattgagctacctgttggcatcctactggtacctgtaaattgacctgagtctgaaagttctttgtgctgagctgaattgggatttggcctaatcttagctttgtcagtgtttgaagccagaagctcaagttgggactgcaattgatctgtgttttgctcaatctaaagcccacaaggacagaattgcattcttttgttctgacgtgtaggtacttgagctttcacttcaggatcaattgctcgactaaagctacaagcaagattattccttcttcatttattaaactttagtgtgtctaggacagattgatttattatctagtctatttccaactctaatagactggttttctctagaaaattaaaattttcccaattgagctagcccaagctgcattagaaatttaaccaaactggagattgagaacaggatgctgcaaatctttattggaaaaatgtcaaagaaaggatatagtttacttataaaacattagtcagccatatgttaggtagatataaggatcctagaggaggagaatctctataacgactattaataggatggtggcttgatgtggcatctcaagaactgttttcaatgttagattgaaatagaaatcatttttatttattgcaggtattcatgctgtgaaatattcttactgggcaaatattagaggtcattggcatataatattagttttccttgataagatagcttattattagtttttctcaataggctagcttacaatcattggttgttagctaggtagactgtaaaaagttttgctgtcccgaacaaagtagcttacaaactattaaaaaaagtaatttttttttttaatcagaaacaggttctatgagatgtagaattaagtttatggatgcccttagttttctgctaaagagagctaagaatggtggttacttgtcaggttttagggtgggggagagaggaggtgagggggaggaggtatctcatttgttgtttgcaaatgatatccttgttttttgtgaggcttctcaagaccaaatggttcatttaatctgatttcccatgtggtttgaagtcttcttaggtgtgaaaattaacattaaaaagagtgagctgattaaagttgggagggtggacaataaaggagttggcctttgaaatgggacatagggtaaatgaggtgccaacttcatatctgaggcttcttctaggtgctcctttcaagttagcggtggtttgggttggagtggcagagcagtattacaagaggttgtcgtcttggaaaaaacaatatatttcaaaaagggggaggattattttgatttggagtacattagcaagtttgcctatctatttcaagactttgttttctatcctgataaaagttaaagtgaggcttgagaagattcaaagaaattttctttgggaaggcaaggctttggagaaaaaacttcatctggtgaaatggccattcttctgcatgaagaaaagaaaagggggcttgggtgtaaggagtatctctttgcttaataaagtgcttttgtgtaagcagagttggcaattggctttttttttttttttctttttgatagataagaagcaattgtattgaaaaatgtcaaaaaagggcacaccaaggtacacatgatgtatacaatggccgccaaaaaagactaagaaaaaggttcaaaaaacaaaaaatacttcatccttcaaaccaaacccaaccaatcaatgaaatcaaacaaggacattgatctatcacttataaacaacttggaccaagaaaacaaactacatagaaataggactttcaatctatgattagagagctcctcattctcagatgatcttttatttgtctccttccaaattatccaaagaaaagcataaaggagcagctccttaaacattgttccgcttcctccccataaaagagtcaggccaacctaaaagagtgtctttgacaggggagtgaaagaggagctttctggagacatgttataagtggaaaatatgggtggaaaaggagtgttagcggtcttgtgatgtgagaggtgtgtatggtgttgggttatgaaagctattaggaaggattgagatattaaagtagaatttcttttttccttttttttttcaaaggaaatgggaggatggtgaagttttggaatgataagtggtgtggagaggagcctttgtatttttatttttttttccatctctgtgcggtatagcctcatcaaaagaagcttaggtggtggattgatgggatcaatcaagggagaggggtcattggcatctctatttttctagaaatcttaatgcgtgggagcttgataatgtagaaaaactttttgctagactacaaggaaagatagtgaacggaaaggaggaggatatggtagtgtggatagattcaaggaatgaaatcttcttagtgaagtctctttatgctgccttggagtggggagttgaacttcttttccagcaggagtcatttggactcttatgtgtttcatctaaagcaagattctttgcatgggaagcttattagggaaaggttttgattctagatcaactttaaaaaagagggtgatgctgattaatagattcttactatgtaaagtggaagaggagtcaattgattgcattttccttcattgtcccaaggcaatggttctccagtagttgacattttctttgtttggtgatccttgggtgttgttggccacagtgagagaaactttgttagggtggcatgggtcctttatcaaaaaaaagcacaatagttgttcctttatgcatcctttttcagactatttgggaaaagagaaatcaaaggtagtttgagaatgagtagtctatccaaattctgaaaacatttttccttggtaatctcctttgggtaaggttctacataggtgataacataatgtctaattgaatttgttgattggttaggttcttggtaagggagagggagttgtttttttggaaattccagcatggtggttccttggctcttttttgttgttttctttgcttctcttgatatgcttcatgtcttccttgatgcattatttctttggtttatattagtacatcatacctgtcaaaaaaaaatttaagtctcctcatagttcaataaccttaaaggttgatttggtgcatcaaccgattctgtgttttggttggttttacaatgagcttgacttttggctgggattattgggtgggtacacagttaatccaggaatggtacctgagatgatcctttcttagtcagctttctcacgaaggaaattacctgttagtgagtggaaagttctttgaactcatgaacattttatgtgaattggtagactgaattttctcttctactagattgttgaaaaatcatgaattgtgagcaataattttatatgcaaaactccatggttattgttgttttttttaaacttgatttatcaacatatatatgatagccaatatttatcatgggcattaggttaatggtgttgcaaggcagaccctggaaaattgttatggtgcacaagccttatggactaagtcgttgcctaagggcaataaggatcatcaagtctcagaaacttatttgtcaatacatgtcaatggtcgggattcctaactaggctgattgagaggtttgttttcattttttcaagggaatttttagaatgttgttctaggaatcgggctgagttctgaaagcaattttaaggacttcctagtctgtgacttcagctaacaacaaattaggagtctttctgggttttccgggcctccttttttagtacatatcctctttccttcaaataaccaagcaaactattaaaagaattaatggaggaaaaaaaatgcaagtttcagctgtatttgtttcgacatactctgggctctttcctatgggtttctattaaacatctcatttaattagatttgaatctctggttgagctaagtttcaatttcattagctgctaattgcatgaagattattcagatagaaatcttctttatcttgtgggtgtaatattaatggagatatctcattacaggcaagtagagtaatttccgatctcttcactctctg

SEQ ID NO: 10294 - DNA, 8953 bp, Vitis vinifera
  Intron number 2 from transcript GSVIVT01030182001 (locus G SVIVG01030182001) derived from phytozome v7.0 (chr-ID chr8 ; pos 10758305 to 10767257 reverse strand)
tctggtgatttcgccattctctgcgataagtgcgggtaatccagatggatctcttcttccttgttgttatttgctaatttaatgcactaaatacttatggactgtgtactggatatatgggtttaatggaggttttaatttagtacatgtggacttttggtggactacttatgggatttatgggtttattggaggtttaattactgggtgttttgttttgctacgtttgtttccttttctgttttgagtttgtcagcttgctttttcttagcatgtttgttgattgcaattaatggcatattgggtatctttttagtgtagtgaagaactaataacttggatatcacgaaaataagccgaagcgaactatgaaaattaaatggactaatcaattgagctgtgtgatctgtttctttaagatatggtcaagaataacaggtgatagggcccagtacaattcccagaatacagaaatgactctgggtctgaagagcagctatagtgatgttggtgaaccataagtagcaaagaaatttagcagagaggagggaacagatggtgttctgtgctctgtctattttcttattttcttttttctgtagctcatgtgaccggagtataaacttagagctcagatgctacaaagaatatgaacttcagtaattaaataatggaattgaggtggacttatcagttgatgtgtctgaactctgtttctctgagacaatggcttggtgtcatgcgttaacaatgtcctgtttccaggatataatacaaccaactgtattagatgtacactcaatacaacaacccaaagaatagctctgaatgaatgttggtgaagaacagtagggaagcagcaaagaaatgaaccaagaagaggaagaagttattttcttattgtatgtgtttctgatagtacaattatatggctgtttatagatggagagtagcagagaggaaggatttcgccaaatagacaaggggaagattttttatttttttattcttagcagaggaagaggatgctctgtattctgttgcatttttggtgattttcttggtataattttgtggctgtgtataaggagtcgccgaagagaaaaaataagcaacaaagaaattgagcagagaagacgaagaagatattccctatgtagctaaaaagaaatgcagcaaccaaacagaatggataaaagaatattctgaagtagcagaagaggagggaagccgcaaaaaacagagaaaagaaaaggatgaaaagaaattgaaagaagagggggatattctatattctgagtcatagtggaaaaggaaataagcagcaaaggaatagagtgaagtagaggcgttctgatgcagcataggaataagaaatgttcgttcttaggaattttctggcctcagtaaccacaaaatttctattagcttagcctcagtcttgatcaactcattcctggattcaaatcctcaagtttctataagccttgctcggctttggttaacttgattctggatcaatttcacagaagaggacattagaggtaacaaaagagggaagtgacaaatattttgaaggaacaaaaaatgtttccaacttagtctcctttaagtttcttgtagccttgccatggtctcagttgaccttttttgtaagagaagagggtatttagacgtggcagaaggtatacaatggaaaggagtcaattaataagtaaaggttcctatactctttttaagattggtctaagaggagatgaaattcatatattttgacgtggcaaagaaataggaaagaaatagagtagtgtaagagcaaaagaaataaaacttcataagaatatgcaaattgattgcctcaaattcctatcagccacacctctgttggttaatttatttccaagttggtaacttcaaatttctagtgacatcacctttctcttggttagtgttgcacattgaaaaagtgagaaaagaaattgattgacttatccccaagttagttgcctcaaatttctattgccttcccttggtcttgattgaacttgttgttagattgaaaagtgatgtaaaaggcaaataaaagaacccttagagtcattttgggaaacccaaggtaaatgggtattggcagagtcttccaggatcattaaggagaggtgggtaaatctttttctaagcccattgaggagagattggctatggagttggcattacttaaagatttcaccttagcttttcctataggttttaatcacttcctagtgggaggtgacttggtttagttatcttcttggtgtcttatgagaccctcaaaagtgagatgactaattacctaaaattttccatctccaaatctagtttggtggatccttcacttggccaaccaacagactggtcagcaaagtgtagtgcttctcttttcaaggtgtttttttaggagtttttacctccatgagctttcttccgttattttatttattttattttttggtgttatagtagtccttgttcgatggtgttttagttgtatattgggatttcagttgtatttggtacttgtggatgtttattttccaataaacgtctaggaagcattgttaacacagatttatttactatgatcctagaggattttctttcttggaggattgcttgtgctttttgttcaagagaacaatgcccatccttaccctatggtgttttagttatatattgggatttcagttgtatgcttcttgtttgcaagaaaggaaatttcagttgtacttcttgtttgcaagaaaagaaaaaaaagaaaaccctcaaaaaggttaaattgttcttaagtaggtcaccttaaatttttgttgttcttatttcagtgtagtgtttgcatgatactacttacatcgtataaaaattcatcattgatccttaacaaataatctcaaagcatttgtttgtgaatcaatatgggacaaatgatttccgttgcttctaaacgaacttgacaatagggaaaataaggtgataaaaaagaaaccttactcttgaattttggcaacactttcaacattttgggattatttattcctgcaccacaaggaaccattttatgttgcatccttattcttatgttcaataaatagattaatagataagtttgcaaaattaatgatctactctttatatctaacaatagatgataaatcaatagatcaccatagagagggatggcaatggggtgggttttgtcggtacaaactgtgggtcttttgagcttggtaccgatctaactaaattgtttggttcccctttcgttcaagggatgccttcacatgtggagaccaaaccagataactccggctattaagcctaaatgacgcttggagattttggtattcactagaggaagagtggattacaacttgatcgaaattttttatggaggaagagatttggacattactagatatttcagacatattgagaaagagaataaaagcagagagaatgtgggagaaccaacaatgaagattgtatttctctatgtcgatttcagcaatgaaggccacgaaatgttaaagctgtagcaaagaagaatgcacttggcttcaccaatataggccaaagaaacgagaagcaattttaatagtactttgctggataccatgtaaacaatcatggaattgcattcttgtattaatggaggaatttacaattaatatatataaggttacaggtaaaacaataaaggaaaataatccaagaatacattgaatgtagtcactattagtcaactatacaaacaagctaggaatccttaatttataatcctaattttatcactgatttataaccttaatttacagcttgtataagttttatattttagtcaatcacaatcagtcaagctgtcaatttccacaatcagctaacatcaacaactttcatgtagattaacctcaatggagtgagcagcctgaatccaacaacatgcaaacaaaaaatgttcgggatggttatagaacaccttctccaatggtcaagttagtgattcgaagagagaaatggaaaagaaagttgcagtatgatgctcaggataaaatgacctttttaatgtcatcatatgcttaatttatattaagattgaagataacagtgccttttctgaacagtagttgcccatggtagttaaaatttagccatgactggcaatcactaacagtcatgacaatatttttgttgttaaggcaattgtggactcatttaggcttgcccaatggatcataggcatttatcttgagttcaggctcggcccatacagtttctgattgggcttgagactactttttgagcctaatcggcccctgaccctagctgtcaatgggcatggctaggcctttcacctagaataaacctaaacgttaatgttctcaattgaattttgttttgtaataaagttaaatttccatttgaactaaattatgttttagatgcttattgtggactatgaaaacttaaatagtatggaaacatcactgggaacttaatgttgttggaaaacgtgttgaacttggttgcaaaacctagatttaaaaaaaataattatgagttatgtaaaaatataatatttgaaaaagtagaacatctggacttcgttgcaataaactgatttgttaagtgtctcttttagtcagcccaatgttgagtggaagatgctaatttttcctttttgaacttaattggtaatctggggttgtcttaggtgggtcaatttccttttatattttcttttcttttggccttggtgcgccttgcatacattttatatactattacaaccttgtttattaaatgattttcctactatatttgtatttgtatataatttacctacaaaagaaaaacgcaaaaactagggtcttgaagacaatgatatttttcttaatatttgctgatagtttttgtgtaatattattataatttattcacacattatttggaatttatttgaggtagtctcattttagggcatgccatacatgtattattactttaaaaagcaataaattaaatttaataactacttcataatctatcacctatgagaacaaatctaaaatgggctgatctttcttaatctagtttaagcctcccttgtatttaagtggtgtaggggagttagacccatttcatctaggtttgcttcatgctttccttcaatttaagtgtgtaggataaagaagtggacctatgttatccagggtttgctttatcaacagttgggataaatgccttattggcagggtgcattcctcattataaataaaaaataaaaaataaaatgggtgatctcttaggatttgctatagggtttaccgcttcatatgtaaaatgatggttatgtgagtgaagctagtttcaatgaattattagggatcttgtacatgaatgaagagttaaacacaagttccaggttcaagtcccttatggggacaaaaatttgccttaaaaaaaaaaaaaaacggaaaaagattgagattgttgcatgtccccataaattgacccttgtgttgccttggatttccttgtcctatcaaaatgttgaaattttaatgattggtagctgattggtgtccttatcaactcttcttggtgtgtatggcatggttttcgaagatgctctcagtggtaaggtgacatgacatggctcctctagcatctcgtttagaacaaggagaggtgcattcaacaaggcacaacttaggtgtaaaaggcacacccttagagcaaggcacaaggccaataaaaagtgcacctaattgcagttattttttttttctaccatagtaagaaaagaaaaaaaaaaggtcattttgagcctaagtatttttaaaacaacagacaaaacaataccttttcaccctaccatttgaaaaaagaagatttgaaggcttgattccaagaaagagattgaaaagaagaagagtaaaagaggagaagaagaagaagaagaagaagaaaaggaaaaatgtatgtgtaggttgtccataacacgcacaactcctatgatcccaatattttaggcatttttattttctttgatttattagccattttgcgaatcattaactataatagctttatggtttttgtttgtcagttatctacttataagtgataattatttcttaataaaggacgattatccattgatgcggcgctcagtatatatatgtagttcacaaatttatttgctttttttagtactaattgaattatttttatctatttatttatttattttgtgattttatgtatagtacacaaataaatgataactgatttttttagcattatttttgttggattttatgtaaaatgtgtgaaattttgatgtctttaattgcttgaattgaaatttttagtactatttaatgatatatgaaaatattataaatgtttgcgcgttaatatttgttacatgatataaaattacacatagacttggagtgcacccgattttcacttagacatgtgtgttgggttgcctttatgtcataagtgtgccttgcatcttttaaaactttggtttgtgggagaggggattgagattcattgtcacatgttttaggagttttctccaaggtaaaatccttcagctgatttgcaacaaaattttctaggataaaatgttttagctgatttgtagcaataccttttcttttaaagaaggtttttgaagtatcttatggtgtgaatcaagaaggatcttagcaacatgctatcatcaaccaagcttgtgttgaagttttatttctgtgagcatcttgctcttgattatgttgtgaatgctctttgatagcatcgactattcttccaatttgtttcattgcttaaagccttaaaccacttaaagttgcttcaatcaccatgagtggcatgaaaaatataatttgtagacttgataattggtgtaatccatgtcccatgctgacttagtgtagaacccaaacttgaattttgtgatttagcaagtgagccaatagcttctttgccacaacaatggtactattcttcacctccaccaaggataattgtccaggtgttttttaaattcacaagcccaagacaaattttaaagtagctatttttaaagaaaattggtgcacgtcctttaccctaatgtcacattaagtgtgcatgttaatatttcatttgctgttgttgctagtcacatgatcacaacttattcacttgaaaataggaattaggtggagattatttagctgggttttctagaaatttgtgaacacaaatcttaaacctgaaaaaaaaatgagaaaagtgttgaccatctcagatttattagtttaagaaaattgaaatgcaaactctgaaaattcttcaataaagaaaatatcctctgattctttttctcaaagttgcttcagtcaaagactcgaagagctggttcccagacaaagtgaattcagctgcagaaggttgggatgtgttgacacagttgcagaggcttacagcatataagagaagaataaagcttcaccatgaatgtagcctttgagatcttaaatgctgaaggaatgatgtttgtatagctttatatctataatttaaaagagctttactatgctcattggcttgtagtttgtgggcgtaaatgatgagcataggtttgagtgacaaaatcttgtagagctttgggattgttagtccattggattgaagaaagttcttcagggatgaagcttcaattatctctcttccaagttgtgctgatgacacttttgagcttaggctatcaatagaggttgataatagagtttcttgataaacatcttcattaatgattatcccttgatgtatcttttgtggggataaatatatttgataagttaccttagtttaatctatcccgataaaattaaatacaaattatttaagagcttattattctttttgaaatacatgccatatttggttgaataaatatttgtcttcctattgtttgcttttaaatgactattggcaggattctatttgtaagaaattaagggcatgtgatttgacttgctatctgcattgcctttcacatctcatcatctttgtcttgtccgtaagtaaactaatcaagtcattgcaatctgtgaatgacagaacaatttaccctcatacagtgatgaagcaaaattttgaatctaatttctccctatgtaaaatttttaaatttaattttatcatattatgtgttccatattacatgcaaataaaaataaggatattttatcatttggtttgagtatccacatgcaatttgtttctggtccatcctacatcctaaatatgttttaaagatgcattgagatttgtaagaggctgaaaaaattttggtactggatcatcctaattatgtctggatttggatgatttaacaatttctggttaaacggtgaaacctcactaatgatgatgggctgacacccatgaagacaacaatttcttctaaatgactaggaacttttgatccaccagcttgtttggcctagatacgactatctaaatgctgagaaccttagaaggtggaaacatggagatgcctagagtgcatagcaatttatggcttgaacttgacctttaatggttggttttctttcccttgttttttagaaatactacacaattttatttacaattatctttttgccctatgaataataatatttggcatttattgtttttgagaaactaggtatgtgactggaacctgactgctgggacttaatagtcaccattttatgacaattttacatgatgagctgcaattttttatctatatttattgggaaaagaaaacattaggtttctccatatgacttattagatgatactttctatttgcaactgaattctctccaggtctgcttttgagcaactagttttctgtgac

SEQ ID NO: 10295 - DNA, 6205 bp, Vitis vinifera
  Intron number 12 from transcript GSVIVT01013614001 (locus GSVIVG01013614001) derived from phytozome v7.0 (chr-ID chr Un; pos 1523648 to 1529852 reverse strand)
ctattaaagaggtacaatttcctgtcggtacttgctgcattaaatcacatctttccacttttattatgtttcctaagtttcccttcagctaagttgaaaaggaaaaacaacatgctttcatggttgggagaactttagatcttgattttcaagttggtgtaggttcttttgggtattattttggtatgctattttatggttgttatttagttgcagaaagtataatggtcttttcagttacctgctatattcttggtttctcaagataaatatgatacatgcttattacatatgacttgagttaaatttcccacctattttattttgtaatttccttaatggaagatgttatgaacaattggcacattgctgtaattgttacaaaatattgggttcacagtgtagttttggaaaattttcgttcattctgttcttgctctctccccttttctcctttgtgttagcaatacaataaaatggtatcagagaagtagatctaagttgaataaattattttaccttatctttctttttcctgttgctgcttttcctcctttttctttccaactggttcctcaaatttcttcccttaaatcactatgagccattggggattttctgtgcaagatcatccttgttttattgaacaaaacaagaagtttttgacaccattctgaagacgaggagtgggctttcaacccaactccacagtgcatctgaggatcttgagactgtgtatggttttcatttaggggtggaagcaaaggccataaaatctatgttttgggtatgaaaccttttatttccctatttattttttgggggataaattttcctgtattaaggtttttctataaaagttcttgtctttttaagggtaaacagtttcagtaataaccccataaacagttctgtgattagatacctcataatggcttctaaattattgtgagctataataagagcagtcacgaaccgtttagagtatcctgtcctcttccttctctgtaatggttgtgtttctcctttctactgttagttggtgctgccttttaagtaattggatccacattagaatgcatggtagtgttgagcttcttaagtggtgtttggtatgcgttttctagtattgaatatagttttgggttgatggcaagattattttctattttagtgggccaaaatgtcttattttagcaacccctttactgaagaagatatttgtagagagctcttttaattagataggcataaggagctggggcctgatggtattactattgcattgtttcaagattgttgggatgtgatcaaggaggacttagtgagggtgttcacagagtttcataggagtgggataattaagcaaagtactaatgcaaccttcatagctctagtgcccaaaaaaagtcggacaaaaaaaatttcaaactttaggcctattagcttgatcacatgtctctacaagataatagccaaagtccaatcagggcgattaagaggtgtactacatgaaactatccattctattcaaggagcttttgtttaagggaggcaaatcttggatgcgattctgatagccaatgagatagtggatgagaaaagatgctcaggggaggaaggagtagtcttcaaaattgattttgaaaaggcatatgatcatgtggattaggaatttttggaccatgtattggagaggaaggggtttagtcttagatggaggacctggatgagaggttgtttattctcgatttcttttgcaatcctagtgaatggaaatgctaaagggtgggtcaaggcaaccaaaggattaaggcaaggtgatcctctatcccccttttttttttactattgtagctgatgtgttgagtaggatgatgttgagagcaggggagagaagtctgttggagggcttcagtgtaggtagaaatagaacaagggtgtcgaccatcttcttttctagtgcccatgtggaagaactgcagactcttaagatcattttgttagtttttgggcaaatttctggacttaaggtaaatcttgacaagagtaccctttatggcatcaaccttgatcaggatcatctcactaggttggctttgacgcttaattgcaaggcttcggaccaaaaaaatttcagactttagacctattagcttgatcacatgtctctacaagataatagctaagttcttatcagagcgattaagagatgtgctccatgaaactatccacatgactcaaggagcttttgttcaggggaggcaaatcttggatgtagttctgatagccaatgagatagtggatgagaaaagacgcttaggggaggagggagtagtcttcaaaattaattttgaaaaggcttatgattcatgtggattgagattttctggaccatgttttggagaggaaggggtttagtcttagatggaggacttggatgagaggttgtttgtcctcagtatctttcgcagtcctagtgaatggaaatgccaaagggtgggtcaaaacatctagaggtttaagacaaggagatcctttatccccttttgtttttacaattgtggctgatgtgttgaggccaaaggagagaagtctgttggagggtttcagtgtagccaggaatagaacaaaggtatcccatttgcaatttgcaaatgatatcatcttcttttctagtgcccgaacagaagatctgcaaactcttaagattattttgttagtgtttgggtaaatatttggagttaaggttaatcttgacaagagtaccctttctggcattaacctcgatcaagatcacctcactaggttggcattgacgcttgattgcaaggcttttgattggcctatccccctatttgggtcttcccctaagggggaacccaaagacttgagggttttgggatctagtgattgaaagagttttgcaaagattagatgggtggaaaatggtctatttatcattaggtggaaggataactcttatccattcatgcctctcgcacattcctagctactttctatatttgttcaagattcccgcttcagtggctggaaaaattgagaaattgcaaagggattttctttggtcaggggttggggagtgtaagagagaccatcttattagttaggatttaatgtgcaagtcgaaggtggaaggggaagtggggtttgggaagatttctttaaggaatcgtgctcttttagggaagtggccatggaggttttctagggggagttctctatggtattaggtcattctaagcatatataggacacatgctaatggttaggacgccaacactatagtcaggtggtcatatcgttgcccttggaaggctattgtataggtttttcaagattttattaggtattatacttggtttgtggtagaaaatggagagagaatcctcttttgggaagacttgtggtgggaggaccaacctttgagctcccaaattctaggaccttttagaatagtcacagttaaaaatcttcccatttcttcattttttttttaattagaaacgaagaaatatgtattaatagtagtaaatatacaaaagaagcctctatagtagtaagagaaggatgagagatccttccgtaaaaaaatagaaactgaacaaagaagaaagcaccctactatagaaaacaatatacaaaactatctcaaacttttgaatcacaaattgtagtctaattgagttgtaaaatactacgaggaactcctctaaaagctgtagtacaagaggcccaaagagaggaatagaagagaagtaaatctcataacattccttccgatcttccttcatcttaaaaaatcttagcgtttctctcttgccacacaatccacaacaaagtgaggcaagcgattcgccaaagtgtcttgcctcttaagcgaatttcccaaacatctaaatgcaataatcatcatgtcctcaatactccttggtggaacctaatccaaccctactaaaaagaagagtttgtgccaaagcccaagagttaaaggacaatgaagaaaaaggtggtcaatcgattctccatttcctttgcatagaatgcggcattgaggacaaagggatttgtaaggtcttctcaattgcagcttgtcattggtgtttactttcccatgtactactaaccaagcaagggccttatcctttgaaggggcttttgatttccacataaacttggccagaaggaacaagataggatttgagaaatttgacaaagacaagaaaaaagatttaacagtaaacaaacttgatgaggacaaagaccaagttcttgaatctgtcatagaaggagaaaaatgcactgaactaagggaggacacgagtctttgaaggaattcaatttctgtatcagtcagattacgacgaaaattaaaattccaagaaagtggataggaattactaaggacaactgagacgatgaggtttgtcatagaaataactctataaaagaactacccatctcttcaattcttgggtttactcatccattctcttggaaccttaatttccattgtaacctttccgagcctgagatagaagaactagaaagcttcatgtcttctcttgcttgtttgcacttaaccccatctattcaagatgcgagaacctagtctttatctacttccgggttatttacagtcaagtctttctttttagtcttatcccacctttctgattcatctctaacattccctactaattttgtttggaagtctcaagtcccttttaaggtcaagtcttttgtttggtaagtggcacacaagaaggtaaatactaatgatttgctatagttgggaagaccctaagctctcagtcttgatatttttaagttgtgtatggagcatggagaatcaacggatcatcttttcttacattgtcctttaacgatggggttgtagcataggttatggattaggtccccccaaggagcatttttgacatgatgaccattaattttaagggattgggaaggtccaagaggggactagtattgtggcaatttgcctgtattgcattaatttgggttgtgtggcgagaaagaaatgttaggatttttgaggacaagaataggaattcagaggctctttgtgacactattcactcctttgcttctttttgggcttcttgcaccacaacttttaagggcattccccttgatttggttcaactagattggctagcggtgtgtagcttcaagggtgtgggttagtaaggggaggctgctttttgtaattactaaataactttttgctttttgtattcaatttgtttagctttcatttgtgggaggattcctcatccttcttttgtatttcctgttttctaatttaatataattcattgttgcttcatataataaaaaaaaaaaaagaaaataaaaaataaacaaatctaactttttgaggctcaaaaactcatgacacttaaactcaagtccttgtaacaccttaatttacttttatcttggtagatttaaaagggaaatatggtctttgcatagaaacaatcaggagagatttctgttagaaaatttccattttcattgtgagggtcaaattgcttggtcttaggagttctgagaaaaggtagttgacttctgctttattcaactctttaatcttagctgaggccatttttttttgttttaactggtgagctgatcctgtacttgctttggggcttgaacacatttgagcttgtctaatgctcatctcaaaactcatttattccataagtttggatataaatcatggcctgaaatctttctgtttcttagctgaacgtgcagtgaagctagggatgaatgctctgtcatatgtgaaactagaataagacagttacagtcaccctgcataaatgaggttggcctgtgctttcctgaacaatttttcccattatatgctttggatctatttatacctcaaggtttctcttgttcaatgaatcaaagatagttttgaacttgccttctatcttctagttggtttcaattgaatgattagttttgggactgcgcaaactggtaaagtactattttttctagttttgtaaatctgcataggtgccataacctgctgtcatccttgtgctgtttgcactttttctacttgtctctccagtgcacatatttgtttgatatagaacttcattttctatctataatccctttatgtgaatttcag

SEQ ID NO: 10296 - DNA, 5804 bp, Vitis vinifera
  Intron number 2 from transcript GSVIVT01018108001 (locus G SVIVG01018108001) derived from phytozome v7.0 (chr-ID chr5 ; pos 6616783 to 6622586 reverse strand)
cgaatttcccccgactcggagcctctccttgtaaggtttaaccttcttcttcttgttttcttttttcttttatgagatatgaatttctggttatttttaagtttgattgctgaaatgttctgtttatttcctttgtgttttgggaatattaacatgcattgtgaatttatcttttcatggtggattttgggttttggggtttattgttgcttttagggttttggatggtcatggaagttttatgtctttttggtggatttagtggagggttctcggcattgtaaagggttttttgttgatgatatgttctctggctttagtcattgttttgctttttgggattttaggggttttgtgggtttcactgctgtagcatccttttttttttctttaatttttcttttctgctttcattccttttcctccttggtgtgttcttttctgtcatgcttttgaatgaatttgaatgaaaatctaatttctgaaaggctacaaacaggagaaaaaaaaagaagaaaaaaagaaaaaaagcacaaaatggggctccagacgggtaatgtaagagattgagaacgattttatcttgaaacgtggtggtaaatttttcaaaatcccctaaattagtggcctgtgatgcaggcatttgtgtttttcaatggagttctatgagaaatggaatggttcttggtcaggtttttcttggaaccaattaacacaatggactattggaatttgtggagtgttgtattaattgtgcatggtctttggtcaaaactttttgttaccaattagaaagacgatagaattattcagtttgtggtattttctatggataaatattagtttgaacttttgtttatggctgttaatcaatggataactaccaatttgagtacttggtttctacctgttaatccataaatattagtttgagtatttggtttctggctactaatctatggataaccatgagtgtgagtattcagtctatgtggctgttgatatatggacaactatcagtttgagtattgtaggtttatttgggactactgatcatggacgagaactattggcttaaatattctaggtttatttgggatttttgattcctttaaatggtttactagaaatactttgagggaccattgttgatttatgagattcatattaggatgaaagataagccttgagaagaattgaattccttgcatcaagctttggttggatgtttgaattttgttcttgtcattgtttttggtgaagttattctttctatcatagtttgtttttattttatttttgtgtaacactacatggtgatttgttattgctatgaaaaatagtacttgagttgaaagctaaggttggtttagtcttgtctatatttgcttctcaaagccaaaacctctttttaaagttcactaagagtttttatccctgttttagtaatgctattagaagattttggcttagacaatagcttaatatggaagtataaaatgttgtttctcatgaagtcctttttttgccttattcaataagctatttagcttccaactgaagccaatgacaaaaaaaaaaaaaaaaaccacaccctataccaaataaagcttttctttatggaaagctggtgttaaaaaagattataaggaccgcatacaaagtttagggaagaattaaagacacttatgagaagattgtatgaatcaccctaagaggctttaggaccgttttggataacacttttaacttatgccttttgggagcaaataaataaaagcagaagtaactatttttgctatctcaattttaagagtttaattgaataaaaatttgtttcaacataggaaagtgttggggcacattgagaattctatgcaagctacctgctcttttagcattcaaaaagctttcccaaatagggcttaagaaacattatgcagaagtaggagaagcatggaaaatatgtttctcattgagagttgactgattccttgttgcctctatacaaagcaacaccaactatctagaggtcttcctcttcttctcaatcaatctagtgttaagatcttctcccaagttgctttcgatgcaaataaactcacttttattagggttgttgaacactattcttatttttctgggaaaaaaatttccatcagctgcttctaaggagataaaaagatgttttgacagagaagttcctgtactttggatcctttgcacaccaacctgtgctctagtcacaacaatttcttgaatttgtgatagaaaagactccataatagccaactcctatcttggaagttccttaaaaaaaccaggattccaatacccaccgtcgtccttgtagaatcttttgaccttgcaatagaaaagaatgagggaaaggattcttttaaagtggttccaccataccaaatttatcatcaaaacttcactctcttgtcatcacttgcatcaaaggtagttcttttttgataggtaataaactttatatttattatatgaactacacctaacaaaagggcatgctaaagtacttgacaccaagttgaaggatatgtaaaaaacaactcccatccatacatagagcttagccaatcaataaagtccaacatggacaaagagtaatcacatacatacacatcgattcactccaaaggattatacataaataattgtttaattgcttgatccgttattttcagtatttttaaatactctcctatttctccctttccatatagtccaaaataggcataaaggagcaactctctaagctttcttcctttttttccctacaaaggattcatgctagtggaggagtgctttccttcttgaggagtgcattacccactccattccaaatagagcatacatgttgtaccacaggatgactgctttcaagtagtgaagaagaatgcgatcaactgattcttcttctcttttacatgtatagcatttattcgacatcttccatccccttcttttgagttgatccaacatctatatccttctccatgcggcttcctaagcaaaaaaactggctctcgatgggatctaaggattccaaacaagactaaaagggaaaacctcccgcacttccattaaaccaagaatggtatagagatttgactgaaaaaataccacccttggagttcatcgaaatcattttaatcttctccatctttgtcaaacatttgcctaagataagggatggaggactagtatcacattagtaaataagcagaataaattgaaagtgcttgcaaaaaggcacaacaaagtacacatggagtatgcaaatatggctaaaaggcgagctagggaaaaatagagagaaactaatacctaccaccctaccaacccccaacccccaaggagggtaggaaacccctaaaagaaaacctaaaagaaaataaggaaaaaaaaactacctacacacctcactggagaaacccctttcagggatagaaacttgcaaagaccacctatgatcccttctgttaattcccagcacccctcccctttccctttatggtggacagagtgctactataattgactaaacattcaagctttcagatttccctctctaactgaaaagaagccaagggtttcctttttccccctgacaccttaaccccatgcatttttttcgaatccaatttcctaagaagaaacccgatttacttttccaaagccactactagcatccccaaacaattactcagcttgacaaaattattaggggggctacaaaatcctcctcctccacaacatctcccacgtccaagtctctaggagaaaccgcctcctcaacctttacctccaactcccgacctgaagaccctttcaccttccctgaaagctccaacaaagtaccatcatgacatcatcttcaaaggctggctttcaggggtcaaaagtcctgtggaagagagtcaagaaggctgaggatgtctatttgactctgccaagagagcttcatcggtgatcactactcgggtcttcaccattgacgctaggaaggggcctcacctctcgtccacagtacccactctgcacccctcactcctcacagctgccacaagggttttaactatggaccaacaccagaaggctccgacacgagctctgggaacgtatatgcctcttagccacatccccaccttgctccattctcgcctcttagccgctgcttcatcaccaccctcttgcaccggcacttcagcctcatgagagaggaaaaaccctaacaagcccacagcctccaaccaaatccttacaggggcatacctcccttgaggccacctcctttttaaagcttaaggaaacctggggccgacccatacttaaaaaatcccccactctgcagcctgattccaaccgggcgaagcccatgtcttttggacttggggcctcctccaacccttgactgcccaacaactgagattcaaacccaagcccaccagagaaacttttaaaacccgtctcttccaaacacgtcattcctttgccagttgttcccctctcaataccgcttagaaaatcccccccttctgcagctttctcaactgctgcagtctcacctgtcttctccttggtgtacggacacggggcatccatatctacagatggcagaggctgcgcctcctttcccacccctatgctggtgcctgagccacccaccccatcagccctaacctctatctcaccatgctcaccgctacatcttcttggcacaactagccaaaaacagggtggcactttccaccacaactgaaaggagaagctgggactacctactacaacttgcagcgcaccaggcagagctcttccaagtgatttaaccaggatcctatcccactgaagattgtacaaatgagcagtgttttcatccacggtgataaaactaccacaacagttcccaatcttcttaaacacctcctgactccacatatgcaaaggaaggcccaacaccctcacccacacatccttgaacatccccctcttgagcaaacaatccacctctggagtccacctaaccagatgcaaaaaattcttcttaaaccttcttgagcctcttgcaagcaccctctttgcctcagaggtatcctcaaactcaaacaaaagaagtgctcccttggaagcagaaatcttcaccccccctggcatggaccaaagatttttcacaaaattatttaaagaggaaaactcgggagaggaaacagaaccctccccaaaccacccaaccaaacactgcctcaactgctcctccctaccgcacacctcattttcctcaagctgaatccaaacagcatctctcaccactcccatgtccttcctgagggcatcagcaaaataagaaaatttataactttttgacttcgaagtgcgtcaaaccaaaatttggaccatatggtgcattcttctatgcatttggtaaacttttataggtggtggcttctactcttctccatcagtctaacttgccctgacccactccttccacacactcctctaccaacacacccatgcccctactgtatactatgtaagatgagctagactgtttcctttgtggaattggaatggtgattgattttagatagcatattaaatctgtcttaggattatagtgatggatagaaatcaaacgaattgtcacagaggtgtctatttagcaactaacaatagtcaatgagatcgacgttcattaaacagaaaatttcttctatttcttgtacaaatgattaataactcagccttttggtcattatgacaggtggaaaacagaa

SEQ ID NO: 10297 - DNA, 10042 bp, Vitis vinifera
  Intron number 8 from transcript GSVIVT01010214001 (locus G SVIVG01010214001) derived from phytozome v7.0 (chr-ID chr1 ; pos 17649736 to 17659777 reverse strand)
gtacacgcgaagacattgtggctgaactagaagaggtaagtggtttattttagttcagttacattactgctgtgtgcttgcatacatttgtctgtgttatatttaatgtaaatcaagagtgttttagataaaaagagagaaaaaaggatgagatatccttccaaaaagtgaaacaaataccacaaggaaattgacccaaaaacactcgtagcagctaccctatgctcaaaaacagtcgagggtgggtgtccttgacaaatatcctggaatccagtacccctcttggtcaaacagtcggctagctaggtggttgattgaggtgtccaaataaaaaagttaaaatatctattgcaagatttctcattcaatgaacaagctgccaagaccaaccctatgtaaataaccttggatatcatatttcacctgtgcatttaactaaaagctcaacatctatagtcatctgcatagcagctgtgctgataacacctcttttctctagtgtctattaacatgaactttctgaagtacaatcatcagaattcttgaagtttccatatcagggaggagaccaaggcaaatagttttccttattctcttgttacccatgcaaccaaattttttatccaaagatatcaatgcaaacactaaaagatttggtgggcccaaattatatcaaaatgctatagtaggtgacacatgcttgcacctaagaagccaatgtcttccaaattcaactataagtagcttaattgattaatcaatttaaggcattgtcatatctgacaatttgagcaagatattccaacttaatctcaaaaggcaaatttagtgtgcttgcaggaaactaaaattcaagagatgaccattgggattgtgtggagtcttggggtgggaagatgtttagaatggggtgggggggtgtgggtggtgcgtggtgtggtgttttgggacaatcggtgttatagttggcggagttggaggaggggaacttttcagtctcttgttgtttcaagaattgtgaggatggtttctattggagctttacaggggtttatggactcacgttgaagatggaaagggaaggtttttgaagtgagttgggggctgttagaggattgtggagtgatccttggtgtgtggtaggtgatttcaaaatgattagattttcttcagagcattgattttttatgaggtgcgaaaggagcagatgacatttttttgtgttggctgttgatgtggtttaagacaatctttgggttgagagttaatatggataaaagtgagctaatcccggttggaagggtggagaatgtggaggatttggattcaaagcttggttgtaaggtgggaaggcttccgtccacttggggatgccgttgggtgctccttttaaatttgtatttgcttaggatggaattgaagagagatttcgcaaaagattggctatgtggaagcaacaatatatctctaaaaggagggagaatcaccttgtataactacctatttgtttcatatctattctccagttgctaagagtggttagaatgagattggagtagattcagagagattttcagtgggaatgtggggctttagagtgaagatatcacttagtaaggtggacgactgtttgtctagataaaaaaaaggagggctaagggtaaagagccttgtgacacttgataaggctctccttggcaagtggagttgacactttgcaaatgaaagagaggttttttggaacccagtgattagggggaaatatggggaggaaagagatggggggtgttcttgcgaggtcagggaggggtatggagttaggtcgtggaaagcaattagaaagccagaacatcttgtgagctctagactttcctttgcggtgggaaatggtcagaggatgagtttttggaaggataagtggtgtggaactacacctttgtgtgaatctttcccctttttatttgccttagttgcatccaaagaggtctgggtaaaagatgtttgggcagtaaacgaagaaagggggagggagttagagcccttatttctctaggcctttcaatgattaggagatggatgaggtggaaagattgttattatgtttgggggggaagagggtgaatttggatgaggatagggtgaggtggttggaatcgaaggatgacaatttagattcatcagattttttcccaaggaagataatctggaactcttgtgtgtagccaaaagtaagcttctttgattgggaagcttcatagggaaaagttcaactttggaccaaatttaaaagaggagatgggctttagcaaatagatgttatttttgccaagcgtttgaggagtccatcaactatcttcttttccattgcgaaaagacaaaggaagtgtggaagttgcccttttctttgtttggagtgtcttgggtgtttccttccttggttagggaaacccttttggaataggtcttttgtgggtaaaaagcgtaaggttgtttggaaagtgggccctttatgcttgttttggttaatatggaagacaaggaataaaattgcctttgaagatagtgtactgtccatccaaagactgaaagcttcttttgtgtatttactttggttggagaccaaattgtttataaaatatggtcatttgaccttaattgattttattgattgggtgggttctccgtgagggaggggttgttttttgtatatcttgttggacaattttttgtttcaattgtaagggggtgtgtgtccctttcctgtacatctttgggcagctattttaacacctcgtcataatataatacttttacttataaaaaaaaaattgaattacctcaactttcttaaatattgaggtttttattttattatatatatttttgggttgggggggagggggggttgggaatgggaagcaactcaacaaaagaatggacaaagctttgctcaaattccaaggaatttcatatgccaatggagtaagatgaaaacacaaatacaagtgcccttcatttttcaaagtcaaagactaagatgattataaggacatgttttcaaaagcattagttgttgagatgtaaatgcaagacatgcatttgagtctctatccatcttcaagagattaaaccccacacctttaatgacttggctacttgagcccatgacatggaactcaatattgtttgtcatggtgtatagaaagaaccctgtaatcaaacgatacaaggcagtcagggaaagaggcttgatgtgaatttgaggaagtatgacaagggattaatgttagttaacacaactagagtcaaattctcaatgtaggttaaaagggctgttggaagtgtaattagtttaaaataaaaataaaatgttagtttaatgttaaagagatggaacaaaggaatgccatgttctgtactttgatatatttgacatgctgaaggatttggtctagaaaaagggtcattgagttaccctagtgaaagtgccctcaagaaatgacctaaagtactacaaataccatttttttttcaattatctggtggaaaggcatcttgtagaggagttaatatggaagcatgccaatgaagtatccatttagatctttttttttttttgataggtaaaggaatgtatattaaaattagaaaaaatagccaagtacaccaatgtacataagacgtatacaaggagcacctaaagcaaatcccttaaaaagagcataaaaaacactcaaggcctcaataagaccccacccactctacaaaatcaaacaagggcattgagtctccctttatgtacatgctaacccaagaagagagattacaaagaaatgaaagttttaaccattggtcattttgttccttatcttcaaaagctctttgattttttttgctctagattgtccaaaaaatgcaaagaggagcaaggttctatacctttttccttttcttcccaacaaaggagccttgctaacttaagagcagaaccctcattgaagaaaggatcacccttgccaccctaaataaggaaaacgataggtgccatagaagccttacttcagagcaatgaagaagtaaatgatcaatagactccccttcttgcttcaccctctcttttggagattatctaaagttagcactcttcttccctaattagatttccatgcaaaaaggttactttggacggtacccacaaattccaaataatgttctttagaacaatgatcaccctcctcacatctagaacctcatagaaagatttgatggaaaaagatcccttcttatcatttttccaaaccaccttgtcgttatcgtccctcctaatcaaattccctttcaacctagagagaaacgtctcaacaatgcccaactcccaatcactaaagtgcctggtgaagcatgtggtcaaatgtcccattgctcctgtgtcatcccaaaaatccgccacccacagccaacacatatcgataagggaaggacagacacaaggattcctccccacaccaattgtccatccagaaaggacgttctactaaagaatagatcccaccccttcctaattactttccaaacaccaacctcatatccatccctaacttcacatggatgccaacccactctttccttctacttcccaaagaaattcccatcaaagacatatctcaagcaccacttaccaagaagggctcgattcaggagagaaagacttctaattcgcaccccctctcttgtttgtgcaaacaatcaaccaactaaccaaatgaggctttttttctagggatgacaaacaaggccatgtaataaattgacaagctcaataactgacttctaatcaaagtaagtctctctcttttagacatgtattgtcttttccacaacgacagttttatgtgaaagtgtgaaacttttcttctacaacatcccatattgcttttgatctacatggggctcccaaaggtaatcctagataagtggaaggaagtttccccaccttgcagcccaattctgttaccagaatatctacatctgtaacccttccaattggaatcaattcgcttttatccaggttggttttgagccctgataatgcctcaaaccacatgagcaaccaacttagatgagtcatttgctcttgggaatcctcatataagaccaaagtgtcgcctgcaaataagagatgggacacaaccatcccctctccctccctcctcctccttccccctcgccttgataccagacaagtagctcccctctcgggctctctccaacaagtgactcaagacctttatagctagaacaaacataaaaggggacaaaggattcccgtctcaatccactcgaactctaaaagaaaccagaaggagttccattaaccaaaattgaaaaccttgctatggaaatgcaccattgaatccatctaatccatttatggacaaaatccattttttccataactgcaaacaaaaaagcccaatggacatggtcgtatgctttttctatgtccaacttgcaaatgacaccaatggatccgacctttaaggttgaatcagttgcatcatttgctacaacaaatgcatctaaaatttgtctcccctctacaatggcattctgaaacttagaaaccactttttccaccacttagaatcaaatcatgccactattaccttcctatctttcaagcccatacattttaccttgctaaagtcattgatgcctttattttcctcttggagaagcaaatatcacataaaaatgctttcatctatcttaactctgattttatagaggacaaatattggtgactagaaggaagttacgtagtaagcatgtcccactttttctaatagtggatagtgcaatagcacttatcaacacttgagtaggaaggtgaaaaaatgttaacaagaggaatgttccaaaaatgttggaaggtaacaatatggttattttgtttctgaagtaaaatattaattaaatgccttcatcatgcagtatgtgggcagtatacataagcctcacaaaacctgtaattcaaattcaataatctgaagattctgagcttttataattaccacttattcttattagaaaagcaggctttctacaaaaatagagcttggaaagaattggtagttgattgattgattttttattttattttattttattttaaagtaggttaataaggaaaaggtttctggaaatttatctttggagtaaccactcaataaaacaaggtttctaaaaaatttcttcatatatatatgaaatatgcattttatgaaatttagatttcaattgtcttttaaggatgtaaatagttaattcttttaaggagtattctagtaataaaggtctcaacaaactaataatctgtaacagaattgatcttctggttttagttagaaaatcatcaattttgaaagcacctcagttttgggctaaacatatttcaattaataacttataagtgattttgcacataaaaagttgagtttaaaattttatcctaaatgaaaaggtctaaaatcatgacctctagacaactcaatagttttagaaccactagtgcatatcaaaatgtaaaattcaatagctctagtaagttatttgaaaaaaatttgaaacttgtaaaactcaaaataattcaaaatagatttttgtttaattaatttttccattagggcttgtttaagatttattatatacccttagaatgactttcttataactttccataactaatgtgcttgataaaataagaggaaagtgagtgttagagaatcttactcattttggtagttattttagaagcaagcaagagatagcattttaaaagtgattgtacaagaatcaggtatcttctttaaattatccaatatcctcatataatttgtgagatattaaatagtaaatggaatattaacaactaattgatgagctatttttatttcttattaatgatacaattatttaatattgtatacaataaataaatattatataattttattaggtattttaaattgaattaaattaaagtatatatgtattgagtatatgaaattatttaatgttcattaaatatttgattaaattttattatatagaataatattatctttaattatattatttctttttctccaataatttaattttttgtttttttgtttttttgttttttttttttgtatttgaaattagctaccaattgtccaaatcataatgaatgattcattcaagaattaatattgttgtaactttagtaaacatatgatgatgttaaatgttagttggaactcttttgttgttgatgtgataccttttttgtttttttctttcctttttgataggctataacaaattgtataaaaaagagccaaaaaccagcaaatcaaggttactagggaaaagactcttaaaaacaagaacccaaccaatggaaactttctcccaagcaagaaccctatcaaccaacaaaatctaattgactgagctttcctctatgcataactttacctacacaaaaaaggtaactaaggaaaagactcttaaaaacatggactaactgctcttccttttcaaatgatattctattcttctctttccaaactatgcgaaaaatggataacaaagcaaatctctaaaccttcctttgattcttttaaaagagtctctatgactatgggacaaaatccaagtgacgccaaacaaagagatgagcaattgccaaagaaaccttatcttggttcagtgcagcagtgtgatcaattgattcttctttaggagaagcatctattaaccaacattcatcctctttttttgaagttgatcaagtgtcaatacctttctcaaacaagctttccacacaaataagtgtactttagatggaaacaatggattctactctagttggaatagtgattaaattccccaactccaatgcagcataatgagacttcacaaaggaggaatcgttccttgaatctagctacattgctttgtcctcctctctattcgccaccttaccttgtagtctaagaagagcaactccatatcatccagctccgaatatacttgtttagggtttatatttaatactacttgtctaaaatggcaaataaaaaattattattataactacgcttacttcagcttagttaaaacagacaaaaagaaaaaaatgaaaatattcctttaaaatataaagatggaaaagaaaatactaacaattagtttttaaatggtatgataatttattaattaaagattgagtttatatcaaaataaaggaaattgattaattttttagcattactacttttgttattatagatgttcacaacaatttttttaacaatctaatttgtcaaacacttaaatgttatttgtaaaactcaacacttttagaatttactaaatgcttaattgctttacgtcacaactaatttttctcttaggacaactgaattgattttcctaaaaactgcagcaataataacttggccttaatattagtttaggaagatacagtttctactgaaatacatgaattatctatactaataatatcaaaacacattgaacattttgacaacattgaagaagtgaagttaatggaatttgtatttccatcccaatgatgatttcttatgcatatgtaatggagaggagaagcccaaacttggttcctctctctcttgagatcccttagtataaaaaagtgttagatttctccccaaaatatttcttttatatttttgcaaaaaacaaacaataatcatgaaactaccacttgtaggctttgtttagatactaaatttaaattgtgggcaagctagttatagctttttctagcaataatttgcattatccctatggccaaggacttgctagggaaagattatggaaatatgcctagtggtggaacaactaaaatcaagctgtaatcatgtgattgtacatagatcctactagattcatagaaagttaataattattaaaattttagatattgcactcaaactccaaatgctaatattaggatttatatgcctaaattcctagtagtgcaaattttccaagtattcttctgcctgtggaacagccaaaggtcagtgtgctccatcagctgaaaccccttaattttattttatttttttaattttttttataggtaaagaaaattcgtataaaaagtaaagaggagacaccaaaaatagtgccctcaaagtatacaggaagtgtacaaaaaaagtctaaaggctcaaaccagatggggagggagaaaagcaaaaaacatcacctgcccttacttagagcctaaacatcgcctgcccttaattatttccaagttaattggagtcaaaggtggtatcttttctgataaagccttcttattcatttgttctcttgtctccattttcataatgatataagagtggatttggttgataggtaaatggattaatatttgatccaaaaaaaggaccatgatttcatttcttttgatttttattaggggaaaaaaaccattcttctgatactgccattgactttggcctttggccatatgttcactgataaataatttctatcgcatggttgaagcttatttgaagaatgtttcattgcttgtctttgttgtacttgtccaatatttggatggtatggattaatgatgtacaagcttttggtattcaatatgcttagctctcttttgtgggaggattcctcatccttcttttgtgcttcttatatcctatttcaatataattcattgttgttctatcaaaaaaatgatgtaggagcttttaggaaaagtgcatgtgtattgttgacctcttgtttacatgggttgcttctctcataactcaccttgaagtaataatatatgaaaacttgatggtttgcatgtaattcatatattctaaaaaattaattttgatttgtgcatgcttatggacaaaattgacaatcttacaagcttctttttatgacaggatctacagaactcaaagtcatcatttgagagaag

SEQ ID NO: 10298 - DNA, 11027 bp, Vitis vinifera
  Intron number 1 from transcript GSVIVT01029283001 (locus G SVIVG01029283001) derived from phytozome v7.0 (chr-ID chr1 1; pos 17591771 to 17602797)
gtatctgctctggctcctcagcaagtgtgtgcaaggtaagcatattatcctcctttcttcagtatcatcttatttgcagtaatgttctgctacttttcttttatggctttattcgttgtttgtgttgtacacttcttcttcaactttactttgattctggccaaatgattcactacaacacactgcctaatattctcagagagaaaaaaaaattggattgagtatgaaagtaatctcagatatgggatttcaatcttggccctttttgtaatgggaatttttggatgctctgtcttttcttttctttttgattttcctttgggggaaaatttcatcctaatgttgtgtttggaagtagaccaggaaatttgaaatgaaaggagttaaatttctttcattttgtttgggataaggtacatagatgaaaaaagaattttttttttaatattttaactttgcttcaattttaaatgttaatgagaattattcaattacagattatatatataatttaatttaatttcattatgtgaattcttcaaaagaataatcatgacaaattattttatactgaatttctaaatttaaaatataaaataacttataactcttaaactttatctaaaaatcaaatacggacttgtcgatattttgttcaattttttttcgatgggatgtgggatgttagatgcatctgagaatgatgcatgtagaaataaggatgacaacaggacgagttcggaatctcaatgtaacaagagatgacttcaacgacttctcatggaatctcaatgtaacaagagatgacttcaacgacttctcgttgagccagcctcgaatctcaaagtaacgagatgacttcaacaacttttcgttaaaccagccttgttcaacatggtaatgaagtaattccagaatttcaacgactctcttgttgaaaatgtttaatgttaagaggcaactttgggagctcgtctttttacatatattttcatctttatctcaataaattaaatgaaatagagttcatttttatctcaaaaaaaaaataaacgaaatagagtggagcatactcacttcgttgggtttaattttctttatgtttaaatttttttcattatattataaaaaataagcattatgatttttttataatttattttttagaagaatgtttttattattttgtgttaaaaaattaaattaaattatttttaatttaattatatattgataataaagacatatcctaaatctctcaaaacattcatcgtattgtcatctcatgtcttatcccaaatttattttacttctaaaaaagctcgttccattatcacaaaaaaagatgacttttgaaaaaaccctttccattatcacaaaaagaaagaagtctgtaggggacaaaaatagttgatttttttccctttttttctcaaaaaatgccgaagattattcttttattttaatttcaaatttttattcatattatattttttatgtttttatatttattactttatttttttttaaaaaaattacaccttataactttattttaaatttttttttttcatatttatcactttaattattttattttaaaaaaattacaccatcacactttatttttaattttttataatatttattattttaattctcttattttaaatttaaaaaaaaaagctatgggtgctttgccttttttctttttctttttccctttttcttttttgcttttttttaagttggcaagttttacccagacaatatttgatcttatctacttttaagattgagtttgaaaacaaacctagaagaaaagaatctcattaaggagttaaatttccttttattttgtttggtatgagggcatttaaagatagtaaaataataacaataataattttgggcgaaaattttgggtcaaaaatcgaaatccactaaggcataaatgggattactgaagtaaaatatagttgattttaggccattttttcgattattttttcaaaaatgcccaatattatcattttattttaattttagttttaattatttatttatattatcattttatttttattttttcatatttatctctttaatatttcattttagcaaactacatcttaccactatattttaaatttttatcatatttattaatttaattatttttacttgaacataacaaatagagcgacaaatgactaaaatataaaaaaaattaataaaaataaatattttatactaaaaaaaaaccttttttttttctttcttgtcacgaagtagtctaatatattgggaaaaaaaatcttggtactcattaaatatattcatttttaaaatattcaattattctttatttctttttccttaaaatattctaattcatttcttcttacttagcaattcctaaataaatccgaaccctagaataaattaacctaaacacccaaatctaccatttttctcttgatgttaaaaaaagtccctaattcatgttttcttcattcacaatccctaaaattgaggttgcaactcataattattgaacttgtcttaaaccaatccaagtccatcctaacgttccctaacctagaaattttcaattttagcttggttagtgtattcttatgagttctttggatttcatgaattaaagataacaaatttttaaaggctttcttggagaaaactctcattgggtcaactagtctctatgtccttgtccatggcaaagacgtatggccagatcaacttccatcttataaaccaatcatcaagctcatatctaccataagcaaatttgcttctataaattataatttgactctatttaccttttgagattatcaatgctttgtaggcatagacatctaggtaagactactattgaattaggagattgctcgtcattgtgccttgataaagcaattgaagaaatcatccaaacccttttcacctagggaattgtgtcacaaattttggtactttgtttcattatgccactttaacctatacaatggcatatagacacatattattagaatatttgggtattttgcaatatggttataagttagttatataattgttagttatatttttgttttgtttgcaactagtgacctagtaggttgttataacttcgttactagcctttattataaaagctttatttgtattactaaagcattgaagtgactatattccaaaattatcgaagaaataatatggtatcaaagcaatttcattcgtctctgtgacttctctaaccctccccttccatttttctgatgccttgtggcggtggcactactaattcaaatcaagcaatggttggcactcccaattccttaaataatggaagattcaagtaatccatttttcctccataatggagatgactcaggcttggttctagtctcatatcagctcattagagctaactataattcctagagtaaaattatcaactcattaacaacactcttctttgaccttcaatagacgatctcctttcctctgtttagattcgttgtgatagaatggtaacatcttagattttaaactctattgctaaaaatattgtagataaccttctctatgttgatagtgcttttgatgtttgggttgattttcacaattaatttcaccaaagcaatgctctatggatcttctaaatcaagaaggacttagtttctcccgagcagggatctatggatgtcaacgcttactacactaagctcaagatcctttgggatgagctcaaaaattatcaactcattcttgtttgtcactgtggaggcacaaagtcttggttagaacaccaacaacaagagtactcatgcaatttcttatgggtttgaatgtgtcatatgctcaaacacaaacacaaatcttcatgatgaattcttttcctctaattttgaaggtctttgcattggttggacaagaggaacgtcagcatattatcaatcaaggcccttttttgcccatcaattctcttgtgcttaacatttcgaattcatctgcttctattgcaacaacaagtttttctccaaattcaaccttgaaacccaggcgtgagcgaccccaatgttctcattgtgacatacaaggatatattgtgaacaaatgttataaattacatggctatcttcttggctataagccaaaataaaagaaatttgaacaaaaaattcaagctacctaggctaatgcaacgttcattgatgctattaactttggatcaccccttggatctctcatttaagttgagtgtcaaccgttgcttgcattcttgagctctcaacttcataacaactctcttgctatgcctaaatcttagcagctagaacccttggtttcctatttcagtggtatactatctcttctaggtctcctaattttccagtttcttcttttacctagattttagacataagagccacacatcatatttgttgttccttaagcacatttatagaatctactccaacacaaaatgctttcatgactttgcttaatggtcaatctatcgctattaatcttattggttctatgtttttgcctcctaatctcattctcaataatgttctatttgttcctaatttccatttaaatctccttcctaccagttctcatacttagagtcataaatattctattaatttcatggccgattcttatattattcaagactatacacaaaccaaaacaattgggatgagtaaaagacatggcaacatatacttcttgaatccaatcagttttcattccatttcaccacaattttccaatcattgtaataatgtttttttgtctcaaatgaaatttggcattatcgtttgggccacctttcttatgtaaagttacaaacacttaaagatgaaatacaaaaaaaaaaaacaaattctagcgattcaattcattgtttagtttgtttatcatgtagccaaacaatgaaaattacctcttatttctcacaattatttgtctgctttgccttttcaacctatacactatgatgtttaaggtttttttcacatacttaccactgaaggtttttaatatattttttactattatggatgattatactcgttttacttgggtgtatcttttgcatgctaagtctaatgttactaatgttattcctaatttttttctcattgattcgaactcactttggaacacaagtaaaactagttctctcatataatgctcttgaattagcaaattctaacttcttttttgtgcaaaaggagtcatctcatttcattcttgtgttgattagccttagcataacttagtagtagaaagaaaacatcgacatatcttaaatattgcattggctttatattttcaatcacatgttccattggtttattgagagaattgcatacttactattatatacttaataaacagaacttcattctcacttttatccaacaaaatagcctttgaacttctttggaaaaagaggtctgcatattcacatcttcgtagttttggttacttgtgttatacatctactttggatcatcataggaccaaattctcacctcatgccattcttgttgtctttcttaagtacccacctagttataaaggatacaaattattgaatctggttattggtcactaattctatgttcatctctcatgatgtggtatttcatgagtccatatttcctttcaaaactaatcaagcttcttcttctcttttagacattttccctaacattgtttcaccatttccatattcttcttccactcctaaatctacatctttgccaatgtcaacaagtcctactattttcatgcttcttgcatctcattctcatctcaaacatgttcgtaatacatatgatgacatttataaagagattctatgtaaaaaaaatagctaaagattgagagataatgaaccaaccacaataatcactttttaaaaaaccttaaccccaacatttaagttataagattggtggtaagaggcaacttacaaaactctaataaacttttttacaagaagtggtcatggttaggaagtgcaaggagagaaatgaagttgagcaataaaataggcaaaaaagtaaaatcaaagtaccataaagaacaaaaaaatgatcaaagatcgaaataagcatttacactactcaatactacatactcacgaatcctcatcaaaatttagtaatttaaagactctaaatagtcacgattgatatacaaagacctaagcaagtgcaatcccaattgatagcaagtaccattgagataaaagacacaacaccaaagaatgtaaaaacctacaataccctatggaaatgctagtttgaacttcaattctttctccaaaagtgaatagtggggtatgggttcacttgttccttgagtaaagcaaatctaagcttgaatgtaagcaaagggaatgtctcttgatcaattatccacatgatttgtgaagtattgatggatgatcagtggaatataaaaaaacaaattcaagagtatacttggggaaacaaaacacccatgatttgtttgtggcatcttctacctactagtgcttaggagccttgagcccattgataatccattatcttttctaagaaggatttacaacaagttgtttggtctcataaagactccaaagtacttaatatccttaccgatgggtacaacatatatcatatcctatcggatctaagcgactcaattgttttaaggtaggtttcaacccattatcaaatgaactgttaactcattagtaatgctagttgagtcccttgttgcatttaatgattggagcttattattacttggagagattacctttttgtcattgttggaccaatcatattaatggtaccatttttaaacataaatcacttgtccccttattatttcatcctcagaaggttataaaccaacacatgaaactcatatcattcacatacaaataggtggtaagttatacactatgaaagaacaagtcaacatattaaaggaccaactaatcttttgtaaatgtaatcaaattatgatttaaaaacccaaaaattcaagaaaagtagaagtccttgaagattagtatatgcctaagaaatgacaattatttcttagcctaatagctaactatgaagtatccaaacagactaagtccctacaattagggccttaaagacaattctcttatttcctgaggataatttgtggcatgtattcttagggatgcaaaatgtcgataaggaaaggaacaactttgaaggctttctaattatatgacaatatttttaacatgatagaaatacaatttttcaccatgtgtcatcaactctaggttattataagtataaaccatttaggaagaaggtgaggaaattcacttcacacaaacaaattagttaattaagaggtagaaattgtactagatgttggattaaagagaaatccactgcacagattggttagttaatgttgtgtttatgccaaaaaagaatataaaatgatgggtatgcatagattttacttatctaaatgcctccaagggatagttttcttttactagggatagaataggttttaaataccatgactagatgcaaactactttatttatggatgaactcttagaatatagcctattccaatgcatccaatgaactaggggaagatcatgcatatttattgctagttgaggactatattgttacaaagtaatgtgattcagttttaaaaatattgaagcaagttatcgaaagtttgacactataatgttaaaacaataactttgactaactataaagatacaaatagatgacatgttgctcaaaagaaagtatgagttgatcacttatgacacctacaagatttctttaaattaccataataggaacatgaatggatgaacaaatatttcacaatggtaaaacaacatagttggtatttttatcacttgcaaatcaatcaaatctcgtgtgtgaaaaatgaacaagcaagtggatttgctaacatgacatctagctttaccatggtaagaaacaaaaagtcttatggttgagttcattgaaagctcgacactaagtgaatgcaagaacaattggatggaccaaatctcaaataatttaaagaatgaaacattgctttgaagtagtaaggaggagtcaaaagtacaaacttaagttgcataattctttctcattaacaacaacctctatatgcaatattttaaaggatcttacttaaaattccttaggacaactaagcctttaaatgccttagttaagatgcatgagaggatttgtggaaatcatcaaggcaaggcattggatggtgcattattccctaatttaagggtattactaaaactattatgtagaactagcctatgctaaaaaatggaataggttccaaatgtttgttgaaaattttcatatacttccaaagttcttaagacttataccaagtctaagaccttcatttaagtgtattagacattgttatacccttttcaattgtccccatgtagaagaggttttatctagatatgtagagattgaagcgtactccaatataaaggttattaatgtacactttttctttcttttttctttttggaaaatttgtgtctccaaactctcaacttcaagatagaatattccaagccttgttgatagataatgggtcttagtttgataaccaaactttcaagaacttctatgaacaattgggcatttgctacttttactctactctagtattagtaattcaattgacaacttaaagaaactaataaggccatcatgggtcatctcaagcaacatcttaaaaaaatcaaaggaaaatgggtagacaaattcactaaggtactctagaaatgtagaattatcccctaaaagtttttgtaactccaacaaaaataaagatgcttaatactcaatcaactgatataatggaacataactattaagttactaattgacctaaaaacttgagttgtcaggtagtaggacaataatgtatattaggcctatttgggctttagcattaacatcttgccttgtgggcatccatctttggagttacatgtaggctcaataaattagagaaataaacaaacaataaagtttgaactcatgacctcctataaatcttagttttgatatcatgttacgttataatcgttctaaaagcttatacattgttaagtacaagtcaccttattagacttagtagaaacgaagacataagcgactttgattcaattagcctattatcatcaacaactaagatcttaccatacaaagaatttgaccaaggtgatttcatgttagagggctagtgctttgaaaagtcttttaagaatgttaaagaaaaaatagcaagtaagcttgatgcaaattagcaagaccactataaagttacatatattggaggttcaagttattcaagctataaagcctcaacaacatagtaatttcaagccttgaaatgaaatgattttgtagctacaaagattaccattagttgatgtagctaaaccaaatcggactccatagaagtgttccttgcgttgaataaaatattctcctaaaaatttacgtgaaacaaagctcatttggcttgtcgaacgacggcccaaagatctgctgcaccttcccaattttttctcttccttctctttgtttcttttctcccacttttctccttatccgcttgccctattctctctcttctatattcttctttctttcccgcacaagaccttccttattattattattttcattttctcttttctttctcttttcaattttaagccatcaattttctttttcttttctttttcaactgttccctgcaatgcaatcgaccacttatatataatatatattatatatattattactttcctagtaaaattttattatccaatattacaattactttagtaacaaataccatgacattcaacctaatatatcatttagcccttaacctaaaataacacctatcaatgtggcatagcccataatactcattaagttagacccaaaattaaagataaaatagagagaaatcataatagtttgcaaacataaaattatttgaaaatgataaaggaacacttgtaagtagatttattatgtaaagaagtaccaccaaaaacaatgagggacacctcatcctaacaattaggtggaaatagataatgaaaatgtataatttatttggtagagaacattaaagaaatgtatcaataagtagttcaacaaagctcttattatcacattaatttattatcaactttccttcctattcaagggtggttcatttcatgaattgcatggaatttaatataatattgtaaaataatctcatttatgctttttattattattattattattttctctattaaattttatattaatgatatttatgtgttattagtactaaattctaatttgttgattcatttgagaaatagaaaataaaattttaatgctcatatagttttttttttcaaatatcatattttcattaataaatattgatgggaagagtgtgtaaaataggaaaattttaaataattatttaaaaataattaatatttcatacattattttttgtcaactatagtatctttaactattcaggtactactttttaatggaataagtactatctttgatcatcttagatattacctttaactaatgagtttatgaaatttaaattatttttagaaagttcctattttgtaattatttttatatgggtatatgaaataaacttttttctcgaataaaactctttacctttttattctaaaaacatgatcaacttgtaaaaaatttactaaattcttaattaaaaatattaaaaacgtattataggatatattatacatgtcatactagcacttccatcatgaaaaaggaatgttattgattctttatgaacaattttgtcaaaaaagtttcaataaataatgttatgtagat

SEQ ID NO: 10299 - DNA, 832 bp, Vitis vinifera
  Intron number 4 from transcript GSVIVT01021248001 (locus G SVIVG01021248001) derived from phytozome v7.0 (chr-ID chr1 0; pos 2946896 to 2947727 reverse strand)
gaagaaaagcagtaagtataatgagcattcagatgattctaaaacagctcatgagagtacacacactgcacaatgattttgtagatcacttgaaaaaatgacttcaaggggttggatgtgtatttgttcccagtggtacaaaatgaaattctaaaaggatctctctaatggggtatggcagacatgcttctccaaaaaaaaaaattctctgttcatgcattacctgaagatgcttataacataagacatttacttcacatgcttatgtgtttatcttttcactaggttaccatgtgcatcaaagaaaaaaatattttgtcagggcattgataaatcaaatgtagttgataagtggtttctatatattgagatagtattcagttctcactaaacacagtcatatggtatttcaaatatgaaatcagggaaaagaactattcaagttcaaatttctcaagcaattttagattagactgaaatctatgggttggcttcttctgtatttgaaattttgtgtaattgtcattttgttaatgattctgtaggctttatgcagagatcaaacaggatttttaatcaggagattcaatatactattcctccatttctgtattaaatactagtagttcatttgttttgtgaagccatcattaccacattctagtgtttgaggcagtgtcaatttaatcctcaacaggaaaactgaattgattctgttcatttgtgaatcttgatattttggggtcaaataccaatagttcagtgaatcttgctttaatgcaactaaatcaatgtgccagtaagataagttgatttctgtgcaggtctgcag

SEQ ID NO: 10300 - DNA, 3992 bp, Vitis vinifera
  Intron number 6 from transcript GSVIVT01018273001 (locus G SVIVG01018273001) derived from phytozome v7.0 (chr-ID chr1 5; pos 12206980 to 12210971)
attcaaacattatcaaattggtaatatatatgtttaaattttagtattccaataacattttttttccttgtaactgccctgtggtgaattttctaaattgtcacttgctctgtggtttggcttttccaaggggtagtcctgctttctataaattgaaggatcaacattgaaaccctgaccaaactggataacctggaaaccagacataaatatatttttgttggacgcccgactgtgaaattgcatactttctttttattttgttaataataggaattctgcttgaatgtaggagctctaggcaactagctaaatatgtgtgattgttatttcttttcctaatttcgtggcattttttttcttgtagtggacggattaattattcacatttcttatcgtcttttgttttgttttttcttttgttcttgggcggggggatgtaattcttctttacattgtcaagtgactacctacccttctaatggattatctcagcctctatttggctggttagacttttcagtttgctagtaatggttagtcaggctgcaaatgagcctgccaggtattggttgttaaggcttgcctttcttgcaattgcattgagctcagaccttgacttgactaatccatttctctttaggttttgttcacatagcttttgtttgcttgagcttgttcccaggtccacctaagctcgtctattagcattatctgaaatttgcatgtaaaaggccaacattgtatctgttcaatgttagtagttgcagcatactccaaaagcttccccaaccctttgttgtacctcaattacttttattacgtgtgaactttcttaaaatgtttcattgtatacatatactaatgggttatgtgtgtatgaggcaacttaactgtgtacaaccctaattgatttttgatcccgatgttgctcaagcttggcttgccaagcaaacaatcttgcaacttgaattataatttgaattgttcagttagtaatgacatgaataaactaaaacactggttttgatctgtttgctaatgacttgtttcttgccagccctaatgagtggtgtgacatgatttttctgaatagaatatttgaaaaaatttgtggtatagttttgagccagttaaagtttctgctatttcctttgacaaaggttactgccattagataataggagtaaaagtatggctaggacaaacctttatgatttcgtcataaaacctaaaagacttaatttgaatgagctttgttatataggaaaaatacagttggcctcaggcatgggcaatctcttgttcatttaaaatattattttgtgagataggatgtgttccatttgtcataataacaccaaacccaatccccctcaccccccataaaaaaaaaaaaagaaaaaaaagaaaaaaaagaagaaaaaaaagatgggtaatggagtagtgatttgcctatatatggctgtttatccatctctttttggtcacggatgaccaggatgccaaggttttgaattttcctgggtggtttgaattctgatattcccaaacagtttgcaagattgggagcttgaatcagtttagatgcttcttatgttgttgtaaagttttctggcgagtctagatagttaataggggatatgtgttcctttagcttgagaaatttctttgcaaattcttttggattgtcagcagatgactgtaggttggtttgttgcctcgataaattggaatccctaatcctgtctgaagtggctttcctttttttttttttttgttgccagacttacaattgtcatccacaagacacctggggttttgtcaagattactcgtggacctttttgtttttattttgttattttgggtaaatgaaatcagacttagaaactcccccccaacccccaactccttgccccctgaaccaggcttcaggagcattaattttagatctttttaggaattgatatattaacatgtggactcctaatatcaacagacatttggaaagtggcttcacattatgttttgatgtgaaactttagttggaacctcttaggaattggtgcattaacgttatgtcatgtgagctgtaatagcaaaatcatttaaaaaatgcctttgtcttaagtcctctgatgtttatggaaggaaagaaagtgacgacaatttgagaacgaggataaccatctatgaacttaaagatattgttcttatattccttttgttgtgaactcctcttaactttaagatatctttcctcaactttaaagatgggaatattttggccttttgtggcccttgtagtccttattccaggttctcttaaggaatttgtacctttggaaggggttatttaatgtaggtggatgttgaatatagtgatatgttagctaattcaagttaaccaagtgggtgaaggttcccgcagatagccccatgtccttttgttcttatgatcaccattttcatccatgcatgggcatgcatctgattttgagcagatgaatccatgaaaggagactggaaaattttctttctttctttcttttttttaattagaaacaaacttattcattgatacaagtttttaagtacaagtaacttatatattgtattgtgtattttctcccaatgttgttgtattgtgtgccttattttatatcataataattatttttattttttaatatatgttaataaatagaaaatttatgtgatgcatatatgatattgcaataatgaggttgagctaaatataaaccaatttcatgaagaatagtaggttaaaaaagcatatatttatatagttatttattggaaactagtttatttagatggaatgtgagatgcattttggctaatacccttgccacattaggggcttaagagagcttaaatgtagacattcattaatgtcacagacatgtaaacagtgaatatttagggttttaatgaaataaacttaatattagtatttttaatttatatattcactaaggtcctctttgaaaatgaaatgattgtcaacttgtaaactaaattgtttattattttcgtgtttctttgtattatataaaatattgtatacactaatattattattatcatcattttctaatagatagaagaactacgtattacataatgaaatacattgcaagaatgaagttgagcaatgtataaccactttcacaaaggataatgagttaaaagaggtgactgcacgcacatgccaatatatccaaaaactatgatcatagacaagtgcggtgcatggattattaacacatccaagttcacgtttcatgtttgaagaataaatttttcaagatcataatcaccccgcatgccaatgccacaataataaataaataaaaactctaaaaaacaaaaatggaaaccaacatattaacaaataaaaagtaatacatccttgatattcattgggacaataactacactgaagcttcaattttttcatgcgctttcagtaatatgtatgcatgtatgtttcctggtaggtacaatattttgattgatttcctcatcatccatttttatccttaaaataacttttcaataatgacatagagttatcttttgtgaaaaaagtgagatttgatttttattaagaactatcagtaaaatgtgattgtattctattggtgacaaaaattgttgtatggggaaaatctatcatatggtttattataagtttttgaattactcaatgaatatctattatgagctttggctgtagattaccttttcttccacccagttaccatgttgatatttagccttctatcaccatattctaccatggttttagcttaatgggctctctagtattattttttccttctttcctgatttatggagattattttgaagataagagtctgctaggtttccttatgattttgtatatccactttgaatgaaaacttaggttgggtacatcagataatcttctcctctcaattc

SEQ ID NO: 10301 - DNA, 4249 bp, Vitis vinifera
  Intron number 1 from transcript GSVIVT01029571001 (locus G SVIVG01029571001) derived from phytozome v7.0 (chr-ID chr9 ; pos 21402417 to 21406665)
ctgcctggtcctgtttggtggtggcagtgaaggaggtactgtatcggtaccctcccatatctctggtttttgttggatttctatacttttgttttggatttttgttctgggttttggttgtttgatgggttttagttgtgagatgcatttgtggtatttatctggttattcttgagtttcccaactgatattttggtttttgtttgattgtttgattgtttgattctttattgtctttgttttggtgggttttgattgtaaggcgcatctgtgccttttaggtgcttgatttattgtctatggtgcttttagtgagtggtatacattgcatttgttgttcttgaggtatggcagctaagtgggtgttgaatcttatcccctatgcctgagaagatgtgatattcatttagaagttgatatgagtgtttctcctaatgctagagaaatatggtggaaacaagttttaactcggcttcaccagataattttccacaagataaatgaaattatatcagactttagagaagattaccgatgagaaaatttcgccaatatatatatatatatatataaatttaaaaaaaaaaaaaaaaaaccctgatgagaatcccagttgtaagttgcttttatggttcagaaatggtaccagagcaattggtcaattatttgttgctctgaagttcgttatgaacttatggtattctcacaaggcttaaatccctggaaatataccaatatgccgagagatttgcaatattgcttcaaactaaagggctagagtattcgtgattccctgccaaagtgcagcgaccacaagggatgactatagcagaaattgtatgatgggaaccaattctcttgctgtgctctgtgtgtctcatttagaggagatgcctcgtattgctcccttgtttgatctaagacagttgtattcatatgaaaaagtgatttagacacctcaaacacaaacattgctaaccataccttgtcctgagcatttatgtgaagctgaaaataagaaaaccttctttttataggcaaattagattctgtatataagcacataacagaagacggggaacatcctaagtacaagaatggcaaaaggagaaggaaagaagaacaaagagctagccaacaatgaaatctaagaaaatgttgactgttcaggtagtagtttaaggaataggtacttcattcttaaattgggacttctaagccataaaaaagcctcctaattacacttatttcagttacaccagagtaaacagaggggccagctgtttgaccttctgttgaaccttcctaacaaagttacacgccatctaggaaccaataaacctcaaacaaagagaataaccaagatcacaaacaagatctttgctgactctccatttactttcacaaaaggcaccaatttactatagtccaccccccacctctccattggttggtcatgagcatttccctcaaattgcatccaaaaaaagactttggaaagggcttcagaattctaacactttcttaattgcaactgattggaggctcctgaatttgagcaattgtaggacttcaaagagcagcttcaatcttagaatgccatcacaccaactatcaacacaaccaaccaatgctacgacacttaggctaacttgcatatctccaccagaatgattttccaatctcgcagactgccccaaatacatggtgcctaatgactcctatcctccaaccaccctcaacaataaacaaagctcagccaccttccattcttatgagcagttaggaaaaataatttggggaacaatctcgtagaggtctcttactgtacattgctggaacttcattctacagccaacaccaaccaagatgctcattctcaaacagaatgatgaaaatagtcttctaattgttttgcaagaccctacctgaaagactctccccctctttgccttattcaaacaccatcgctgcccttcctctcaaattttgtctccactgcaatctaacaaaaacctttttgaggtctgccaaacacctaatgcccaattgactcttgaccttgtcataagagaccgttgaccacctcactaaaatgtagtttcgtctccaagttttaaaaccccctgctcaacaacaaaagaaaagaaaagagaaaagaaaaagtcgaaaaagtccaactgaaatcttcgccaaaaccaaaccctcactgctctagagatgacataaaatataatggtaaaccagaaagagtacacttgacaagcattaatctacatcctttagctaaatattgtctcttctacatggcaagcttacttttcagcttgtctccatgaaatttcccacagaacttgatttaaatggagcgcccaacagtatatccaaatggactgtgggaaacctacccaccatacaagaccaattactctgcctcccctaccttcctactcagggtgagttcatttttcaacagataactttaagcttgataccatctcaaagctaaggaaaaatccattacaatttacaactacaaattcattattgtcacctctcagaagatctgcgaatcatcaaaaaataatcagtgaaatctcaaccccaacatcttctctgccttccacttcaaatcctctaacaataccaccttccacctgttgataaggcaagtcaaaatcttcataactagaatagaatgattaagaggacaggggttccctgatgtagtcctcaagtctgaaacatatatatatcccaaaaggggggaaagatgcttgagaatatcatgagtgacttcaggttaagagcggcagttcaaaccactctaggtaaaatagggataaaagttttattacttgatgttctaatgtataacgcatgagaaatggtctttaccacatcagaaatcctttgatgaaaactcaagcctcatcggttttaaattttataccacatgaaacttgaccaaggatgttatccatttggtttacatccttgctagagaagctttttctttcatctgatctagctttgtgatttttgaattaatccaaaatatttttaattaacaagatcattaatttctcttcacaagttggcttgctttcacttcttttgtgagattaagatactagcttggttttgtagcttttgaagtatttttaattgtttatcaaacttgatgtttcacgtgagtcctggtattggtgttgacattattatcactcaagtctataacctgaaaaagataagctatgcatattggtcagaccaacttgacctgaaaattttgaactatggccttgcagctcagttaattgaactacccagatatgctggaatcagaatccagtacttctcaggatttcccccattgtattcccctttgctgataactatattatattatgtgtttattttttgatgatttgcatgtctcagaggaaagttataacacagggtaggtatatctcagttgttccttttcttcagtgaaaaatacttttgtccccatttatttgaagtaataaaaattggaataggtattcatgaccaaaggggttttcttccgatctactctccttagagccttgatggtttggaatgtagttaggaatcctcccagtcagacaacaataaagaaattactgcagaataaaggttttctccccattcatagggttttataattttattttcccttctactttcagaacaagtgttctggtgctgttgcttgatgttctctaacttctcaagtggtcaagcatgaaacgtggattcaagtctgcatgcagccacttcatgtaatatgctgaaggttaggtctgttactggtgcacccttcccataaccctgaaaggggacctgcactgggtaatgacctttctaacttcagtattcttttgtattttcctatcttgaagaggacattttcagtctgaattgcatccaagtcctactagttgggtaaactgaatggtatatatcaccgtaataaatgaacaaaaaatttagtgtttcattgaagacatttgataaagggataatccaccttcttccaacctcaggtatgattttttgttcaaaatcatagaatagagacacatccagacattctgcagttgttgcccactggatcagtaatggaaaatttaggatctaatgcttaatggttttccatgattatgtgccaatgtctatggtgtttgatctctttcttgtttcaatttaggacgtcatattg

SEQ ID NO: 10302 - DNA, 1794 bp, Vitis vinifera
  Intron number 1 from transcript GSVIVT01016799001 (locus G SVIVG01016799001) derived from phytozome v7.0 (chr-ID chr9 ; pos 1504317 to 1506110)
tggcctgccttctctgcgttttttcttaccgggtacactctctctctctattctgatgaattttatttgaatttatattttggtctctgcgtgaggatagggatgaataaatggggtttatgggacttgttgattaacaatttgggtatgagttttgtgtattggggtgtttggtggctgggaaaaactgaggaaaagggaggaaagtagatgttgtatcatgtatgatgatggttttgggaaatcataatagttctggtatttttgttttattacgggtattgattggaatgggttaattaccagggtttatgggaattgctaattataatagcttgttgatgattcttgagttttactggattttttggttgctgagaggaattaaagggtataaaaaaattcgattaattctatttggggttgaagtttcagcttttgtgttggatttctcattagtgtgttctaaggactgaatggctgtttctcgattgcttttcctccctgttttttttttgcttgggaatggggtgtaatagatgacttcccttagccagtcttaaagcctaaaggtgatatttattgctcgaggaaccctcttgacgtgggcagagtttgtattgtagggctagtgcaaatgaactatttttccaagagatatattattatgttggaaaattttgtgaaagataccactcctacgctcttaacttgtaacagttggcatgtgttagccatcatatatatatatatatatatatatatatacatctttggcttgttgtctttcattctttccttcttgaggggatcttctccttccacaaagagaagatctcgagtatcaatcttcttctaatttaataaatttcctctattacacatggttgctagaaatgtgtgggtttcatcaagtgtggtctccatctggttcatgtatttgttttcattgttgggatttgtagtttataggaatctaaactttaaggaacccacacccccaagaagagtctaaaatgtcttatagaatgactcgttgaccatgataaatttgagaacacttatttatgaattggagtccacaattttcatctagtacgcttggtttgtgtagaattttattagaaagttaagatttcatgcttgagtcgaagatataacttcatcagaatgaaatggtgacccataagagtctaaaaagcctaatggttggaataagactttgcttttagttgactgatttttcttcagaatttcagcatgatctgtgttttgggtttgcttgtattttttgagtagcctgttctccctgtcttctagtcctccctgcccactctgacccaataaaatatatcatctagtaagagatcacttaggtttgtaagaggcatgagaacatggaactgttcttttagattttcctttggagggacaagattcgattccttattctatttgcacaatcatctatgagtttctggttgataatgtactggttaataatttggttgaagtgacttgcaatctttacaagtgtagttaccatgaatgatgaacaagtatgtcagcagtctgagtctctgggttttgtgagttttttgtgtgtaccacttgatttatcggccagtgaggggttcattttcttgtatgtcctcttcagaatcacactcctaaccttttaggcaagagcttgcagcagtatcagcagtaagttacagactgttctctgtgccatattctgaattttacttaaactgttactttcactctgcaggtgattcatcaagtgaaccg

SEQ ID NO: 10303 - DNA, 865 bp, Vitis vinifera
  Intron number 1 from transcript GSVIVT01004825001 (locus G SVIVG01004825001) derived from phytozome v7.0 (chr-ID chr2 ; pos 5474253 to 5475117 reverse strand)
ggaatagagaggcttgcgggccaaaattcggtgaggtgagtgtgaatttgatgcttgttattcgttttcttttgtggttctggtggaattggattagtagtttgtttggcaattaggatgaattgggtttattgtttttcttatagttgtttgaagtgtgcgctaatcttttgattgatttcattacctatttttatggctctttgaagaatttgatgcaattgatttattgggtttgtatgacttttctggtttatagtttggttattgtttagagctggggtttgatgttccatggttgtggaaatggtccaatggtttaattaaaaattgatgaattgggtttaggtgagttcatttgtcggtatttaatctatattggagatcatgcagttactagaatttgagtttgggataatcacttccattttgattatgttgtgatttcatccttgcaaaatttgatagatcacagattgtaattcctttcagagccatgatctgtgagatgcttattctaccaatgaattcagtcaatcatctttgttttgtattgtacttgagaagctaagtaacaaaagaatggaaggcttgtctttctataaactaaattcagaactccaatggtattcttagttattgaggatttttatctttggaagtgcttgtaaattaagtttcttcacaagtttggaactggaatgggatacctacatttttcaagataaaattttcattatcaatagttacatgtaggggcatttctgaatgatacgatacactgacgattgggtgatttctaatttcattccttcactttgtggctttagtgttggttgaagaaacagaaggatatattagctcc

SEQ ID NO: 10304 - DNA, 5328 bp, Vitis vinifera
  Intron number 10 from transcript GSVIVT01026766001 (locus GSVIVG01026766001) derived from phytozome v7.0 (chr-ID chr 15; pos 6710270 to 6715597)
ctcggagaacaatcgaggaaattttgtctacccttgtaagttggtctgatggaattctctatatgaaaattttaatttgttataccgtttagtgtttttatatatatatgtatgtatgtatgtatgtatgttgttgagagagagagagagagaaaaggagaaaaaccttattttcattcatctaatctctacttacaattgagagatatatatatacaaggctaggagtcttaactaccatacatgtgacctatattaacaaggaaagatagtatactatacatacattatattcaacatatgtataaagaaattttgagggaacaaaatacttttttttttttttttttaattttctctctacatcaaattgatacttgcatcaatatttatacatgaatggttaagatcatccgccttagaaaagggaaatctaatccttgatttttggagaaggtctctcataaaattaggaaataaaattagaataggaaacaattgtatgttgtacaactgtgtagagcaattgtatacatggttgttcctttcaggtttccacacttcccctcaagctgggttgtaaatgttaatcattcctacatggatgtcaagtcttcaaagtgagttctagaaagcgccttggtaagaatgtttgctgtctagagagttgttggagtgtaaaacaatgaaatcgtcccttcttctatcctctccttaataaaatgacgatctatttccacatgctttgtccgatcatgatgaatcaggttcttaatgatacttatagcaacttgattgtcacaaaacatcttcatagaatcttctactggaatttcagctcgtttcggagtatctttgaccacattccttcacaaattccatgtgtcattgctctaaattctgcttctacattgctccaagctacaatagattgtttcttgcttcaccaagtaaccaaattcccccatacataggtgcaatattctgaggttgatctttaaccagttatggagccaacctagtttgcatttgaaaaaatttcaatgtttctcttctgtgtttttttttaaatagaatcccattcctagagtcattttgtgatatcttagaatacgatacacaactttcatatgttcctcagttggattgttcatgaattgactgaccacattgactaaaaaagcaatgtctggtcttatatgagcaagatagatgagtttccccacaagtctttgatatctccttttatccactggagcacttcttttgactattccttgtttagtagtgtatttcataggtgtgtctacaggtttataaccaaacattccaatctcctttagcaagtttaggaatacttacattgggagacagcaatatccatttttgatctagcaatttccatcccaagaaaatatttaaggttcccaggtctataattttgaactcatgggtaagaaaactcttgagcttgcctatttctttatcatgatttggagtgggagacttggagcaatagagataggattagagttgtgaacaaggtaataagactaattttcaaagaatgtcacatccatgaaggtgtaaaacttttttgtgatgagggagtaacacttataacccttttggtttggagaatatcctaggaaaatacgcttagtggtctaggatcaagcttcctttgatgctgttagggaatgtgaacaaaggttgagcaaccaaggatgaaaatatcggtaattacggatatattggtacttccattttatggatatatcgaagatatatcaatggatattttgacacaaaatataggtgaacctaaaattgatcaaaacttataaaaatgtaagaaaaaactcttaaaaataaaattagaagtataatagatattttaaagttgttttgttcaaaaatttgatacatgtatgatataatttatcatatttgataataatattgtatgcgcggataaaaaaatatgcattttataagtgtacatttattattaaattatgtcaaatattatttgacataatattgtgatatttgattataatatgtttaattaaaaaatatatttaatattaaaattaaatttataatccatttaattcaattgtattaaatgatataaaataaataatgatatatgcatgatttttaatatttaattaatatattaatgaaattaaaaatactataaagaaaattatcacaataaatttatatttttggtgattaattataattaatttgttctttaaaacattctcttaatattatgtttatataatgggtttttgtatatataaatttagtgtcaaatatataacaaggggcaaacttgccctagtggttggtttaacgactagtgaacgttttggtcggggtttgattcccctcagcaacataaaatttgaaattttttgaagtttgaccgcccatcctgcattgaccggtcaaaatatcaccgaaatatcggcgaaaaatcgatgaaattactgataaattgtcaaaatatcgaggtatagatatttcttccctatatatcgtgtcgagatccaccaatacacaatatttcagcgatatatcgcctaaatatcgcgatattttaatccttgtgagcaactaaataccttcaatggaatggaggaaatgagccaagtccttgggtatgatttaagaaagactttgcacggtgtatgaaaactcaagccatgagaaggcattctattgatgagatagtctgcagtaaatacagcttctccccaaaaattctttaggacatgggaggagagtataagagcccttacaacttctaacaagtctctattctttctctcaactatcccattttgttgaagaatatcaatgcaagaactttgatgaaccataccttcttttaataagaattccccttggatagaattgaaataatctcttgcattgttagttttcaacacttgtattttggcatggaattgggtttggatcatgttataaaaattcttgaaaatttgacccacttttgatttttctttcatcaacaatatccaagaaattctagtatgatcatctataatggacacaaaccatctagtccctattatgttctttatcttagatggcccccaaacatcactatgtatcatggaaaaaggatgaaatggtttgtttggttgaattggatagggcttgcaaacatgcttggataattgacaaatttcacactaaaaaacatctgaacttttagtaaataatgatggaaagagttttttgagatacatgaaactatgatgtcctgaacgatagtgtcataacataacatcactatctttattacaactaaagaaagaaagagaccatttttcactaactgtcagtcgaggttgtctttcaatataatcaatcactctaaagatatagagtcccgaacacacctcagtattgccaatcgccttcccaaaattcaaggtttaggaaaaatttagtaacacaattcttttcttgagtaattttactaatggacaacagattgcaatccaaatttggaactaaaagaacaaagtcaagagttaggtccttagagatgacaacaaaacttttaccgaccacctttgagagagaaccatcagttatatgaaccgtataatccccagaacaaggtgtataattttgaaaaattgtagtatctccaatcatgtgatcaaaagctcctgagtcaacaatccaaggactcaaattttccttttttactttcaaggcagcaataaaattacctttctgggctaaggatccagacccaacgatagaattggaggaattttccccttgttgggattctttgaacattttttgcaacaattccaattgctctttgctaaatgaactagaattaggtggtgctaggttgtcctcaatggtgacattgtgtcctcagctttctctatcattttgaggacatgacaacttccaatccgctggtttcccatggattttccagctcctgtccatggtgtgacctggttttcggcaatgatcatacaaagatctcccttttcttggtcaagttttgttagaagaattgggaggaccctgagccactagggctgaaccctcagtgacaagttggttggttggtttgtgaccacaacatgactttctttctactttcttctcagctcacttctgaggtaacttcttggatgttgggtaaaggtttagttctcaatattctgcctcgaacttcatccaaatttttgttcagtcctaataaaaatttgtagatctgtttcttctcaacgatcttgtatttgatttcatccattggggggtcccatttggtggcttcaaacatgtccatccgttgccaagagtgagttaaaagactgaaatattgagtgatagacaactcaacttggcataaatcacggatgatcccttctatttcaaatgcctttgttgtgtcttttgtatcaaaataagtctcccttactacttcccagatttcttgtgttgtttcatagaatataaaattttcccctatgtattgttcatcgagttaattaaccaagacaaccatattattctcagccttccatcctttgaatttcagatcttcttttgtaggttgaggcattgcactggtgaggtagttatccttccctctaccatatatgaacattatgattgcatgggaccattgaagatggttttgcccatccagtttgtgtccagtaatgagaagagcagcaccatttgatcctcctttgttgcttggaataggagcttcttgagtggaggtgacttccgagtttgaggaatccttcttgatagtcattctgtattgggtcatagacagattgaatggtttagaattagctttgataccatgaagaatgttcgagggaaatatatgtatattttcccctctacttcaaactgattcttgcatcaataattatacaataatggctgagatcatctgtcttagaaaaaagaaatttaatccttgattttaggagaataattctcataaaatcaagaaataaaattaaaataggaaacaactgaatgcaatacagctgtgtggtacagctgtgcagaacagctgtatgcacagttgttccttttgggttttcacaatgtatgcatatgtaaatgtatataactcagttcttattgcttcagctgcatgttattatcctcttttacctttagtgtgtggaacttggccttggatggacgttattatttcttaaccagattcttatttcctctgacacaggagagagaagctgtaaatagcgctgataattggat

SEQ ID NO: 10305 - DNA, 3062 bp, Vitis vinifera
  Intron number 5 from transcript GSVIVT01024707001 (locus G SVIVG01024707001) derived from phytozome v7.0 (chr-ID chr6 ; pos 7600756 to 7603817)
aagttgcattgagacttctgaggcctggaaggaaggtaattcatagtgctgtgcttaaattatttcatcttttcttgttttacaatatttatgaatcaggtattgtggtttgtcttacttatgaattagtttatttatcgtattagtagatgggaagctttattcacaccccgacttcaggttccctccataatgttttaggtgcatatgaatttataaatacatgagagaaggtgggcattcatcagaagtggaccaatacctttatgctttctggatcctgatttttgttcagtggttgtatcatctcatttaactgtatctgtcacatgttcatcgtgttatttaaacaaaaatatcacgtctccttttaacattttatcttctttttcagcatcttcatcaccatttttagctccctttgtatgatgaatgtattgtgtatatatatatatataaaaacattgttatgtatagttgttaaagacttacagctcatgagtcatgatatgatataggggtaacctatcaaagaaaaaagatctgatataagggtaagatataatgtaaaatgatatgtattttatcttaattgtatcttacaatgcatatctgatacacgatataatattaattgtttaaaatatgccataaagttagaaattgatgataagagggaaaaggggtaaaataatctataatggaaattatgcacttgttgtcaaagattcctatggaagcttgtaaatgaatttattcttgtaaagaatttagtgttgattttgaatgtttgtgaatgaaaacttttgtttaatatattgatttttctttcttaagtcttttttgtctctttcctttaagcaagacaaaaatgatgagcttagaaagttagaactttgaagtggacccataagcaaattcatgtcaacaatatatacaaatttatatgattggttgggactaagaactataactaaaagttaaaaaatttattgttgtggattttataatgaatttatgcattaaaatgttatttactaaattgaatttggcaagggttgaggtggggatgtggaagattttaggtttaaggcccagcaagggacaaaaaatattgtccaagctttggagtttataattttttttttttatgtatgatattcatgagcgtctatgttttaactcttgatcttactatttttcatataattaattatgtattgcttatcttcattcttccaatatatatatgcatgtatgcctatttttttctatttagtttttgttttataagaaaacttattatacatgatattatgtgatacacaataaaaagaaaaaaaatgcatgggtactgtttggaaattaataactatagcattaaaacacaatgatggttacttcactattctttgtttttttcccctcatggggaaatgggagattaattagaaaaacaatacatgatagtgttacaaattaacaaccacaacattaacacacaatgaaggtttctgaaactattctttttaattttttttttactgtcataggaaaatgagagagatgttaatagtagacatctagaaaaaatgttattttcctcaagtgcatcaatatcaatctaatctaactaattttttctacaaatacttcactaaccttttttattttgtttcctgttttcactgtttcctgtgttcctgttaggattggacctagaacctctcatatctccatcccaaccccttgtcccttgagtcattgcccaagagctcctggtttgtaaatgttgttgtttgtgcataagattgtacaccaagcaggatacccaaatggtgtgttactttttcagactaatattcaagttggctgatacaagaaaattaaagactcaagatgaagttatatcaggtcacaaaaatattatcatgagatgtgtttatcaatgagttccctattttgataagttgcttctattttgcatttacttatttgtgtgctaatagaataggaagataccactgggatttcttgacttcgttctgaggagttgatcatcattggctgccatattaggtgtgttagtgtttgagttggcaattttaccaagatgatcgatgctttattgattccctttttctctatttccaggatcacacttggctccgctttggtgaatttgttgattcatattctgtctttttgatctggaattacttgctgtagcgtacataattaccaatgtagagccgtatacttattatataaactcagctttttcctggcagtattgttaaattcccactgtgatgtgtatgagtctgaatcatgtttttgtagattttcagtatgtattatttgcatggaatacagttttgctgtatacattgaagtcaaactatcaattaacaatttagaggatgaaatatttgacagttgttatcatcaatgcctttatttactcgaggcattaattccataacaactaaatttaaaatttggggtctaaattgctaaagcactgtaaagtggggttaaaggaatccaaacttgtgggctatatttgcagtcgaatttctcactatggacccaaattaggatttgaatcaaatcagtttgataaaatatgatatttcagtgccttgaacatggcctgtgaagctttaacaactataagtggtagatcatgttgccttcatttctcaatatatcttaggcattttgatttagtagtgtcaaatcaaatacaccatatccagccgtttctttccacattcattttctttttcttttttgcaatgctcttacgtgacattaaatcttttatagctgatggcaaattctattacctcaatgggcccattgtacttgctcacaaattttctacaagtcctttcaaatgtctcattgtttatgtttgttatgatactatttctatataacttttacacgattatcaaatggttggtcattagaatttatgcatgtgtttactttcaatttttctctttattttgttcactaagttttgtggttgtggcagaacaaggaagtaacag

SEQ ID NO: 10306 - DNA, 2555 bp, Vitis vinifera
  Intron number 4 from transcript GSVIVT01031805001 (locus G SVIVG01031805001) derived from phytozome v7.0 (chr-ID chr3 ; pos 4502406 to 4504960 reverse strand)
gtatttctttgaacaaaactagttttcatgtttacaatatgtgtgaatacatatgccttttatcttttgtttctctatattgacttgtttccttctaggccatgtttggaatgttggaatagagaatgagaaatcaattcctcgtattcattaatgtgtttagacttttttttagaatgagaatagtagtaaaaaaattcattgttatggaaaccaaatctcacttactaggattttgattcctctcttttgcatggaataatgattcaccctcattcacatcttatttctatttctattcccacacaccaaacacaccctaactatacatgttgcacctttgtgtgtgtgcataggcatgcatatcttggtcaatttgtatcatattacttgtttagtttgtagtttgaggaagaattaattaattaaaatgaatgaaaaaatcccaaatttgtaaatctaacctctcccacttttgaacttaaaaaataaccaatttttgacataaatgtcttttaacatttcgattatttacatgaaagttagaatatagaaaattattttacaagaaaaaagtggggtcatttttgtcaaaaatgggtagttttcaagttcgaatgtcggagaggttagatttacaaattgggaatcatttcatcccttttaatcaaataaccctttgaggaataggtcgggtaacacattgtgtgcgtgtatatatatatctttggtaacataaaaatgcactagatctctccctcaaggtccaagtcttatgtaaacctgggactcaaactttgcacctcccattcatgagctgaagagcctacctattaggctaaccaggatggtggatgatgggatgaggataggtggatgggcacaaaaatgtttagtgttatcttagtgcaagacggaagtgtattttgcactaataagcatcacattccttagactctatttactatggtctagcttagaaaaattagtggaggttagcacaacagcaagattctaactatgagtaatatctcaatgatgattaattaaaatgattatctatggagtactttgatgcctataaagaatctatagaatggttggagaggactcctttggtcaaagacaaccgattcgtcctactaacatgtcttctgctgggattgggtgtctggtggtatcttctgccagagcccctactggttcaaccaacggcttgttgctcgccaaatagaacccatcattttgagatattgataaggtgaatacctagtctattcaatactaggcctaatgagtttgaaggatagccccttccatctccatgggctcttaggcatctaagaatggtttgaaggatggcccaactactgaggtcgggcccgaatttagtccagttttcatacaaattgaaatatgattttcttatatatatatatatcatacaaaatcaatttctctttccttttttcttggaaaaacactagacatgtcatatattatttaatataataaaatttatgtaaacatttaacaaaattattatttttaacatcttataatttcgcgtgcttgctttaattcttaagtccaaaaagtaaaaaccttttatgtctatggattattttattaaaaaaaaagtgttttactggaaaatgaaagtcaacttaaaagttaagataacaacatgagataaataagataaaataaactttttttttgtttttttactattttaacttcaatctactttagagtcaatatttcttaagatgtgtaattggagttgttaaggtttaaggaatgattgatatgcataatcatgtgttcactttgaagaaaaatacaaaaaacaattcaaagccaaaaattaggaagcacgtgtgaacttctcgagtgagctttaaacgtcctattggcggtttaaatattgccttagagaacattcaaatattttctttaggttatgttaggtcccaaaaaagaataaggaaaaaagaaaaatatcaagaaaaatgattttcttatatttggttgtattataataaatattaaagaaaatcaaatataattaaaatttattaaaaatttatgtattttaaaattatttaatctttatattgatgatttaaaataaataaaatggatatttagtagcaaataaaaataatttattaagttttaattttttttttattttctttcactttttattttcttttatttttccttcgtattttctttcccttacattttatctcaaattttccaaaaatcaaacataaccttagtgtttgaaacttcctttgggtgttcaaatacttaactctttgcttaaaaaaaattttaagttattcttcgtaatttttgggggggcatttttgtaaaattgatgttaggattgttttcaaatcaatatcttaggtttttggtataaatatacaagtttaaaatgttgaatatgaggccaagagattagtcattcatataaccctaagagtcgatctctcaatcttttaaggctattcttgaaagaaatttttttaacaatttaa

SEQ ID NO: 10307 - DNA, 5842 bp, Vitis vinifera
  Intron number 1 from transcript GSVIVT01010722001 (locus G SVIVG01010722001) derived from phytozome v7.0 (chr-ID chr1 3; pos 12822181 to 12828022 reverse strand)
tgtaccagcaccattgcagtcaccgagtaccagctgtaagcaaccttatttcaggtttatataattccctgctccatttagtttcatggtttcattttttttttgataatttttatactgcttttaactttggctggaattcaagcttatgtttgtgataaattggtgggaaatacatgtgaatgaagatgttttggattgacttgaccttatttttttcttgtcttaatatcaaagttgtatagaagatcatgtgccatggaaaaataataaattgcaaattcagttgctttgatcttgtttataatgtaaccactaattaattgaataaatgagaaagttgctccattacttggtaaaatttttgaaaggattgactctcaccaaagatgaacttaggaaggtaatacaaattcccaaagaaatgaatttttaccagataaaacaatgagtttaactatcgacttcatcaagttgttgacagctctttatcatagatccctggaaaagtcccaaaatttgaagcaaaaaattttctttattataaaaagatcaggataatcatacaaataaaatgatctatgaacctcatatagtagaaaaattaatactcttagggtgaaaatccagtcttgcatttccctttctctctatctgcttgctagaaaatcttgatagagatttggaagaatacctctatttggaaaaatttacctatcaaaagaaaaaagaaaaaaagaaggaatcttttggttgtttgtagccacacttcttgcaggttcaataatttgcaaatataaataatacagtatttatatgaagtaaagtaaaaggaaaaatatttatttgctaatgtgatgaaaaaaaataaaaaataaaatcttgataatgtaggtgtgttacgaataattatgtgaaactttgttgtctaaacatttttcataacattagaagccaaatgaaactaaagaaaataattttttttttccctttcaaaggaagcatattaagacaaaacaaatagtaaacctatctcattagcaaggtgaacaagtgaagaggcaaacataaacactaacactagcatgtttatcatacacactggcttttaagaagcaagttatgtagccaatgggcaattggaggctaatcatcttagattgggagacggatttggaggccttagatgtgcctctacctcctttagttgaatattatgcaattagaacaaattcttgttggtgttaaggttttaggagaaaggggtatgtattgtatgaggaggttgatttttattggttgatgaaagagaatatagattgccggcatggatgttaccatgttaatagtgggaggttgattttgactagttcaggagaaatgacatgaaattggtgcatcatgtaaaattgaaaagtagctggtctccaaacctaacctccacacttaagtaactttgcaccacatgcttaatcctatgattgttcaaatttaaggattatagaaggaattaaagggtgtttctgaataatgattgaatataatagttgatattttgtttttataatcgatttcatgctaataataatatgatgagattcattacttagttaattcatttatatgtagttaaatgttttaaataggttcacaaattccaatacttataattatgcatgatgtctttataataaattaattaggttacacattgtggtttctctatatctattgtcatcatattataattttggtttctacctgttatttgtatagttatcttaattgtttccataattttaaatttgaatagcaatgaaaggaagtatagtggtgtgaggtcatttaagtgtaaaggctccatggaaaagaccaaatagttttcaattttattccatgtgccaattccatgctgccagtcttgaccctcatttgtcaaccaattagtagtaatgtcaaccaatgaggtagaggcaaacttaagacatgtgaatttgtctctgaaccttaaagggcagcaatttttctatcgacaaaatttaagttgttgtttgaatacacttattgttttatgttttttattttttatttatttatttatttatttattttttcaaataggaaatgataataacttctatatagaatgcaagaactctttgagagttaccttaaattttaatggctcaaattttaaaaataattttgaaatatttaaggtaagttcatagcttttatataagagttacaatattttatattgatgttacttttattttctattttttttttaaaatagaaactgtatctagatgagtactaaaatattatatttcatattttgcttttatttgataaaattagatgagatttttttacctaattgatctgactagaattatatcatttggtgttataaacatacactgaagtttaagttcttataatatctaattatatacttatatttggatcacctaattatatacttgtatttggacgaactcgctttgtctttattgacattaaaataaatttatcaatcatattatgaattattaaacctttaaatttatatcatattcattattattatgtttttggtatggatgtatccttaggatatgtattggaattgacctcaataaatacaattagcgattttaaagtagaccaacttgctactttatatatctattttgattatttctaatgttattaaatttgaattactgtataatgaatcatggtggtgtgaggtcacttaaatgaggagctttcattacaaggtacttatttttttaatttcttattgtgttagttccaggccaggaacccatattttctgcctcctcttccaattaaagtctttcttgtttcttgtttcttgttttgcttgatctaattgtcttagttagcattgcatgttcaactaaatgaagcaggcaagtttaagattctaaatccttctctatgtcagagggtcaggcttcattttacgtcgatcacattattgtttcttaaaagttggagagcatttgaaacctgtgggcttggtgctcttatgtaggtctattgtggttcatgtattattagttcattcttatggctaattatgttgaaaaatatgaaagaaatgaatgaaaattaaaatctgtggatttaaagtttcacctaattgtgctaatgcaatcatttttcttaagagtttctcatttttttcattgcattttgttaataagcacatgttcttgttcttgttttattatgatttgatgtacaactgatgaaattttagatctgcaacttttacctccatgcactaattttttgctaacaatttatgcctctcatcatttaattagtagtgtgagtgtgtgtgtgtgtatacatatttgtatagatgtatgtatgtatgtatgtatgtatgtatgtatgtatgtatgtatatgatctttgtgaaatttagatctcctcttttaaaatgcttgacacacacacaaatattgctttaacttttatgatgtagtattctaatgagatcttctttgagttcaatgaaaggaggtagaggcaagaccaaggcctctaaatctatttcttgatcgaagaagattgtcttctagttctcagttggttgtatggcttgtttctttaaagccaacaaatatttagaatgtgttggcatcagtgcttcgttacctcttcgacattcttgaatatttgactgcttagattagtgtgctattgtgaaaggaagagggaaaagatattattattattttattaagccaattaaacatttgtttattttgttaagccagtaattgtttattttattaagccaatgtaatgtttattttattaagccaatgcaatgtttattttattaagccaattaagccaatgctccaatgcttattttattaagccaatgtttctttgtttggtgttgctatgtccattttaatgtgtgaaatgaggctatatatttgcatagatgtatgtatctatatgatcttctttgtgaaatttagatctcctcttttaaaatgcttgtcacacacacaaatattgctttaacttttatgatctagtattctaatgagatcttctttgaattcaatgaaaggaggtagaggcaagaccaaggcctctaaatctatttcttgatcaaagaagattgtcttctagttcttagttggttgtatggctcatttctttaaagccaggaacatttaaaatgtgttgccatcagtgctcctgttacctctttgacattcttgaatattttaccgcttagtttatgtgctgttgtgaaaggaagaggcaaaggatgttttttttttttttgatagataaagagaattataataaacagaaagaggaaacaccaaactagtgccctttaggtatatagagagtatacaaaagcagcccacagactcgaaaccaaagaaggggaaaaaaataacaacccctacccttacttagagcccagtcacaactcaaaaaagctaacaagagaaaaagggctcaaaactataaacaccctaacccaagaccaaagattacatacaaaagaatgtttcagcctttggagtgaaagcacctcattcccaaaagccaacaaatttctttccttccagactgaccaaaatatacacaaggggggccatttgccacgtctttttacgggttttccccacaaacgctccatgccatccaagaagaggcaaaggatgttgttattattattattattattattatattaagccaatgtttctttgtttggtgtccccatgtccattttaacatgtgaaatgaggcaaataacaattctttaattcttacagaaaaaataaaagaaagtctactagaagttacagaataatgagattatagaattataaactacatagataaaataagttaataataagcgatgctgcagaaaatgaatagccttgttagtttgcttaacgaaacacaatacaaaggcttttaatttttaaacataatgtgtcattggttttttggcaaaaaaaactgagaaagcaaaaaaaaaaaaaaaaaaaaaaaaaattgaaatatttttattggtaattacacaatattaagtccattaagaatatccacttacctttttaaactttctttcatgaataatctcatttttcctaaatttttcctcccctataatttcacatcatccaccgagcacatgaattgttcatgttaaaaaatttattactgaattcaaattttgaggacaaaataggaagagattagctatctgctataaagaaattatctttatggttaacaaattgttgtgtgataaaaatttatctagtgtggggttctagatttatcactaccttgtacaatcaacataaaatagatagttttttgaggataaaattcaaatagggaagaaatgtagttctggttgaatggctatctcatacaaccagaaaaacataaatagtttttgaaggagaaaattacttagttgataaacactcttatttataaagtagaaattatcttttgaaggatgaattgttattccagtggacctagaatgaggcaaatatctatttgttgcaaagatggaaataatgtggaaaatgattaaccagatctatgatatgaatttgatagacctgtgttgggtaagagaggatattttaatgtgatctaaactttataaaaaaataatctaattttggcacttcttggaatatttatatacccatcttgtatatcgaaaagaaaattaagacaacaaaggctgagtggctgagtttttggtgggaaggtgcaggtggcaaaa

SEQ ID NO: 10308 - DNA, 3363 bp, Vitis vinifera
  Intron number 2 from transcript GSVIVT01021648001 (locus G SVIVG01021648001) derived from phytozome v7.0 (chr-ID chr1 0; pos 8696269 to 8699631)
agtgctattttgcagtcttctgcccataacctcaggtaccccaaacctgagtttttaaaaacaattacaaaacatataaaaaaaaattttaatttgttttctattttttaaatatattcttattaatagtttaccttgatgaaaaaacaagtttattttttagactttgctttgaaaacaggtttttactagaataacttttaaagtgttttaggttagtttctttttctttttctttttcttttgttgatagtttttgagcaataattaaaaataaaaaatattttgatttttttcattacacataggtttataatatatttatagagaataagcctagaagattgcatttaatatttgtgttcaattttaattttttttttttagtatggttctaaaaatctattttttaaaacgtgggtgaaagaggcccttaaattctcttatttgttatgggataaaaaataccataaaaatcaaatttgattatactttatatatttttaaattctttgtttcttatatgaaaaaatacaagaaaggaaaagaaaatatgaaaaaatcttaggctttagttagtaaccatttttaaagaaaaacaaattcctaacttaaaaaataattctatcaatttttgatgaaaaaaacaagttttttctagaataattttaaagtgttttgagttgtttcttttgataagtttttgagcaaaatttaaaaataaaaaatattttgaaattttttaaattatacataagtatataatatatttatagagaataagcctaaaagatggcatttaatatttgtattcaattctgaaaactttttttagtacagttttaaaaatctattttttgaaaactattttttaaaacgttgatgaagggccactcaaattctcttattttttatgggataaaaaacaataaaaatcaaatttcattaaaatttatatatttttaaattctttgtttcttacatcaaggtcaagagaaataaattttaaaaacaaaattcttttatcattttttcccttgagaagaagaagcaaaagaatagtattggatggttggtggccaatccatttacaaaaggtagacaactctacatgcaagtggagttaagtctcatgataggccgcactcttcgctgcatgaggttgagggtgttcttgtcactttagggagccccatattcaaatgttgttaaattgttttgagtatgtccggcgaaagacagttgttgcaacagctgtggtcataatccattcattcaatgatgttaggatgtatcaaactgtgtttggtctatggtcatgcagaaaaaaaacagtttttttttttttttttttttattttaaaaacgagagtgattgataagatgttttaaaaacaaaaaacaaaacacttgccaccttttatagcgaggtttttgtttttgtcccaattggctcgtaataccatagatttttatcatagacttttgtcccattcatatgtattacaatcatacgttatatactcaacaattaattattataattaaaataatgataactatgataattagtaagatatctctagaaaatttagagataatattaaaataaaaattttaatgagacaatttaaagattaaagataattttgagagttcttgaagaaaatttgaagatttcttcgagaatcgaagaagatttgaagatttcttgaggaaaagaagatttgaagattcccttttattaaaaaaaactctataattactattattctctaataattcctaattctgctttattccactcaagtatatgtatgtcttaatttcacttccaagggcaaagttataaatcctctattctattaatttgtaccatgatctaattgctttatgtccttagtcacattgcttcatatttttgtcccaattatgagatatggtggactctagaattttaattgagttaaaatgtttttattagattattaaaaactggacaaacgctcaaacctaattctcaagtgctcaaacttggcgcttaagcactttgagagcactcaagaaggggaagcttgagtgtttgaaacatatttttccaaatttgaattctcgattttgttttaagaattggtttttggaaactttaattacatatctatccactagggtttcattcctctataaacattatgcctaaaaaatttcattattgatgcaaatttgaaaaagagattattagcctttactacattctaaaactcccaagtttttataattctcattctttgggttcgtgagaaaatatgtatcctttcaggtattgagatagtctattggttgcacatgcgtgctgcattgaaaacttgaaaactagtctatgtattagtgaataaaacttagggataatatatatccactatgtaaatttgtatatttttcttttaacagaagatttgtgttttacggtctttaatcctattattttttatatttatatgatctttgggagactttgtagatggttttccacaaaaaaattgttgatttctcttctttctttctaattattgaagaagaattaaaaataaataaaaattgtactacaaaaaagttattacatattcacccatctctttgtttcgtaatcaaaatgtacaaacttttaacatgctatataattaatttataaaacgtggagaaaattttctaaatgtaattaagatagagaattccaagcacaattaaggttgatggatttagtatgagttaaagaggaattaaaaataaaaattttgattaaaaaaaagttaatacatattcactccttttaagtgttttataatcaaaatgcacaatcttgtagtatttcatagaattaacttataaaatgtgaagaagacttcgagagtataattaagataaagaattcctagcacaagattgatgggtttttttgagtgcattcatcattgagttgtaattatatcaaagttgttaaaataatttattaaattattaaataggtttcattcttttaaaataggagtgacattggaagtgagactaccaagtcaataaccaatgcttttggaccacttacatagttccatggatgtcactttggatgggactgcattgaagcccttttccatctccttacccacttattctaagaaggtttttgcccaccgattactctcccttcctcaaccattacttttatgaacctcatcctcttcttcacaactaccttttcttcttgctctcttggagaaaagatgcattttttttcaccttatgttttaatgcttttttgggtgcattgcttcactcccatggtgttgtccatcaatttagttg

SEQ ID NO: 10309 - DNA, 23842 bp, Vitis vinifera
  Intron number 15 from transcript GSVIVT01023393001 (locus GSVIVG01023393001) derived from phytozome v7.0 (chr-ID chr 14; pos 12766656 to 12790497 reverse strand)
ccctgcaggtgattgttgttgacctcaaaatgttgttaaataatattccttctgaatttgaactaatagtcatatggattgatttggggtttaagttatccatgttgaacttaacctgtaaatttccacatttttaaaagtaattaattggttcaacatgttatcaatttgattattttaattgtttttaatataaaaattaccttttcagtatgatgtatttaattccatagaagttaaaagaagcacttcaatggctttgtaaaattttggtacctgcaaattaggaatatatggttatggaaattatatatgtaaatattctccttcatttattgcattgctgatgaaaaaattcaattgcttgggctccattttgatattggaaggaacaaaggggaaagagggaaatgataaaataactttacaatgaatcccttgctcaaaccattttcatcattttctttcctttgccttgtcctctctaatattcaaacaaaatctttgtgtgcccattggaagaggacacaaagatcatggtggaatagttcttaagtttattcttcaggcctgattttagattcagataagttaggatctcctttcttaccattttatttttgtgtatgttgctaaatttagcttgtatgatgtgggtgtgcaacatttcagtgtgatgtgtgaatgttcagatttaaattgaactggcatcattataggaaaattatgtagagaaatgctattatcagggattgtttaattgtttctgtagttttggcatgtgacttgtctatttagatgtttcaaaccagtgtgaagtgaacaaagattgatgataccgctgctctattatgcagtttcaacaacttttactcagtcacaagtttgaaattagtagagtatcaaacatagaggttgattctctgttttgtataattgagtttcttcaatacattttgcttcatttatcttttattttggcatatccctgttttatttctagaatgaaggtatcaattgaatatgagatttaattctatttgcgaaaatgagaatctccaagtctaaggcttgcttaaggttttgtcaatagttgatgtattatctcatatggcatgttgctttttggagacagcaatggaagggggactagaaccaaaaaaccccctagtccacgcccacagattacaaaggaaaaacgatttacacccatgaattgattgctcttcattttcaaacgccctactatttctttccttccaaacaatccaaaaaaggcacaagggagctgaaagccacactttcttcctttcctttcccacacaaggcccaaaccatcccaataacgcctctctaactgaagaggggagcacccacgaaaccctaaagagggaaaaaagtaagctccataaacttctggccaacccacaatgcaggagaatgtgatcaatagactcttcctctgccagacacaaataacatctattagccaaggagaaccctcttttctgaatacgatccaaggttaaggcctttttccacgtagcctcccaagcaaaaaaactcaccctcggaggcaccaaagaattccaaataactcttgtaggaaattcttttagtctttccggttctaatgccttgtaaagagacttaacagaaaatcttccgttctttgccttggtccaaattacttgatcttccacatcactataaaccctcctcccttgcaaccttaagagaaggtgctttacctcgatcacttcccaatcattaatccgcttagagaacctaggagtccacactccccctccagaatggctccacacatccgccacccaagcctccttatccaaggatatagcaaataaggaaggaaaagaagtacacaaaggatcatctccacaccacttgtccttccaaaatctaaccctcttaccatttcccacagaataaaccaaattgtcacctaacacatcccaacctctcctaatcgctttccacaaaccaaccccataactacctctcacaacacgggacctccaaccaccctcttcttccccatactttgcacttataacttgcctccataaagcttccctttccaccgcaaaacgccaactccacttacataggagagccttatttagcaacggcaagttcctcacacccaatccaccctttcgtttatctgagcaaacaatagaccattccactaaatgaggcttcctttccatggccccaccaccccaaagaaagtccctttggatccgttccaatctcaaactcatgctccttggcatctgaaacagggacatacagtagataggcatgttggatagagtgcttcggatcaaggtcattctaccccccttggagatatactgccttttccaaagagaaagcctcttcctcagcctttcctaaactccatcccaagttgccacctccttgaaacgagcacccaagggaagacccaaataagaagggagttggctaaccttgcaactaaactcaagggccaactcctctacattctccactcttcccaccgcgatgatctcacttttgtccaagttcaccttcgaccccgacatggcttcgaaccacataagaagccaactcaagtaggacacctgatcaatggaaggctcacaaaaaactaaagtgtcatccgcgaacagcaaatgaatgatctccactcccacacctcctctaccactaagctgccatcccggcaaaaaccctccctccttcgctctcttcaacaaacaactaaaggcctccatgacaatcacgaacagatagggggatagagaatccccctatctcaaacccctagaactttggaagaatcctgaggacgttccattaataaggatgcagaaactgacagtcccaatacaccactgaatctagctgatccacttggctccaaaacccatcatttccatcaaccaaagaagaaaactccaattcacatggtcatatgccttctcaatatccaacttagaaaggatgccacctcccccacttttctgcatcgaatgaatcgcctaatttgcaatcaacgaggcatccaggatttgccttccctctacaaatgcattttgggacttggacactaacttacccatcacctttttaagcctattagctaacacctttgctaacaacttataaagacttcccaccaagcttataggcctaaagtccttgaggtcttcaactcctcctttcttaggaattaaaaccataaaagaggcattaatgctcttaatgaacttgtcctgatcatgaaagtccttgaagaaccccataacttcctcctttagaaagctccaactgaattgccaaaatgccattaagaaaccatcaggaccaggagctttatccccattgaggtccgagagagcaccaaacacctcttcctcagaaaaaggaacctctaacaaagctgcagtttcctcttccagaaccccaacctgcagcccactgcacctgggcctccactcatctgtttccgacaacagagagtggaaagcctaaaccacaccatccttaatgtcacgttcttctgatacccacgcccatttatcttaatcttcacaagggaattgaccctcttatgtgcattgaccattttatgaaaataaccagtgtttttgtcaccctccctcagccataactctctagacttttgcctccatgatgtctcttccattatcacccacttcttatactcctccaaagcctgctttatgagagtttgctcttcagcagttaacaccctatccccttctattgaatcctaaaacatcatctgctttaaaactgattcttttctagcagtgacattaccaaacacttctctattccaaatcttcaagcaggccttaagcgctgtcagcttttcaaacagagtgaaactgaaagaacctctgaattggaagcccatccaccaattccttaacaaatccttaaaaccttcttccttcagccacatattctcaaacctgaagggggaaggccccttcctcgctccttcacagtccaacataattgggcagtggtcagaaacaattctgggtaaaagactttgaactgccccactgaaataatactcccactcctttgaaactataaatctatccaaccttgactgaatctggttattcaatccacccccccacgtgaaaggccccccttgcaaagggagatcccttaattccaaatcctcaatgatttatgaaaatcttctcattgctgaagacagtcttgaaatactgttcctctctcccagaaatctaataacattaaaatcaccccctaagcaccatgggtcctaccacaatcccctgattgtccccaactcctctcagaaatcttccttaaacctcccaacagcagggccatacacccctgtaaagacccagcagaagccatcctccacatttttaaagcgacaggaaactgaaaaactacctatttccatttcaatcagctctaaaactctactacccaaaaaactaacaccctccctgccataccccgagaatcaagagcgccccactccaagaatctacccacccccaaagaccgaaccaaactacacgacatactttggattttggtttcctgcagacaaaccaaatccgctctctgagccttgattagagatttaatgagtctcctttatcgctatcatttgcccctctcacgttccaggagagaattcttagcttcatttactctcagagactgaacccccactctctcgaaatagagctcttccatgccctggacttttaaaattaatggaacactccaaccttttaagttccctttcagactttgaggattcaactttgacccttttagccccagacctccgattcttctgatctttcctcatgatccatttcttgagcatggttagaatttcctcttcacatcccgtggttggcattcccagaaagtcactaaactaggcaaggcaagaggacttccattccccatctgactccgctccaaacacaggctgtctcaaagagttgctttcatcgagactcgtctcgccgaccacaactagtgccctttcctccccggaagaggctgcctcaacacttctgtcaacaaaaaccatgttcagggggctaatgcccgcatccacttcaaccatctccgttgccgatccccaaccgcgactttggaacccattcgccgctcttttccgacaagaaatagatgaagaagagaagccctacaccccttgagacagcaaaggaaagggaatagaggaataccttgtcgcttcagcctggagagcttcatcggtgcctaagatccaagccgacgtcgacttgaaccactccaacgggacagtcgctgctgcgcgatcgtcccccgcgaggagccctaacggactatccacccccaattctaccctccacccctaaaagagaagggcctctcaattgggcccgacccaaacctcctctatcttcaaccgtgggcccagatcccctattgtctttttgcaattcaactgggctttcccccaccggcccacttgccccctttgaatcccctgtaaccaccaaacagaccctcctgccaccgccttcataatcatccccgcttgcaactgctttttgaaaacaacagtcccatccttcaccaaaacaaccactcttccctccagagcttgacacttcttccctaccagtctgcaattggaaaaggtctttctccactcccatactcgcgtgtggaccaccaccgtcgtcacctctaacctttgactctggcgacccttcattgcaacttctcggaacaaccttggaaaatttcggggggatttcccaccacaactggatggagtagcacatagactcgaccactagctgcgaggaaacgggtagacttctcccattcaacctcactagaatcctaacccactgtatttgaaccgaattcaccgatccttcatccattgctacgaagcccccacaacagtccccgattttaatgaagacttcacggctccacaaatgcaaagggagacccaacactctcacccatgcctccttgtaagacccctcctttaccaaacacccagtctcgtgttgccatctttccaaactgagaagtctctccttgaacctcctaggtcctctcaccaacaccctttctgcctctaaaacatcctcaaactcaaataggattaaagaccccccaaaaatatacacctgcaagccaaacctcagttgccaggtacttctagcccacatttccaaagcccaaacctctgaaactaagaaagatccctccctaaacttcccaaccaagcacttcctaagcttctcttctttgccttgcacaactccttctccaatctgcagacaaatagtttcctccgccaaacattcattctttcttactacactcacatacgaaattctcccacttccattcttcttactttcagccttcggactgcccccaatctcaacttgtggatccaccttttcctcagaaaaaggaacaaccctgagcgaccttaatttctcagccaatatgaaccaactcccatggtttccttttccttccgggaaaaccagagagaaactctttgattctgccatgaccaccttgcagaataagaacctttcagccccattctcccggcattccagcctgaaaaaccttcctctctccttccaccctttacttcacctcagcaactcaaaatctctgcaacaagcttccagtcctgccagaaggtagcgtagactgagctccctaaatctgacccacctggagtaacctcttccgcgctccactatgacccctctcagtctccctccaagcccctcaacaaagatatcaaaggacttggactccactgcaaaccaccgttttccttcttctcccatgtttgcaaaaggccccttcatttgttttgatagggaaacaaaaaattatattaacgatgtgaatataaaaaaaggtgcaccaaggtatacgagatgtatacaagggcaccaaataatgaaaaagggagaaaggaacttccttctcgttatctagatcacaaccaaacaatagacaataaattcacatccattgatcctttagtgcacaataatacaaagtacaaaaacaacattttgagaatctaatccgactattcctaattttcaaatgacccactatttctctctttctatatggtctaaaataaatgcaatggggtagccctccatgcctccatttttttcctctagaatcctctagtgtcagcttaggagagttgcttttactgaagacaacaatacccattccaccctaaaaagccaaaatagcaagttccataagatccttgttttaacacaatgaagaagaattcccttgaggctaacttaagtggcaaagggtgagggagggtttgtgggaggttccatgttcaagtccaaatggggacaaaaatttacctatagaaaaaaaaaaaaaaaaaaacaatgaagaagaatgtgataagttgattctcctgccattatgtagagaagaaatgatttgccacaatccatcctctcttttcaattgatccaaggtcaaaatctttctacatactacctctcatgcaaaccattttttatagggatccaaggattttaaaccacattaattaggaaagttcctactccctttgaccacaaaaaaactatagaaaggtttggttggagtccttctaaactagactatcctcaccttttctttacactgaatgctcttggatccttgtaagaaaatcccaaaccatttccaactcctaattatgaaattgtcttttaggtggtcacatagttgcccttgaaaagatatttgtcaagtcctcaacaacttttctattttcttttgatacttagtgggagacggcataaaaattcggtttgggaagatattgggttgaatggttgtcgtcttaagtttcaagttccaaatcttttcaaagttacaaggactagaaatatgcttgtttcctcatttgtagatcgatcctcttttagttcatcttggaatttcaatttttgttgaaacctttctaatcctgagtttgagggactaactagtcttcttttgtgcttgcttcatgtgtatatatgtcactgtccttttagatgaaagagtttggtcattgactcccttaagatgtttctttatgtgcttcttctacgaagatgttgtagtccttcctcactctcgtgctgttacttctcttgttcttgctaagttaatcttaaactaaaagccaaccaatggttaaggcttttgcttggctcgtggcaaataagaacgttaatactaacgacttgtttcagttgagggggcctaacaaagcccttagtttggaccattgtgtgatgtgcttaaagagtattgaatcagccaaccatatatttcatcactatgccattgctttggtactttggtataatactaatcttgattgggttccttttggaggcatagcagagatgttggaaatttcctttaagatctttggaactcttccaaaagggaatattcgttgccagatggttgctttatcgttgatttggtttatttggttgggaaggaatgcaaggattttgaggatagatggagatcagaagttgctatttgggacttgatatttttccccctcctttctatgagcctcaacccccaagcctttcatgaatattccattctaccttttaatactagattgaaagtgtgcttgctacccaattagtttgaagaagtcaatgatatgcgatgggtaacctaggacaaataggtattggagctgtgattagagatcattctgatatgatattgagagttttctctaagcatgttgaaatggggttcaccatcgaagtagagactttggctttattagagactttatgcagacaaaatctttatattatccaatctaattttagaggaagattttgccgatgtaatatctttgggtgaaaaataaggagagggttcatagaagtgtgacaattgaatgcacaaaataatagatgctgcaaatgagttagtttgttctttatcttggattccttgtttagctaaccaagttacagatcatttatccgaacaaggagatttcctttgttggaggtttcctttccccttgaatgtcaaatgattttctcctatatatatatataggtttgtacaagaggttaatttttgtggttctagttttgagttacttcctaccacctcttgtacatctttgaaggatagcttatccttcttgtaattaacaattgattgatgaatgaaaatgtttgtctttgattaaaaaagaaaaaaggaaaaaaaaacaaggtccccattgaccttcctaagagggttgcctacaattgtatgatgtgggatttaacaattgaggaaataaggagaaggatgaattaaaattttggtagcaagaaatgaataaaatgatataagataataaagcgagagaattgccaagcatgcaaaaggaactaatgtcatttaatcactctattttagtttacatcaatcaaccttttctctaagaaatccaaaatttaataggattctaatagcctattatgactctaattctctaagaaatccaaatctcaagttacttcacttaaatgtgtcaatgtttgattacttcactttgcctcattgagtttctcactagaagaaaccatgggatatccttcttggctaagaacttctctagttcccacatgggaagcatcacaagccacctcaaatgctttcttaaagtttggtagacataggataggaggtttccccatcttatactttgttgaatataatgtatgtatagtatactatctttccttgttaatataggtcacatgtatggtagttaggactcctagccttgtatatatatatctctcaattgtaagtagagattagatgaatgaaaaataaggtttttctcctttctctctctctctctctcaacatggtatcagagccaaaggagaaaacctaattttttttcggtttagccgtgtactcaattccggcgaaccgtccagtgaccgtgtttcactccggtcccctcattcccttcccgaaccaccccggacaacctcatcgccgtcggatctctacaacgccggcaaccctttccggcgaatttttccggcgacctcttttccgggcaccgaccacatattccgaaccgccggaggctgatctacacgccagtggaaaccccaccggcaaccggagtctcacgcgcccccacgcgccgatcttccccgtcggactgtcacccacgcgctggcgcgtgacggcgcgtggctcactttccggccacgtccgacacctctccaggctcgtccggcgccgtcttggccttctagccctccggcagtcctccacgagccctgcatctccacttttttttcctgtttttggctttcttgccattccgaccacatctgacagggcttcctctccatctccgaggcttgggtgctgcttctcttcctctccagggctctcttcgatccaaatacgtgaatatgaccaccaaaaatcagatctttacctctgttctatctggatctcctctgattacctcagagaaattggttggcagtgagaattatctctcctggtctgcctctgttgaactttggtttatgggtcaaggatatgaagatcacttggttacccaggaggcagatatccttgaggttgactgcgtacagtggaggaagatagatgcccagttatgtagtgtattatggcaatcggttgatccccgaattcttcttcatcttcaggcctataaaacttgttttaaattttggactcaggccaaaggattatacacgaatgatatccagcgtctctataaggtggcttctgctattgtccatctcagccaacaggacttggatctatctacttatattggtcagattgcctctcttaaggagcagttcttgactgtgatgcctcttactcctgatgttggggctcaacaaatgcagcttgacaagttcttcatggtccttactcttattggcctccatccggatcttgagcctattcgtgatcagattcttggtagttcatcagttccgtccttggatgacgtgtttgctcgcctcctccgtctctcgtccactcagactttgccatctgatagcgcttcagattcttctgtgttagtttctcaaactacctctcgaggaggacgcagtggtacccgaggtcgaggccaacgtcctcattgcacctattgcaataaacttggccacactcgcgatcgttgctatcagttacatggaagacctcctcgcactgcccatatggcccagtcctctgattctccgctgcctcagcttccgagctcctccgcatctcagacatctcaggcttctattgcctctgttgcccagcctggtaatgcctctgcttgccttacccacacatcttctcttggaccctggattctagattctggagcatctgatcacctatctggtaataaggatcttttctcctctatcactacttcctctgatttacctactgttaccttagctaatggttctcaaactgtggctaaaggtattggtttggcccttcctctgccttctctacctctcacttctgtcctttatactcctgaatgtccttttaatcttatttccatcagcaaaatcactcgtactcttaattgctctattaccttttcagataaatttgtgaccttgcaggaccggagtacggggaagacgattggcataggacgtgagtctcaaggcctctatcacctcacctcagattcatctcctgcagtttgcatttccactgatgctcctctcctcattcacaatcgtctgggccaccctagtctctccaagttccagaagatggtccctcgtttttccactttgtcgtcgcttccgtgtgagtcatgtcagcttgggaaacatactcgtgtctcgttcccaaagcgtttgaataatcgggcaaagtctccttttgagcttgtccacactgatgtttggggtctttgtcggactgcgtctactttaggatttcagtattttgtcactttcattgatgactattctcgatgtacttggttatttttaatgaaaaatcgagctgagttattctctattttccagaaattttatactgaaatccaaacccagttcaatatttctattcgtgtgttacgcagtgacaatgccagggaatatttttcagcccaatttacttcgtttatgtctcatcatgggattcttcatcagtcttcttgtgctcatactcctcaacaaaatggggtagctgaacgcaagaatcgacatcttgttgagacaactcgtactctcctcctccatagtcacgttccttttcgtttttggggggacgctgttcttaccgcttgttatttgattaatcgtatgccctcccctgtcttacacgatcagattcctcactcccttcttttccctgaccaaccactttatttccttcctcctcgtgtctttggttgtacttgctttgttcatattcttactcctggacaggacaagctttccgccaaagccatgaagtgcctcttcttgggatattcctgatttcagaagggttatcgttgttattcccttgagactcatcggtactttatctccgctgatgtcaccttctttgaggactcaccattcttttccaccacttctgagtctcttcccgtttctgaagtcttgcccattcccattgtctccccacctgaagctatgccccctcgaccacttcaggtttatcatcgtcgcccgcgtatcgttgctcctctcccttttcctgaggcacctgctgactcacttcctatcccttcggcttcacctgccccggctctgccttctcctaatgatttacccattgctgttcggaaagttactcgctctactcgtaaccctcatcctatttacaattttttgagttatcatcgattatcttcaccctattctgcttttgtttctgctatatcctctgtttctcttcccaagagcacccatgaagctctttcccatccaggctggcgacaggcaatggtggatgaaatggctgctctgcactctaatggcacttgggatcttgttgttttaccccctggtaaatctacagttggttgtcgttgggtctatgcagttaaggttggtcctggtggtcaggttgatcgccttaaggcccgcttagttgctaaaggctatactcaagtttatggttctgattatggtgacacattctctcctgttgccaagagatcttctgtccgcttgcttctctccatggctgctatgtgctcttggcctctttatcagctggatattaaaaatgccttccttcatggtgatcttgccgaggaagtttatttggagcaacctcctggttttgttgctcagggggagtctggtttagtgtgcaggttacgccgttctctatatggcttgaaacaatctcctcgagcatggtttagccgttttagttctgttgttcaagagtttggcatgcttcgcagtacagcagaccattcagttttttatcatcataactccttggggcagtgtatttatctggttgtttatgtggacgacatcgtcattacaggcagtgatcaggatggtatacagaaactaaagcaacatctttttacccactttcagaccaaagacttggggaaactcaagtatttcttgggaattgagatagctcaatccagttctggtgtggtcctttctcaaaggaagtatgctttagacatcctggaagaaaccggtatgttagactgtaaaccggtagacacacctatggatccgaatgtcaaacttgtaccaggacagggggagcctttaggagaccctgggagatatcgacggctcgtaggtaaattgaattatctcaccattactcgtccagacatttcttttcctgtgagtgttgttagtcaattcctacagtcaccatgtgatagccattgggatgccgtaatccgtattcttcgatatatcaaaagtacaccaggccaaggtgtattgtacgagaacagaggtcatactcaagttgttggttacacagatgcaaattgggctggctcacccacagatagacgttctacttcagggtactgtgtttttattggaggtaatctaatatcttggaagagtaagaaacaagatgtagtggccagatctagcgctgaagccgagtatcgagctatggctttggcaacatgtgaactcatatggttgagacatcttctttaggagttgcgatttggaaaggatgaacagatgaaactcatctgtgataaccaggccgcattacatattgcatccaatccagtctttcatgaaatgaccaagcatatttaagttgactgtcatttcattagagagaagatcgcatcaggatgtgttgctacaagttttgtcaattcaaatgatcaactagcagacatcttcactaaatctctcagaggtcctaggattaaatatatttgtaacaagcttggtgcatatgacgtctatgctccagcttgagggggagtgttgaatataatgtatgtatagtatactatctttccttgttaatataggtcacatgtatggtagttaggactcctagccttgtatatatatatctctcaattgtaagtagagattagatgaatgaaaaataaggtttttctcctttctctctctctctctctcaacatacttgatttcttcaaatgccttgtttgctgccttgattgaaatgaatggaccagatttcataaatttagtaattggggccatgatattgctgaaattttgaataaatcacctatagaatgtagtcattccatggaagctttgcacctcatggatatttacaagccaaccaacaatagctttgatttgatccaaatctatttcaactctgtagagaacatgacaaagccaaggaatacatcaataggtctaatggaagtacattttttcaaattaatgtgaaaacttttcgaccctaagagtgcgcatcagttgcattaagtgttcttcatgatcttcacaagatcgtctatggataagaatatcatcaaaataaataacaacaaacttttcaatgaaaggcttcaatacctgtgtcatgacctgtatgaatgtacttgggcattgcttaatctaaatggcataactaaccactcatacaatccattttttgttttgaaggttgccttccattcattccctagtctaatatgtacttgatgatatcaaattccaatttttgagaagattactaacccaaccatcatatctagcatgccatcaagtgttggaattggaaattgatatttgattgtgattttattgatttcacaactatccacacacatttgctacgatcgatccttgtttggtgttagtagagtgggaactccataaggatttaagctttctcgaataaagcctttagtccaacttacctgttcaattcaacatgttttgttgggttcattctttaggctgataaatttggcaatgatgcaccgtgaatcaaattaatcggatgttgtatgtatcggtttagaatccaattgaaaattgttacattatttacaatagagtatacatatttataaagaagaaataatctaagaaaagaaaaaaccatagacttcttaaatcagtgctacaaatatttgtcaacctaattatgaagttgactaaaaaaaacttcctaaaacggtcttaaactagtcaaagatagctaattaaccactagaatcaaggatgaagatcagtagatgatttccatcaatcaagggtgagatttgtggctggttttcttgagatcaatgactaatttccaacactccccctcaagttggttcgataatatccttcattcccagcttgttgatcattgagttgaaccttagattaagaactcctttagtgaagacatctgctagttgcaacttggaagaaattaatggagtacaaatcattccactaacaattttctctttcatgaagtgtttgtctatcctaatatgttttgttttatcatactacaccgtgttgtgggcaatgcttatggttgccttgttatcatggtataacttcataggaccctttggttctatctacaatgccattaataggttctttatccatatcaactcacatattccaagtacaatttcctatatttagcttccacagttgacctgactaccataggttacttctcactcctctaggttactaagtgacctccaacaagagtacaatagctagaggtggatcttttgtcagtcataggtcttcccctattagcatctgtatatgcttccgcatccatatggccattttgagaaaataacgttccttttcttagagtatcttttaggtactttaacattttttttattgcttccatttgaggttctaaaggagagtgcatgaactgactgaccacacttatagagtaggcatatttgagtctagtgtgggaaagatagattaattttcatgcaagtctctgatacctttctttatctactagagcaccatctgtaactacactaagcttgtggtttaaatcaataggattttctatagatttgcacccaaacattccggtttccttaagaagatccaagacatatttcctttgggatatgtaaatcccttcttttgacctgactatttcaattcccaaaaataacgtagagtacccgaatccttgttttcgaattcctttgtcaacttaacctataatttttgaatttcctcactatcatcacccgttatactgatgttatctatatagacaattagtatagtcaacttctctatggatgatcttataaagaaaagagtatgatatgcctgactttgatggaaatcgaacttcaagagtgattgagaaaatctttcaaaccatgctctaggtgattgttttaggctatatagggattttttcagcttgcattttctttcattattctttggaaaacctggtggaaggtttatgtagatctcttctaaatttccatgtaagaaggcgttgttgacatcaaattgttgtagtggctagttgtaattaattgcatagagagtagagttttgatagagttcatctttactacaggggcaaatgtttcttggtaatctataccgtaggtctgtgtgtaccctttgggcacaagtcatgccttatatctctccacagaaccatccaccttgtatttaattaagaaaacccatttgcatcccactggccatgttccttggaataaatcaacaatatccccagtctcattcttctttagagcgtccatctcctcatttatagcttccttctagtttgggtcagcaaaggcttcttcaccattctttggaattgactcctaatttatataagaggtaaatgccttataggtctcaacaattctatgataagacacaaaatttgccaaagggtgtttggcgcaactcctaacacccttatagattgctataggaatattgagattagtatcaaagagaggagtagaaattgaagtaggattggaaggattactattagattcagggggtatagaaaccataccttcatctgaagttcatgattggctttgctttgaagaattagggctttccactaacctagattgatcttgagggcttttggtacaaacttgtctctccactatccttctatcattgtgagtggtctccaaggaattctccaagttctccccattttcttgaatactccaaactagtgttggtaatgagattgaccagtcttgtgactgaccttctactcccatttgccccccctgaaggttagtctttgtatagtatggttgctgttaaaaaaaactcacatccattgtgacaaatttccttctggttggaggatggtaacacttgtaccccttctaggttggagaatatccaaggaaaatgcacttaatggcctttgagtcaagcttagatctatctttgttagggacatgaacaaagacattgcttccaaagactttcaatagtaaagaactaaatatagataggcgaggataacattctttcaatgtttttttttttttgattggaaacgacacaaagatttattgatagataaaaataagtacaaaagaaggatgaggaatcctcccgccaaagaaagctaaactatagaaaaatacactgaaaaacaagcaaacactctaaaaagaccactccttatggagtacacactgctatccaatcaagttgtatcacattaaggggagtccccttaaaaaccttggaacaataagcccaaagagaagcaaggaaaacaatagagtcctaaagatactctgaattatttgctttatcctaaaaaatcctcgcatttctttcccaccacacaatccgaataagagtgatgcttgcagcttgccacaaggcaatccccctcttagacaaaccaaatccattaaatttgatgtacatcatgtcaaggatgctcctcggggggacccaatccatcttagctaactgaaataacctgtgccacaacccaatcgtcaaggagcaatgaagaaaaatatgatcagctgattccccatgcttcatgcacaaaatacaaatatcaggactaagggctttgtagggtcttctcacttgtagcatgtcattagtattcaccttcttgtgtgccactaaccagacgaaggactgcactttgaaaggaacttgagaattccaaacgaacttagaaggaaaaacctgaggagatccagaaaattgggataaagctagaaagaaagatttaactgaaaaaagccctgaagaagataagggtcaaaatttggcatctggaacagaaggagataaatgcaatccattgagagatcgcatgaggccttctaagtcctctatctcagaatctgacgggttacgacagaaatttaaattccaagagaaaggacgagtagaaccgagaactgaagaaataggtatgtttttatccaaaactactctaaatagtcttggatattgggttcccaaaggttggtccccccaccacaaatcttcccagaaccaaattctttccccatttcctaccacaaaccgagtaaacgaggaaaactcctgaaagacttgagtaatagccttccaaggacagcgatgtgaccatctgactaatgtgttagcatcccaaccattggagtgtgaaccataaatgcttagtatgacctgatgccatagagctgaaccctctctagggtacctccacagccatttccctaaaagagcgagattcctcagagaaatattcccaaaacccaaaccccctatttccttcggtttacacacgacatcccacctgactaaatgatctcttttgccttatccaatccctgaccataaaaaatccctttgcaacctctcgatttttgcagcgattgaagcaggtaacttaaataaagaaagaaagtaacaaggcatatgggtaaggcaagattggatgagagttatcctccctccgaaggataggtatgccttttgccatccatctaatcttcttgaaattctttcaatcacaggatcccaaaatccacctgccctggggttcccacccaaaggaagacccagatagagtataggccagccagaaaccttgcattcaagcgtctcagccaatcttgaaatatgagcttgatccaaattgataccataaatattactcttgtcaagattgaccttaagcccagaaatatgcccaaatgctaacaaaagactcttgagagtctgcaagtcttattccctagtgttagaaaagaagatggtgtcatcggcaaattgcaaatgagataccctagttctatttctacccaccctgaaaccctccaacatatttctctcctctgctctcaaaagcatcctactcaatacatctgctactaaagtaaacaaaaagggggataaagggtcaccttgtcttaatcatctcgatgccttaacccaacctttagcgctaccattcaccaatactgcataagataccgaggacaaacatccactcatccatttcctccatttaggactgaaccccttcttctccaacacttgatctaaaaaatcccaccttacgtgatcgtaagccttttcaaagtcaattttgaagacgacaccttcctcccctgatcgtcttctctcatccactgtctcatttgctatgagaaccgcatccattatttgtctcccttgaacaaaagcgccttgagtagagtggatggtttcatgtaaaacccctcttagacgccctgagagcactttggctattatcttatagagactagtgatcaaactaatgggtctaaaatctgagattttctttgtcgtactctttttgggcagaagaacaatgaaagaggcattagtgctttgattgataactccgctcctatgaaattctgcgaacactctcactatatcctccttaatcacatcccaatagtcttggaatactgcaatagtaaagccatcaggccccggagccttgtccctatccatctgaaaaatggccttagaaatctcttcttcagtgaaagggggatccaaacttatcgcactctcttccgaaataggggaccaatctaatccttcaatacaccaagactctcctataggactcgcgtagagtttttcaaagtaaagtaagatctcctctgtgatactctcggcattattcaacactaagcccctttcattttccaacgccttgatatatttcctatttcgcctgccattagccactttatgaaaaaacttagagttgcaatccccttctttaacccatttcaccctagctttttgtctccaatggatttcctccctcaaaattaattcctctagctccccttttcttaaggctctttgatctaataatttagaggtgagacccccatcctgctcaatggcgtcaaagttagctaaatcattgaggatagtttttttcttttcattaagctctccaaaagaaagcttattccattccttcaatttggctttaacaaattgtaatctcctcatgaacttgtggccttcccatctgtttccttgaaaacccctccaccaatttctaaagttctccttgaaactaggatgttgtagccacatgttctcaaatctaaaaggtgttgggccccacatgaacgggttggtatccaaagcaattggccaatgatccgaggtccttctgataagggtttcttgaatgccttggggaaagagctgcccccactcatttgagtaaagaaaacggtctaatctcttatacataggagactcttgcatatttgaccaagtgaatgatgcgttccgtagaggtggatcaagcaattcacattctctaataaaactatcaaagtctctcatgcttgaagttagcctagagcccccaatttttctgaacttctccttatgacattaaaatcaccgcccacacacctcaacggaaaagttagaccataaatgtcaatgttccagtgggagtttgaaaattgagtacttttgaagccatcctattgataaggttggttgttgtcaacactatatttccccaaaaatgttttaaaacatttctggcaaacattaaggctcaagttaccttaagaagatgtttattattatgttctgtcactccattttgttagagagtgcctgcacaacttgattgatgaataacacctttttccaaggaaaaatttccaagtctttaattgaagtattccccatcattatcagatctaacaatatgtatcttggcgttaaattgtgtttagaccattaatttaaattttttttttttttttaaatcttttaaatttttttcaattgtgccaatagtttcagatttatcctttagtaaatagacctaagtagtcatactgaagtcatcaataagactaagaaaccatccagcataaaaaatataagtcacccttgagggccccaaaacatcggtatgtataaccgggaaaggaatttcacttcttttaccactaatgggatattacactctttgatttttagccaactcacaaatttcacactcaattttggaaaaaatctagattattacacagatctggatataatttcctcatgtaatggaaactagtgtgccctaatctttcatggaacaaccaatagtcttctaagtttcccttttttggaactccctttatttgataggcttgaggtgtcttgttcttctcagtttctaggtagtaaaggctgttcctctccttagcattgccaattatcttacccgagatttggttatgaaaaacacagctgttgggttagaaaattacgacacaattgctggtttctcagagcttatgaactgacagcaaattataagacattttaggcacatgaggaacagaaaaaagagtgatatctggtgatatataggcatttcctttgccatgaaaagtagaaatgagccattagcaacttggacattttgatcatcagaacatggttcataagaaataaaacacttgagtctttggtcacgtgatcagtggctcctaaatcaatgatctatgagcttgaatataaaatagtggttgaaagtagagagttaccaagaattccagattgagcaaatgcacaggaagtaggattgaaggtcacctcatttttttctaatgatcttgcaaaaaagatcaagctgttcctcagcattttgagtatttcctccaaccttggcagtaactttggtggaaggaggagccttgacttagagatgcttactgcactttgagacttcattagagttgtttgcaggatttagggtagaaaattgattagccatatttgccaaatgcaaatatagaggaattgagataagagaaaaataagataaaggtgtctaagaacaagatttttgtgtatggtgtaggaagaatgaaagagccagtaacgaaggttggttttaaaaaaactgaacaaattacagcaatgaaggctgcatatgtgtgagcaatgaaggctctgataccatatcggtttagaatccgattgaaaactgttacattaatatacatatttatatagaagaaataatctaagagaagaagaaaacataaacttcctaaattagtgctacaaatatttgtcaggctagttacaaagttgacgaaaaaaaaaaaaaaaacttcctaaaatggttttaaactagtcaaagatagctaattaacccctggaatcaaggatggaaattagtagatgatttccatcaatcaatggtgagatcagtgactgatttccagctgtatgttacgcatcaaaggaagctcattagataattctacaagccacaagtcataaaaatcatcaaggatattccatacttttgttggatattccttatctttctctttagattcattaatggtcatggtatatcacctttttttgcatgagacacgtgtatggaaaattcttgcctatgattaagctcaatatgattggttagtactaattgcattgtgttcctacctaaatgtgcactttatgaattcataattttctttctttctctttctcctatttctcaagtattcagatagtctgtagatttttcatcattctgggaaagttttgtttccccacttaaatttttactaatgacatcctttggcaaaatttacattcccattgtcagg

SEQ ID NO: 10310 - DNA, 9134 bp, Vitis vinifera
  Intron number 2 from transcript GSVIVT01021028001 (locus G SVIVG01021028001) derived from phytozome v7.0 (chr-ID chr5 ; pos 15073899 to 15083032 reverse strand)
atttgacattgagtggagacccacctttagaaaaggttggttcataaatatgatatgtcttagtgtctttttggcatgattgagttcctttcttgggtgtaatcttcataagttgctagagtatttttctttaaaattctaatttgtttttatgtgttacttaaagaatttcttttaccttttagggctgtcctgcatgatgacgtcatagattttatgggactttgcctggtaattttttttggaaactaaattatcaatttttaaagaatcatgcagttttgtctatctacaaaaatttacacctcatttatagtgaccttgtttttcattttttacctttttatgaaactgtaatttgttatagttctaactttgccattttttttaataataacaaattatgaatctttgtggtatacactaaacacacacacacacacacacgtttcatgaaggttaccactggcatagatactcctacaatgactgccatgcccatcttgaatgccaaccatcatattgattggagagattaagacttatcccattgacatagtgttttagattagagttttactcttttcatatctaatgtgttgttgatattttattacctaaggagaaaaaaagcaatgcaagtttttcgatctatgaccatcaatagctaattaatatggcctttgggatgcattacagtcttctggcaatctgattttatgtaacaagcatggtgagaatttgataaaggacaaccctaaggtggatccattttgcaaggatgacttgcccttcatgctctttttgggcattaaccaatgaattttgttgtttctgattagaaaaataaaatatgtcaaggaatttagaaaacaaggagagattaaaagaaaaaacccttgatgtctccttaatactttttagaagtctcacccagaagaaaaaatagtaggcttgctattaaaggatgcaaacattattttccttttaattaaatgtccttatttatgggcttcaggaatcgtaaaatcccaatgaaaatgtaaaggaaaccctacctaggtagtaaactattagcacactaattattttcctagaatttctaaatctaaatgaaaaatgctttcttgatacttggaagtacttagggatagcgggtgaggttgaataggttgtccaaaattcttaagcctaacatttaattctttctgatcattgttagatccaattatatgtaatttgaaatgtgaagcaatgaataataaccaatgatcaaaccataataattaggatacatgatatatgtggtaaccatctaagaaaccttcataggtgttaaaccatgggtctagactgtctagtcaactgcatattaaaatccactaaatataaaagcaagtatatagttttacctaacctagccacaaccttcacttaagggactttggttagcacctacactttgctttcatgtcctaaacgcagtgcctcgtactcctcaatgaatcacctcaaatatatatcaaagcacgtgaattggcacacctactcatcttttcaccaaaaggactttcaagatcaatcttgaacagtttttaagaatttcagatttagagcagaataatggcattatatttcaataacatgcatgttcgcacaaagaattaaccttagatatttgaaagtgaaccctaggtgttcaagttaggttataataggaaagtgattagtaattaaaatggaaattcctctaagagaacatgtgaaagtctcttgcacggcattggaatgctttagtgttcatggtttgaacacctcattgtttatgatttgaacactctgttattcatggttagaatgttctaatagtcatggttagaatgtgctattcttcatgatttgaacgttcattttcactttcccctttttgtttttctctttctcaacttgaattggatacttatattgctatcactttgaccaaatttgaaacacatacttacctcatcatataccttcatctttagatgtcttcaacttacttcaaatctaacaagtccatttggaagtaagcaatgccaaatcagtgtataattttttatgagaaacaaaagatgtattaattatgataaaaagtacatgagaagcatgaggggtcctccctataataacaagaaactaatcatagtattaataaactcttccaccatacatacaaggagaaccatacaaaaaggtttagtttacttaaggatatacataggtgatgacaccttctcaattctaaactaagctccccccaatgttgtctaacccttttgatttacaaattgaatatgtcaattaagttgaataacattagttggaatgccttcaaagttgttggtacaagaggcccaaaaggaggaatagaagtgaagtagatcccataatatctctgttgtcctccacttctcctcaaagatcctaatatttttctctcaccacacaatccaaggcactatgagataaacaattttccataaggtcttacctttgatgcaaattctcaaatttctatatgaagtggtcatcatgttgcatataatcttgggtggacctcaacctattgtggtgagattgaatagtttgtgccatagtcctaatgttattgggcaatgtagaaatagatgatcgatcaattctccactctctatgcagaagatgtatcaatcaggactataggatttgtaaagtcttctcaactataacatgtcattggtatttaacttcttgtgtgccactaacaaagccaaggccttgatcttagacgaaacttctgatttcgtaaaaatttggtaggagagaaaagaattggatttgataaatcgaacttgaccaaaaagaatgattttactgagaataaatctaaagaggataaagaccaatctcttgtatttgtgacggatgaacaaaagtgtagaagagtgagtgtggacataactcttttgagattctcaatctccaattagtgaggttgtgacggaagttaaggttccaagaaagagaagtaaagttatcaaggatagttgatatggtgagacttttttttactgtgataacacagtaaatacctgaaaattgtgaacacaatggttgattttcccaccacaattcttcctaaaaaagacttcttgtacaatggccttacaaggacatcaatgtgaccatataaccataattttggtgtcccatccattagaatgttgtctataaatacttgaaataacctaatgtcaaagggcaaaactctccctaaggaaccttcagagtcacttccctaagagaacatgatttcttagagaattctccccaattaacccccacactgctttggcctatacactatgtcccaattgttaatacgatcctctttaccttccctaacccttgaccaaagaaaatccctttacaatttatcaatcattaaagctactaatgttggaattttgaaaagagataagaaatacttagggatgtgagacaaacaacttagtgtatatttgagcaaaattgtaaacttaatctagttacactaacacattcacataaaatttttatttagaagactataaacttttcaaaagttagaaacttttagaacatagaaatattttactaaatagaagcatttagtaaatatattagaaattataaaggcatttttaggaaataagaccttatagaaaatctgaacttttttttttttttaataaaatataagattttacaaaatgaaaaataaaaaagtataaaaacttattacaataaaaaatttctagtgaaaaattcttttaaattttagataagagaaaataattagctacttataattttcacctttaaataccctaaatcaacaaaaattaccaaaatatccttttcttcattctcattaatgaacctaaggggcttttccccactaatttctcctagcttgggaggaacttgaactcaagtttttatgagtctacttttttgataagtaaacacacagagaaaatatatattagaaaaaagggcaccttaaggctaacccaaaagcatacagggggtataccgtatacaagaggtgccaaaaagcaagaacaaaaagaagaggggatacaaaccaaccctcaactagaacccaaccaataaaaaaactgattaaaggaagaggtccttcatttacaaccgacttagtccaaaaccaaagattacatacaaaagaatttttcaacctataaattgaaagctcctcattttcaaatgcaatcctgtttctttccttccaaaccgcccaaaaaagacacaaaggggctgccatccacaccttactacccttcttgcccatgttaataccacgccaaccaagaagtgtatctctaactgaataaggaaggacccaaataacgccaaaaagagcaaacaataactctcataaaactcttgccttggtgcaatgaattagaatatgatcaatagactcttcttccgcacaacaaaggaagtatctattagctaaagtccaccctctctttttaagttgatctaaagttaacaccttaccccgagaggcttgccaagcaaaaaaacccactttagtaggaacacaggggctccaaatgatgctattaggaaactaaacaacacttcttgaaactagagcactataaagagatttgacagagaaaatcccgtccttagtctctttccacaacactttatcttccagattaggattaagcttccttccttggattgtcaaaagtaatctctccacctcctccacctcccaatcattgaagggcctagagaacttagggctccaaaccccttcctctcccgaagagtcccactactccactaaccaagcctctttaaaagctgcaaaggcatacaaagaggggaaagaattacaaagagcgaagctcccacaccatttatctttccaaaatttcacttttctaccgtcccccacagaaaatacaactttgttttgcataagagacccttccttccttatttccttccaaaaacctactccaaaaccctccctcacttccctagtataccaacccccttcttcctccccaaacttcctactaataacatgcttccaaagagtcttttatgagtctatgatttattgaaatacgcaaaattcttttaagccttcttcagtgtttaatgcgaataaattgattacacataagtagtaattctcttaagatgaattttgcgtaagaatcacaattagggagttggccccttcaatctaccatatgagcaagtgtatttcggagcatcaaccaacactttgatttgttgttatggggtagcttcgacctagagtggatgatccatcatcttcacaacaaaaacttataagataaaagaataaagagagatagaaaagatggaaactttttgaagatttctcaaaaaataacaataataacaataatccctccattgttataatcaacatatatatatgcaattcaagataccaatcctaaaggaaatgcacttctaaattctagttaaattatgaagctaaggtactacaaattagaactaaattaaaaaccaaattttaataagataatttttaggcaaatatagatccttctcattctctacatctatgtttataatgaaattgaaatgagtggttttgttcctcgccaattctatctggtataattctgggcatggtactgctcaagaagattgggattaagctggcacaactcttcttctgtaatctaagttgcgttaaagactggttgaccctagcatttgacaagataatgtcgataatcatcatgagaagatctactaacttcattatctggcacatgctcaatctactccatgtgtggtcgtatgaaggtggaggattgggaattcttaaagttatagctaaacttgtattctaattaacacaacaagagactaaaaaatgtctcgatgaggaaacctatccttcacattgaaaattggattaatattcatatcatttggtaagccaatatgtgttaggcccaagtttgtgaataataagaaaaggtccacttgcttgagcaaaaaacttcttgaaggaatgtttgaggaatccctcagagtgaatacagattatggcactccattaaattcttgatttctactatgcacatcgatggcaagtttataattacattgaatattagcatggaaatcatgacctcccagaggaacaaaaagcatggagatcttgaatgtgttgaacaaaggattcaacaagttaaaaaagtctagatttagaagataaagggatgagatcagtaggatgacaaggaaaacgaccataaccaattttaaatgatgatttaacagttcacaaaatgttataggcaaactctgctattgattcaaattcgaattaccttgttttattctaaaaagattcctaagcaaatctcctagattgcgattagtaacctttttttgatgattaattcgaggatggaaagctgaggagagtttcatattggtgtcactccaaagtttccttaaaagataattaacaaatttcacatccccatcaaacatttttgaagtgggtaatctgtgaagcttaactatttccttaaaaagaataacttggctacatctgaggtttcagtttttttgcaatgggtgataaaatgtgtcatcttagaaaatctgtctaccacaacaaaactagaatcatgtcctcaagttatttttgataacccaagaacaaaatccatattaaggtctttaccaagggtgtggtgtgcaggtaaaggtgtatacaaaccatgttttttcttcttttccttaggtaattgacaagttcagtactgtgacacaattttggcaatattgttttcaaggaatgcaaattagacctatcctccatcaaagcaatagttttatccctactaaagtgaccaactagacctgtactgtgcaactccctgattaacaaatcttgaattgaagtgtgaggaatgcatactttaaatcccctaaacaagtggccatcatgagtaacaaaatcaacatgatcttaatgatgactatcttaaatttcttaataaattacaagaaaatcagggcaattaagatgcttaccctcatcctcccaaatccagccacattatactcatagcctataaaacaaccactacttgactaaggacattgacagtttactctcatttcctacatgatgatggagaacaaaaacctattcttaaaaaaattctatccacctagtgtatttgatgcttaactttctttgagaaccaaggtaacttggtgcttgatggttgaagtataacaaaaactgttgagataatatataatacctctaagaatgaagggtttggatagaactgttaccataaatggaatacatttgtttagactcattcccatcaaagtatgctaggcgcccttcttgacttaagacaccaactatgctaacacttcattcattgcatgccacctcaaagacttctgaagaatcaggatggcttaaggtagatgctaccttaattattttgtattttgtctccttaagtgcctttcttgctacttcattccaatggaactccctttcatgcaattaataatgggagtcattctagtactaaatcccttagggaatcgcctataaaaagtgactaatccatgaaactatgaacatcacaattgtcctaggcttaggctactctctagtttttctgataggtaaaacttaggctactctctaatagctcttaacttgttgatgataaacttttattccctttaaggagattacaaatcgtaaagtgattgaaggaaataacatttcttaagattaacataaggtttcttcgctcagtgaagctgcaaataccttcctaagatgatctaaatgctcctctttagaccaactatggatcaggatgtcatcaaaatggaccacatgaacttccctatgaaaggaagtaaaccctgtgtcataaccctcttaaatgtacttcatgcattagatgacccaaatagcatgattaacacataaagtccatcttgggtcttaaatgcagttttccactcatctcctaatataatatatatttggtgtaacctctacataaatcaatcttgaagaaccattctgattctgccatcaagtctaacatgtcatctaacctatgtatgggaaaactatacttgatggttattttgttgatggttcaacattctccaagaaccatccttcctagggataaggctatgttgaataacacctttttaaattgtttatctacgtgcctatttatttcaactctccttagaatttagtctatagtattggagcttaggtagttgagaccttggaactagatcaatgacatgttgaatgttggtcaggggtggtaactctctagggaggtctatagaggttatatcttgaaactcgaccaacaattcgttgacttgagttgggaacgtaatatcaaatcctaattttaaggcaaataggaatctttctcaatctcttcaccaccatcaagaataagcttgaaatgaatgtttttgatccccgtcactccactttcagaacttctctttttgtacctttggtccaattgggatcatagaattgctagcacttacccacactctgaagataccaaaataaactactctctttatgggagccatttaattaattctttttaatcagaagggcctatcttataaaagaaaagaaatatgaagcggcaaacatgtatatttatcataattttatcttgtatggtatgcatagcataaaatgcatatcaatgttacatattattttctacataaacataaaattgatatcattgttagatattgttttccacatatactgtatcttaacatccatgctacactgcatcctaagttctttcaaagaaatatgaatatctgtgatatttttgaatgagaaaaatcagaaatataagagttttaatttatcaaaggaagatagacttaaaatgttggattagtattaaaagaaagccttcttgacaggtgtgtcacaagggaaggcggcagtt

SEQ ID NO: 10311 - DNA, 5777 bp, Vitis vinifera
  Intron number 8 from transcript GSVIVT01034014001 (locus G SVIVG01034014001) derived from phytozome v7.0 (chr-ID chr8 ; pos 15873489 to 15879265)
tccttgatcatcgtaatcttctaagattggaattttttttttaattctttctaattgatgcatatgattagatcatattttctcattattcttagcttgattttggtttaaaatttaaattgtaactttgataacactgaagcagtgatcagggggcttcatcagctctgtaatgtttgtctggtttagatctcaatctccttgatagttattctttgcattgatcccttctgtttttcatcccttttggtctcagcatgactccaatttatttgtttatatgtgtgcatttggtactgttaactagtttaggattttttttttctttccttttttcattttttagtcatttgaaatacatgagactgtctctgctttcctacattcctgcgtttgggatccattggttatcctggccctatgctcctcctcctctgcttcatggatttttaatctaagttttttgtgtataggttccatggtcatcatgtgattgctgtttgctgcttcactaaatcagcagttgtttcatgattggctaataccatttgtttttttttttttgatagttaaattcaagatagtattgagtatgattggctaataccattgcactctatgataatcatttcagaatacatttcttctaatttttctcttaaaagattgttggactgtttcccaggaataacttatgcttgacccctgtgtacttgcatcatagttggtaggtccattcttcccagtctcctggtaaaaagagttgtatcacatggcttggatttttgctgttttctccttgtacataatcccagtttattgtaagtcacttcctagaagggctatactcttgacacctcgacactttttagttcagcctcatttgtttttgtattctaaaatttccttgatgtcttttggggagtagattgcagaactggtaccagaaaaacatctgcagcaagagaatagaaacacatggttgatgatattctacacttgttcatggtttttggctgatttttgttttcatctaaaaaatggaccctactagtttcacttgcctctgattttgtagtgaaatcttttattaatgtcatttcctcaagatgggagaggttattgcctgtttatttttatttttttccaagcatatctaaataaagttttatgataggcatgcacacacaaacatacatacatacaaactggtaaatttaagggagaatatattatgtttgaaattttttatctttatggggtccctacattgtttccaaatagataatgtccagaaaggtaaatgaataaaaggaatttgtcactatataaagctattgtgtaacaataaaaaatactaaaaaaatgcaggaaaagaatgaggatgaattgatacagatggaatttatgagaactaaatattttgtcttggcaggtataaaaattcatatataaataagattttttaaatggagtggggaattagtggatcatctttttttgcatttcctagtagtattagcattatggcatataggttgagacttactgggattgtttgggatccacataggagtattgtggagatgctgactattgcttactaggatttagaggccttcctatagggaagtcactttgatgtattgctagtcttaaattaatatgaactatatggcaggagaggaatgcaatgattttttaggaaaaatagagtattttggaagcaatgtgggatttaatcaaattctctgtctctagtgtcaaccaaagtaacgtttgcaggcatcccctttgagcattatattactaaactggaactcagtatgtagatctaccaagttagttgaagagatactccctacttggatgtctcctccaatgggcaatgttaagttgaagttttatggttgctcctttggtaatcctagacaattaggaattggaggaatgtttgtggatcatcatgaaacattagtgaaattattctctaaaaatgttgggagtgggtctaatgattgaggcaaagatacgacccttattagaagggctaaagctaagagtctatccaaccttctagtggagggagattttgcagtaatcctaattcgggtaaataagaaagagagaagcttgtagatatttgatgagtgactaggctaaaattttgatagtgctttagagttggggtgttctttctgttagattcctcaaatagtcatggaacgttagtgagagtattctccactgggactaaccatcaaggaggagattagccttattagatagcctaaagctaagagtcttaaaatcttggaacaaagaggtttttggaaaggtgggagtgaataagaagttggctttggataaaatggatttctgggataatcaagagaagggacgtgttttatccatggaggagctggaggctagaaaggaggcaaaagagaattttgaaaaatgggttctcatggaggaaatttcttggaggcaaaaatcaagagaggtgtggttgaaggagggagacaaaaatactggtttttttcataagatggtcaactctcatagaaggaaaaattgcttgtctaagattaaggtgaatcgaacttggttaacagaggagcaggaaattaagggaggggtggttggagcatttaagaatcttttgactgatcctggtgaatggcacccatctatggatggtttggcttttaataggattgatggtgaggaggcagccaggttggaggaggtgtttacagaggaagaggtcttttctgctttatcagatatgaatggagacaaggctcctggcccagacggcttctctctcagcttttggcaatttagttgggagtttgtgaaagtagaggttatgagcttctttaaggaattccatgagcgtggcagattcgtaaggagccttaattcaacttttctggtccttatccctaaaaaggcgggcgaggaggatcttagggattttagaccgataagtttggtaggggggttgtataaactgttggcgaaagtgttagctaacagactcaaaaaggtcatgggaaaggtggtgtcttcagctcaaaatgcattcgttgaaggtagacaaattctagatgcagccctaattgccaatgaggcaattgactcaatgttgaaaagtaaggagagcggggtgttgtgtaagctgaatatagaaaaggcttacgaccatctaaactggaatttcttgttgtcggttttgcaaagaatgggatttgtggagagatggactggttggatatcttggtgtatttccacagcaactttttcggtgttaatcaatggtaccccagagggtttcttcaatagttcaaggggtttgcgtcagggagatcctctttctccttatctttttgtgattgggatggaggcctttagtaggcttattcatagggttgtgagagggggtttcctttcaggatgcaggataaaaggtagaagaggggacggggcgttggtttctcatttgttgttcgctgacgatactctagttttctgtgattcatcccaagatcaaatggcttatttaagctggttgttgatgtggtttgaagccttatcaggtttgagaatcaatttggataagagcgaaatcttgccggttgggagagtagagaatttggagttgttggctcttgaggttggttgtaaagtgggtaggctaccaacttcttacttggggatccctttgggggtgaatcataagtccgtggccgtttgggatggagtggaagaaaggttccggaaaaggcttgccaagtggaaaagacaattcatctctaaaggcgggagaatgacccttattcggagtaccttgtcaagtatgcctatatatttgatgtcgttacttcgaattcctagagcggttagtttaagattggaaaaaattcaaagggattttttatggggaggaggagctttgaagaaaaagcctcatctagtaaaatgggataccgtgtgtttggataagagtaagggtggtttgggagttagacgtttgtctattctcaatagggcccttctttgtaaatggaattggcgctttgcgaatgaaagggataaactatggaggcgtgtcattagtaggaagttcggggaggaagaaggggggtggtactctaaagaggtcagggagggctttggagttggtttttggaaggatataaggaaggaaggtgctcttttgcaaaacagggtgggcttctctgtggggaatggtagaagggtgaaattttggaaagataattggtgtgggaactccactctctgtaattcattcccctctttgtatgcctttgcatcttataaagaggcttggatagaggagatgtgggatcattttggaggtgaaggggtttggagtcccagattctctaggccctttaatgactgggaggtggaggaggtggagagattacttgtgataattcgggagaggaggcttaatcctcttgcgaaagattgtttgttgtggaaagagacaaaggatgggattttctcagttaaatctctttatagcattttagtttcaagaagaggtgttcaattccctatcaacattatatggaatccttgtgtgcctactaaagtgggtttctttgcttaggaagctttttggggtaaggtgttaactttggatcaactcaaaaagaggggtcggtgtttagccaacagatgctttctttgttgtgaggaagaagaatctattgatcatattcttattcagtgctccaaggctagagtgttatgagaattattatttgctctttttggtgtttcttgggtcatgccttattcggttagagataaccttagtgggtggagtggctttaatatgggcaagaagcgcaaaaaggtgtggaagacaaccccctcgtgtatcttttggacggtgtggaaggaaagaaataggattgcctttgacaatgaggagctatcaatgaataggttgaaaaatttttttgtttgtaatctttgggtgtggtctaaaccagttgtaaatgaaggtcctctctctttactcggttttttttattggctaggtgctaggtgagggctggtattgtatttctgcttctttttgtgccctaggtcgtctcttgtatactccctgtatgcttttgggcctgtttttggggcttcttgctaatatatgcttctttgtgtgtttgccaatcaaaaaaaaaaaaaagttaagagtctatccaaccttctagcaaaggaagattctacagtggttctaactcgagtaaataagaaagagaggtttgtggaggtttgatgagtgactgagcaaaaattttgatatggctttagagatgggctgttccttatattagatttctcgggcaactaaccatagcaagacagggagctaatcaattattctcttttgtaggggatattctacctcgttgagttttgagtttgtagttctaagtacttttagttttgcatttttctcacttttaatcagagttatgtagttgttgtgtttgggggaaagatttctcatccttctttatatttatttatttcatgataataaaatgcttgtttttggtaaaataaaataaaaattaaagaaaatataatgtctagctctaggagcaaagatcttcatgcttttgaattatatggttagccttcatttaattccttcaggcaatttatatatttatgtatttttttttaatatatatccaggcaagataagagaaaagtttcctcttgaa

SEQ ID NO: 10312 - DNA, 7288 bp, Vitis vinifera
  Intron number 3 from transcript GSVIVT01025848001 (locus G SVIVG01025848001) derived from phytozome v7.0 (chr-ID chr8 ; pos 11231798 to 11239085 reverse strand)
ccattagtgatcttgctcttcatcctgaggattctgtaagtatctctggcttatccttttctgttttcttaaacttagtgctagatttgtctgattgctcatatcattttatcattactttggttctatcttggacctccttttgtcattctctaatctttattgcttttttattccttttttttttttcacttctatttatgctggagctttctttgaacacccagcatgtgccttataagccttgttcatttgagttcactataaatgatatatgcgtatttccagttatcaaattagataaggtgtaaaacattttatttgtagaccattttattcgtagacccttcagtaacttttgtaggattcatgtatcacaagcccactgttaagggagatacctatcaaaaaaaaaaaaaagagcctattgttaagggagatggtctccttgtgtttttcatgctagccacataaagttgattgggcattttgagttatgccatccaatagtgcttcatattgaagtattttaaaattattatttttttttttggggaattttataaggagattgtggtgttttgttgtcttgatagataacaatatcaaatcaatttaatattcttatattggcttgagaacatcttctctgaagaagacttactaaaatatcgaccctataaaatgttgctgaggggtgtaaaagtagaccaagtggaatttgatcctcttttattaaggcctaaaactatttttgagaatacaattttgataatttattactacaagaaattttagcaagttaagatttttttcttatgtgtatcttaactaacccttaaggcataaacaacttcaaccttaatttgaattaatataccttttttttgaaaaaaaaaaagaaaaatgtaaaaactatgtgatgcaaaagaattctagcctgtatactgattctaagttaatttgtgtttttaaagcatcatgtttcttgcatctgatctcaatgaaattttggaagatttaggaattttttagtttttatgtgttttaggtaaaatatagctatagcatggatgagtacaaggaaactggaaatattgcttgggtattcttgttcatggttgataaatgagaaaatttgtctctcttcctcgtcttggctgataatagctttacttcattttttgatgggtaaagtgagaacatatattatatatgcttgaaaaagagtgcatcaatgtgcacgtgacataaaaaagagaacaaaaaacaacctccctcccttagtttgaacgcaaccaatctacgacatctataatggtcattgatatgtcatttatgtacaccctaatccaatccaaaaaaatacacataaaagaggatttgattgccagatccaagtattctacatcttcaaatgatctcctatttccttccttccatagtgtccaaaacaaacatagaggagcggctctctaagctttcttcagttttttccttacaaaggaactatgtcaactcaatagagtttctctaattgagaagggcatcactcatgccactccaaatagagaaaaaaccagttaccacaagattctcgctttggagtagtaaagcatatgattacccgattcttcttcccttttacacatgtaacttctgttaggaatccttcatgccactccaattgagaagggcatcgctcatgccactccaaatagagaaaaaaccagttaccacaagattctcgctttggagcagtaaagcatatgattgaccgattcttcttcccttttacacatgtaacttctgttagaaatacttcatcccctccttctaagttggttaattgttaaaatcctttcccagacagctttccaggtaaagaatccactttctttagcacccatggatttcaaactatgcttgtgggaaagggcacacttcttccataaactaaggaagcatacaaagatttaatagaacattgtcactcttggtttcctctaacctaatctatcctccacttcccctcttattgtagttgcttatagtctctgaaagaaggcctccactttttccaattcctaatcatagagttgtctgtgaaagcagggacttcatttcccccctccccagtctactctcacaactaagctacctaagttatagaaaacaaagtcaggaagaattcttctaaattacgttttctacaccatctatctttccagaattttacccttttgccattacccacaatgaagtaagatcaacttctaaatacctcccacccaattctaatggccttccacaacaccaccccatagttctcttacattggcattaggggaaagcccaagtaaagaattgctagcacatcaaggagatgacacttgacatgagatgttacaaggcatttgacatgggatacatgatgggttgagatgcttgctagacacatggcacgagccaagcaaatctctacaaagatggagcaagtggcatgattaagagagtgagttgtttagcatggtacagtacaggtggcatgagcagcaacaagtaatgcaattattatgataagtggcatgggaacacttatgacttatggcaatagctgaagttaacagaggaaccatgacctagatctaggtgggattggtaggttgattcctaaaacgtgggtagtgcttagtgcatatatatagtttgccttgtcaaggcttctctgcatgaactctccaaggaatgttgtgggcatctcatgggggttgaaaagactggcttagagggtctttaagtgtcacacaacatgaaaattttggtgtaaattttgtgcttataacactaatccaatgcaacatcaatcccctaaatccaactcccaaaaattagaagagaatccacgcttatgtagttataagatttcttgatgtctagcttgcaacccttcacacttttgcctcctctctacaaaagcattttgcaattccaaaaacaaccttactaatcatttttctcattctttgagccaaaattttggggagtgatttgtaaataccacctaacaagtgaatgggcttgaaatctgtaagatccttagtccttgctctagaacaaccatagtttaactagcattcgtacttttctctaacctattagttctgcaaaaagctttgaccacctcaaaaagctattgtcaacaagcaatctagacctagtgcattttcatctgctaagcatttaagggtctcttccatagttgttgataacttatgatatatgatacgatacattttttatgaaaactgatacgtatcacaacctatatattattttaaagtgtatcttaagatacttgatataacaatacaacattacgtacatcaactatttctgggatgggggttggaccactagagaggtgagggagtcttatgggatgggcctttggaaagacattagaaagagttgggaggagttccttcttagaactagtattcgtattggaaatggtagacgcacaagattctggtgggacatttgggtaggagattcttagctgaaggatcttttccttttgctgttcagaattgcaacccataattctgctgtagtggctgatctttgggggagacaaggaggtggaggcgggggttgggaggtgcactttggaagatccttccaagattggtaattggaggaggtgacttgttttttggatcatatttctgcagtaaagattcaagaaggggaagattctttattttggaagatagagagaaggggaaagtttaatgttaaatcttattataggtctttaaaggatgagaataacccattatttccagccaaagaggtttggggttcgtatgccccttttagaactcgtttttttgcatgggaagcagtttggggtaaaatttctactgtagatatgttaatgaggaggggttggtctatggttaataggtgcagtctttgtaaagagaatgaggaattgacggaccacatcctaattcattgtggtaagacaaaggagctttggactttgttgctttcttcttttgtggtggtgtgggtgttcccggcttcagtgagaaatctgcttctagaatggaaagttaagggaatagggaagaaaaggagagcagtttggagattggcgcctatttgtcttttttggtgtatttggggagagcaaaaccgaagatcgttccaagaggaagagatgttagatacttgcttgaggaacctcttttttcggtctcttcttgagtggtctcaacaatttttggacttggactctctcttttttctgaattttttgggtgattggcttgttggttagctttttcctctctaggttttttctttcttttgttgccttgttttgtctttctttgtatactgcttgtgtatgtagggagcgccccctattttgacgtgttttattttttttttctctttgtctatcaaaaaaaaaacatacatcaactattttccataatttttaagaaaaattaaattcaatttttttttgttaatagaatttattatattaattgtttaaaatgtactaaaaaattaaaaattaattataaaaagaagaaatagataaaataatcttatatgaaaaactacattcttattagcaaatgttgtattagaagtcaagtaagtttatttttataatgaatattaaaaaattttcatttgaataatttgaatgataacattgaaaatgatggtgattagtggataaagttttttacttaatatatatatattttaaatttctttttcggtgggaaaggaattatgatgaacatgaaaaattggaaattgaaactttaaagatgacatataaagacatatatatatatatatatatatatatagatcaatcaacaacacatataagtgcttatgcctagttgcaattctaagctaaatatcatagctaaaaatttcatgaagtttatttgaacttttcaattctctaatattctatgtttcctacaatatgatttagtttaactttttagatccttctattttttttataaaattggttatatattattccggcatacttttaatatatattcacacatatacatatttttctatttattttttactatattaaaaaacttacgatacacgatatagagaaatgatatacgatacattttacgagttaacaactatggcctcttctacctccactccaccaaaatctctttcggaccaatttctttcaacaacattgatggaatttgtttatggaccattcagtccaggtctccaagacccagaatcagagtaaggatcctaaaatagcccaccacctgttccacccacattggaaaagtataaggtaaatcactgactcccataattgatgaacccagtaaatttgatatcagccttcttcaaaatccgtggccaatgcaatctgtctttggactctgaacagtgacaaatccccctcttgttgtccacagctttgaataaccccttacatccctttggggctggcccccatctattccaatcacctgaggagattcatttgtctagagagcagcttgccatgaaaaaatcgccttccccactcacaagttctcaaccccaccaggtgacagggaattaaacatggagagtaggttacctaatatttctccaccttcatgcctcctcccacttgcctcaagaattctctgaaaacaaaacaaaacaaagaaataaaatgagagagagagagagagagaggaggaggggagatttccttactttcttacaaagttttgctggttgtggtgagaaaaaaaaaaacatgtgagaaaaggaatgcaccctaattactcatgaattattgacatttcttcagagctatgttctttctcttaggctcctcgcttaggcaatcatgcagcacatgagttagcagaatgtgaagctagacatataatttcttttgtaggagattttatacctctgtgaagatcttttgaactagtgtacacttatccacctttttaacccatcaaggtgtggctcggtggcaagggtgagtgctgggatgtgtggtagagacacagtctcaggttcgattcctgccgttgggaatccctggattacctggagctagctgtggcaggggtggtcagactcctcggggttgggaaaccatgccaggtctgatgggcctggctatgatgtggtctcggttatcaaaaagaaaaacacttacccgccttttttatctttctttgtatggaggatttgtgtacttcttggaaggatctctcatccttctttgtacttaatattcaatgcaatgaaattgttgtttcttataaaaataaaaatgaaaacaaaaaacacatgaattatataaaggatggaaacctactctagcaagggtccattaagatacacaatcagcatcccaagaaaaaggatgaccaatgaaaatggactggagaaaggaatccttcaaaacttggatcagacacttgattcatccatgttactatttttatttttctctcttgcccaataacacatcactgaccaagccaggaagcacccacatccaaagagcaagaaatgcagatggcatgagctcattagatcacagtggagaagaatatggttagctgtttcggcattggtcttaacaaataacaccagttagttaacagctatccccttctcctcatttgatccattgtcaagatcttttcccaaactgccttccaagtaaataagttatggagccatagatccccacacttgcttagatgagaaaggactcgtcaacaattgatcccaacgaacaaaagaaaaatttaattctaacttgccctcctacacccctccacactaaaccatcctcgcaactcctagataacaccacttcctttgtgtccattttggatgtttcaaaaaatctggtgcttcatattgaatcatgaatgcatctgcaaagaaaaaaattaaatcatgaacgcagcaaattttttaatagctgggataataaggctcctaacaacttttacattttgtcttgtttttgtattgctcatttgctattcacttctatatttttcaatagttgcttattattacgttctgtacatattgttatcatttcaccagggatgctccacattatgtaatttattaagcatctgatgaacatgaggttaaatgaaaattattttgtttcctatgttcgtcttatccccatgttaaacagttgttttaccttgcagga

SEQ ID NO: 10313 - DNA, 4030 bp, Vitis vinifera
  Intron number 1 from transcript GSVIVT01016235001 (locus G SVIVG01016235001) derived from phytozome v7.0 (chr-ID chr1 3; pos 6123563 to 6127592 reverse strand)
gcccagcagcttgaagaatccgtggccattgtttggtatgtgtattgcatatggccattgacgggattttctgcttttgtttaatttgttgattgttggcatttgggttgcttgaattcggagcatttcggttttgggtgtttcaaaattttgaagtagatttagaatcctctccaatttgattgccgagttcatcacacgttggccatgtaccataggtggacttcactttcatgcagctccatttgtgtaagaggacactcactcaaagggtttaggctgtgtttgattctggaaaatttgagggaaaaagggagggaagggtagaagcagagaaaataaaaaatagatttaaaataaaatcaataaattatttttattaaattcttttttttcttcgatttaaagattaaataatttaatactgtagacatttttatttaattttaattatatatattttggtattttttaccatcaaactaaacataacaaaatcatattttttagctttttttttgttttttctttttgtttaattttctcagtactcttaggaaccaagcatagcctaatactgatgcttgctgcagcttgagttttcgagtcccaaggacggagcttatcgatagggacttggatacttgagctccaacaagtgttggatgagtcacctaaatccatactccatcaaatcatgctgtttcagagtacctgcaaagtaggctggatgcgtctggaatagagtttcaaacgagcagactgggaaaaacccgaaaaggaaggcatctagggcattagacaagttacctcaagatatttttgcccttaccctttgacggtattaactcaaccatagttgttgtctttgactttgggtacctcatctagccttaggctagatggttataactgctctctgtgttttgtcaaaggataatccgggagttctggaaggatctcattccgaagttaggttgtctcctaaaaaatttcataataacagtcttctgacctcaagatcaggtggcttaccttgtaactgaactaccagtaatggcttgtcccagcattggcttgggtgctcatgcatagttgaccactttatggcagttctgcaacagccttgtgttgcactaggatgagttatcccttcatgtcctattttaatacatgaacctgctagcaatttccttatatgctctgttgacaagtcccatggcatgcagactagcacatagtcacatgtgggttataccatcgccctactcctggtgtcagaagttccatggtcttggggccattggaatgatgacgtgtgtgcccgtggtctctgtggttccatcttattagtatggggtgggaggttggtgccctagcgtaggtgttaattccataggtggaggcctaagctttttgtttacccataagatggtggaagtcacctaggaactatgctaaagaaaggatttgattagggctaagaagattctatatggacttgatgcatcttggcattggactcgatctttctactattgagtacctagtgttgaggccttgcgtcccgatgatccacgtacctgccaggtggacgcacgctttcaaccaagatagatttctggttcagtcgtccctgcaaaagatgtccggacaaggtgtccggacaccctcttcgatggttttgtcagccatgtctagagagattaagcagttggccttttactaggtatagcaagcttaccttattccttgtgtgaaagttcctttatatagtgtcagaagctcgtccttcctctttaatgatgggaggactttttggctcgtcatgatgactccaaggtggtggcaggaccatcatcaccctgtgggcggctgtcagagatcttgggaggtgacttgccatcattcctgtcatttcactctgcaggcagtggatcgtgggaggtgacctgctaccactcctgtcctttcgctttacaggcggcggatcgtgggctgtggcagactgtcggaacgatgtagcaagacttgttcacttcagtcaatgatccggataagatatgttatcgtccggacgtgacattcgcgagtgacgtgtgcttctccctgagggagtccggataggggaacgcgccacatgtcctcttggggagtccagatggagttttatccggatagcaatgcgtgccacatgtccttctttggggagtccggatggagatacttcggatatcaaagcgcgccacgtgtcattagggggagaggtccctacacctagtacttaagggttgcggcttgatggttaaaaatggatgcttgctagaacaataatactctttaagtatgtgtcaagaccttcttgaccactttggaaaggggcgtcactaatgtacataagacacatgtcaatgccacaagagttaatgccttaataattactatctttgaaatttggatcccttattaaaaaagggcttgtgtttttataattctagagaaatgtagttaactaatcagtagaggctcaacaaaccttatgtgcaaattagttttcttatattagcttccctctactctttagtttgtagctcccatcaaaatattttaaatgaatgtaggatttaatcactaggagtggtaatgaattggctatgtttacaatatctaaaattactacttgatatatttttagtagaagtgatagattttaaatgaatgtgggatttgatcactaaaagcaatagaaaagtgatagcatggatatttcaatcattcatttttttctttttatacatagaaaatatattaaaagcacttgaaaagagtgaaatgtacataaatagtgcctaatagacaagcaaaaaagaagaaagaaaaccaaaaaacaacctccttacttcgaactcaaccaatttacaaagccaatacactctaacccaatccaaaaagatacacataaagaaagctttgattgctcgattccactgttctatatctttgaatggcatcctatttcttccttccagaatgtccaaaacaagcacagaggagccaccctcctagctttctttatcttcttccccacaaaagaaccatgttaactcagaagatttccatttacaaaggagtgcatcacccaagtcactccaaacaaagactatcataggattttcgccttagaaaagtgaaggagcaagtgattagccaactcttcatcccctttcatattctatatttatgatcattccttaatatttagccatacaaatatattcctttctttatgggtgttgacacaaagttctgccaaattcttgactccccatcatcccacatagacacaaacaaaaagagagcaaaaaaattatgaagttattgatcatgtttcaagtaaaaatctaatggtgtatatatggatgaaaggattaatgattcaacaggtgaggatacaaatgagttgaattgacaacaaacttccaccaagtgctatgatggatacatatgggagaaagatggtgttagtacagagatattactaaaaatctgctccattttatgattttcaacaatattagattttttatttttattttttgctgaaaatcatcataaaaatttcagtttgatttgcatagaattaattaattaaatggtaaaaatataaaatctttctagttttagtacatgtaatttactacacttatatatcagatccatcatgttctctattcttttcttcaagctgatcccttaacattctatatgaaacctgatgacctttagggatgaactcatgaccttaatttcacctcaattattttccttcatcctgggagtggttgtgattaaagtacagataaaatttcttcattcttttgatgtatgataaactgctttccatgatagcattaagtttatataattaaggaatacatgtaatttttaaagcttatatactttttcattttatcttaagagaagcttacatgaagttgggttcttaagtaaagttatttgggtttgtagg

SEQ ID NO: 10314 - DNA, 10418 bp, Vitis vinifera
  Intron number 4 from transcript GSVIVT01016158001 (locus G SVIVG01016158001) derived from phytozome v7.0 (chr-ID chr9 ; pos 20097900 to 20108317 reverse strand)
gcttttcaaattggctggggaacaagcaacaataggtattttactctctagaaattctctacttattatacaattatgtattatcttataatggtgagcaaagtgtcatttacttagaagtggattaggcgggcgtcttttttttttctgtatcatatttaatgcaacttttgcctgcatttttgagcattaattgagaatttatgagaatagttgaggggataataatatagaaagatggacatattgatgacaaagatgaatcttctcattaaaaatacttctacaaggaaaaaagaacgaagaataggaattaaacaaaatctgtgaaaaattagacttatttttggaaatgcttctaattgggactcacacctttattcctccggtatgaaaacttgctgtctatgagatggtgcagcaaccccctttttttgttctttaatgcaatgatatgtggcaagtttgaaaaaaaattaagttgattgaagtggaatatattgctttgttctcacgaacacatgtccccaaatttgtaatctctgttgatatttattcatgtcattttgtggtttggcttttgagttttgaaccatataatattatttaaaaaaaaaaatcctatatatagattggatttgaaaataatatccaatctaatgcatttcatacacatggatatccatgtgggtttttttttcccaagggatggaacaccgcagctcatagctacatttgtaatgtaaaaggaaaaccacagcccatggctgtgtttgtatgtaaaccaacttgtggctgtgtttttagtgcaaaatccgtgatttttgcttccgctaacaattattatcttctaccaacttccataattatctccaaatattttatccctataaataaaatttttaaataaaagataatatgaaaatttatattaaggtttgtctattattttttttttggtcaaaatatctttataaatgatatctatttcacaaaaaattataattacttggaaaacctttttttttcccaattttatctaagaaagattttataattattgttcaaccatcatttttatgatgttcttaagtaataaaaaaatgattgaatataaaataaaaaatgattggacgtttattaaaatatttatcacttaaaatccttattaaaataaaaaaaatttcaatatgtgttaagtctatatgtctaaaatagtgatgatttttgaccaaagtaaatacataaaagaagttttcagcctttgaatggacaacacgcaatcctcaaaagcaattgaatttctagccttccaaatgacccaaaacaaacataatggtccttgccacgccactttcctcttcttacccacaaaagagctcctccatcctaaaagggtttccttcatcgaaagaggaaaaacccaagaaactctaaaaaaagaaaggagcaacatccacacttcccttgttttttcacaatgaatgagaaggtggtcaattgactcctcacgcgtatggcacagaaagcatctatttgccaaagtctaacctctcttttgcaaacaatccaaggttagaactcttccccatgaagcctcccacacaaagaagcttaatttgggctgcacacgagttccaaataatcttcgaagggaaagaaacaagagacaccggctgcaaagccctatataaagattttaccgaaaaaaccccaccctttaagtccatccaccctaaccttcttcccctccaaacaacaaaacaacctttccacttcttccaactcccaattattgaaagtctattgaaacaaggattcccacttccccccctttccccctcagctctccaaaattcatttacccaagcctctttggaagatgctaaggcatataatgaaggaaaagccttgcacaaagggatggttccacaccacttgtctttccgaaacctcaccttcttaccatcacccaccacaaagccaaaagaaggggttaccagatgtcccatcttacttattgctttccacaacccaactccataggcctccctagtctcacaaaatctccaccctcctttttcctccctatatttccctttaatcacttggttccgaagggcctttctttcatttgcaaagcgccaaacccacttgccaagaagagctctatcgaaagacccaagactcttaactcccaactctccttttcttttgtctaaacacattattgaccatcttactaagtgcggtttttgcttaagagccccaccaccccacaggaaatccctttgaatctgctctaatctcattctaaccaccctaggcagttggaaaatagacataaaatagatcgacaaattggacaaggtacttcgcattaaggtaatcctctccccttttgaaatgtattggcatttccacatagccaatctctttcggaatctttcttctattccatcccaagctgcaacacatttaaaaggagcacccaacgacattcctaggtaggtggagggcaattttcccaccttataaccgaactcatcagccaactcttccacattctcaactctaccaatcagaatcaactcacttttctccagatttgctcttatccttgaaattacctcaaaccacattaacaaccagcacaagtacgtcaactactcctcctttgcctcacaaaaaattaacgtatcatcaacaaacaacaaatgagagacttggaccccttcacccctttttccccgaaccgaacaaggcaacaaaacccccccatcaacggctctctttagcaaacaactaaaagcctccatcacaactacaaataagtaaggcgacatggggtctccttgccttaacccccttgagctttggaaaaacccaataaggcttccattcaccataactgaaaacctaacagtggataaacactactttatccatttgcaccatctttccccaaaccccatcttctccaacaccactagaagaaacgaccaatctacatgatcatagactttcttaatgtctaatttgcaaagaatcgcccctctattgcttttcaaaatggaatctattgcttcattagcgaccaacactgcatccataatttgccgcccctccacaaaagcattttgagacgttgagatcaccttagctaatacacccttcattctattagccaacaccttagctaaccacttatacaaccctcccatcaagccaattggcctaaaatccttctagtcctctgccccccctttcttagaccttattagattttatagattgggtgtgtttgtgataagggagaaggtttttgttttttccttgttgtatgagcccttctgtaagggggtgagttcctttataatgtaattctgtgggtcgctattgtagcgcctctttgcaatacaatcttatacttattgataaaaaaaaaaaaaaatagtgatgattaaaaaataaattataaaacattttttagataagaaaaatttttctagtaattgtacatttttataaaatggatatgaattataaagatattttgaaataaactttaatattatcttttatctaaaattttttatttatgaggataaaatatttggagataattaggggaagtggtgaaagatattattttttaacggcccatggctgcatggctgtggttttcatttttcgaaaacaaaatctatctggatgtctgtgtgtataaaatgcactaaattggacattatttctaaaaccaatctatatatggattttttttttaaataatagtattttggttcgaaattctaatccttttggatatggtaatatatgtggttggttaaaagataagtttttttttttcaacaaacagaatgccaattaagagtgctagatagaaaaagaggctcacatgtacattaggagtatagaaagcacaccacaagacaacatggtgtaaagaaaaaaatacaacataccgaaatgccaactatttgatgatccaaataaataatgaaacccaaagaataagactcctccctaccatcccccctcacctaaaagaaaaaaaagttttgtggaattggttttttaatgctacttccaactgcccctcatcttcaaagttttgttcctctttttcccttcatatcgaaatatgcataaaggagtcatccttgcctagaaagttattgttttgggatcattgcccagatcaattgaactgcatgagatgggttttattatggttttaggcttctttaagattggaagttaatttgaaaaataaattaatcctagtaggaaaggtccctaatgtggagaagcttgttttggtgttggactttggggtggtgtagcttctaataacttatttaggtttgcctttgggagtcccttttaggccttcaattgtgtaggaagtggcaaaggagatgtttttaaatgcttaactatttggcgaaggcaatacctgttaaaaggtaggaggctcacttctagaaactactctttgcaacacacctatttatttcatgtccttttttattattcctaaggcgatgacacagagattggaacaaattcaatagaatttcctaaagggaggaggggcacttgagagaactcgatttagtgaagtgattcttgatttgcaaaaagataagaaaggaggtttagatattaaggagttcttcattcttaataaagccttattcggaaaataatgttggagatttgttacggagaaagacgttctttggagaaaggtcataataggacagtttagggaagagctaggaggatggtgcccttaagttgggacggaggaatatgatgttggcatgtggagggtgataagaagaggatgaggaacttgcaaggccaaaataagatttgtggtacacattgggagaagaatcaagctttggcaagatgtttggtatgataattctccttttaaggactcttttccttctctttcctcttttatagcttttaaggaggcttgagtggttgatgctttggtggtagagggtgggtgggttatttgctacccatgtttgcttagacatttccaaaattaggaggtgaggatagtggggtttggatgattttaaatttgttttatccatagagtagttagagattagttcaaattaatctcttagtttttaggatgtttctggtttcctaaaataaagggcttagataatacctgagtttataaattagtttgtaattcagttcaataatatatcggaccagtgtttcttcctattgcttggaaacatggtatcagagtaggctgtgtagttgaagaaaataccatggtaaaactgccatgacatggacgagcaagggcgacgactcaaaagtgtcttcagaaccttcttagttgacctctacattgttcccactattgttgatcactcatcctttcaaataactactcacaagcttaatgacaaaaaattccttcaatggttgagggctgcttagatggttatttgtgaacgcaggaagattggatatctccatggcacaataaagaagccaaaggagattggtcctacgcttcatgcttgggacgctagttactcaatcgttatggcctggcttctgaactcgatggaagaaaacattggcgaaaattacatgtattactcaactgcaaaagagctttgggaagctatgaatcgtgttttttcagaccttgaaaactcaactcaaatgttcgaactaagaaacaaagtttgaaatttgagacaaggtgatatggatgtaatacaatacttcaatattttcaacaaattgtggcaagaaatagatatgtttgatgattgtgtgttgagttctgccgaggatggtgaaagatacaagaaaatggtggataaagaacaaatatttgatttccttgctggacttaacaaggagttggatgaggtttggggacgagtgcttggaacaaaactactatcctcaattgatgagatttttgcagaagtgaggagagaagagtgtcgtaagcgtgtcatgctcgaagaacaaaaaccactgcccacgttagacaacttagtcctagctgttcatggctcaaactcggcaaacaaaggagattctcatagcaatcagagaggaaatcgactatggtgcggtcactgtcaatgtcccatcatacccgcgacacttgttggaaaaatacatggaaaaccagcaaattggaagaagaaagtcaacaaatctgatccgaaaggttatcatactacagcagaaccaggccctaagccaaacgatagcaaagttagtgtttcccttactaaggaacaaatggaacaactctacaaattgttgacaccaacatcattaccaaataatttgagtacttcaccattagctcaaaaaggtacattttcatttgctttgaatggtgttacacaaagggaagaatcatggattatcaattcgggtgcaacaaataacatgacaaggtgttcaaatttgttttcaacttatacatcaagtctaggaaattttaaggttaaaattgcagatggttccttaacaattagatgtaaagaatgccttccttaacggtgatctagaagaagaggtatatatggaattaccactaggttttgatgtggcatggaaagatgggatggtgtgtaaattgaaaaaatctctttatgggttgaagcaatcaccaagggcttgcttcatttactaagacaatcaaacaaatggggtacaaacaagctcaaacggaccatagcttgttttaaaaacacaaagttggtaagatcacaattgtcattgtttatgttgacgatattatccttacaagagatgacaaacgggggatggaagatttagaggagaaattggcagggaatttgagataaaagaccttggatcaatgaggtactttctcggcatggaagtggctagaaatcagaaaggtatatctgtttctcaaagaaagtataccttggatcttttaaaggaaattggaatgatggggtgcaaaccggttgatactccaatggatccgaatttgaaattgacaaaattccaaaacaacagccctgtagataaaggaaggtaccaacgtttagtggggaggctcatttatctctcacactagacttgatattgcgtttgcagttagcgtggaaagccaattcatgcatacaccatacgaggaacatatggaggttgtgtaccaaattctataatatctcaaatggacggttggaaaaggtctatactttgcgaaaaatgaagcaagaacagtagaagcttatacggatgttgattgggcaggttcggtggatgacaaatgatcaacttttggatattgtacctttgtatgaggaaacttggtaacttggaggagcaaaaaacaaaatgtcgtggctagaagtagtgtggaaattgagtttcgagttgttgctcaaggcatatgcaagctactttggttaaaatttctgttgtaagagttaaaagtcacatcacattagccaatgaagatctactgcgataataaagttgccataaacatatctcataaccaagttcatcacaaccgaacaaagcacgttgaagtagaccatcatttcatcaaagagaaactggaagaaggaaccatctgcatgacctgcattccatccacatagcaagcaacaaatctgctaacaaaggcccttgcaagaccaacatttgagaagttacgagacaagctgggactactcaatatttttgtcctagcttgagggggagtgtgaggagattttttttttccagataattgagattatctaaattagttgaagaggtttgaattaattcaaactatccaaacagctttggatatttgagttaatttgaattattttaaatttgttttatccatagagtagttagagattaattcaaattaatctcgtagtttttaagatgtttttggtttcctaaaataaaggacttggataattcgcaagtccataaattagtttgtaattcaattcaataatagattagagcagtgtttgagtttttcttcctattgcctggaaacaacaagttgatccaagtcccttgtgttctttgtttgaatgggcttactattgcaaagattaattttgtcatgaaaccaattcaagcttgttaagctagaaattggcctaaaagcttacactattagatggtgaatcaataatacatattaagcttatttaattaattaaggttaaagccctagctccctgttgcataggtaaacttcttcatggacttctttttaggcttaacaaattgggaaaataaacatgcggtaaggtttgaattcatggcctcttgacaactaaggctttgataccatatttagcaatcaattaacttaaaagctttagctcttaggttaaaaccctaacaaaaccgaaagaggcaccaccttaggtagagcaattgcatactgatggccttgcataaaagtagagtatcatcagcaaagaggagatgggagatccctattccctgcacctttgcccccttttctttccaccttaaatcttctattgaaaccaccctctttattatgaatcaaacaacctaacatcttaatgacttggataatttgatgaggggagcactacacctgaccttaaacctcccgaactttggaggaaaccgatagcgatcccattggctaatgatgaaaaacttcccacagaaatgcaaaatttgatccttcctattcattgttgaagctattaatatattttatctttacataatacaaaaaataatgcccatgtgtaacaatacatattggaaatctataaaatgtctagaagttcaaaatccttgtctaaggtcaaggcctttgctagttagtggtgcacaaaaaggtaaacattaatgacatgctacagttgagaagactttacaaattccttagtcttgattggtgcatctttttcatggggagtagggaattgatcgaccatctctttctacattgcccgttaacattggggctttggcataagatatttagtatagctaggatggattcacctaggattaggttttgctgggatggattggcataagatattcaattttttttttttttttttgtaaaaactgaaaataaagaatctgatcgaaaaaagaaaaaagaaaataaaaataaagatttagaagttcaaaactacaaaattaaagcaacaaaaagcaattggtcaattgttagtggaattcaaaagccccatctaagatcaaggcctttgcttggttagtgacatacaagaaagtaaatgctaatgaaatgctacaatagataagtatgaattccttagtcttgattggcactcttttgcatggggagtggagaattgattgatcatctctttccacattgcctattaacattagggtttggcatatgatattcagtctagctgggagggattaggttccaccaaggagtatgtatgacatggggaccatctcatataaaggtttggggagtttcatgagagacaagacccttaggcaaatcacttgtctcattgtgcctgaattatgtggtgtatgatctttgaggaaaagtggagaatgatagagatgttgtgggatttgcttcacttccactcagtatttttggcctcttgtaccgatgtctttaaagacattccactcaatgttatttaactattttgacattcggtttgtaaatcaaatggattggacaaaatgagaggaaccaagtctggaattgaaaagatgtcatctatgtatatccttaagtggactaaaccattgtgtatagttctccttgtttagtagaggaaattagccatattttgttcagtttcttgtcgtttgtgggaaggatcccttatccttctcatttatttatttatttattttttataattaatatatcttttgtttctaataaaaaaaagaaaaagaaattggacaattataaggatgcaagcaatgtgctttgttgacctttttttttttttaagaaaaaggaaagagaaaaatggtatgcttctgtgtgtgatggtctcatgaaatatttttgtgctgtgtgtattttcaattaaaattggctctttaagtgcattctatcaaaattctataatttctaatcaatatgaaggttatatatgtatttttctcattccatagtggtttaggtaattgccttgcttaaattattatgttatattgttaggcactatggaaagctttataacattttttcatatagatttctgcatgaatagtggctgtatattgttgtttatgttctatagactgctcattcttatggtgatttatgtttgattggtctagtgttgggtactacagtatcaccaccaagtccagtt

SEQ ID NO: 10315 - DNA, 3668 bp, Vitis vinifera
  Intron number 5 from transcript GSVIVT01031026001 (locus G SVIVG01031026001) derived from phytozome v7.0 (chr-ID chr1 4; pos 21108180 to 21111847 reverse strand)
gagcattactccaaagtaaaaggtgtgttaacggctaacctggtatatacttttataatgggatcattttgttagagctcttggatagtggaatagtgttggcaaggaggttctagattaaagtttcaacaggggaaaaaacatcatctattaaaagaatgaggcggaattattgcttttagacaggaaaagcccctgcataacaagttttcaattttcatgtttgctcaatgggctagcttttattttggtctttgtcttttggttttggggcagcctgatttttaatgaagataagaagttggaatatccgtggattgggatcaaaaaataaaagaagggtaataaaaactttcctttgtaatggaggagttggatgtgattatgcttcaagagactaaaatggagaagtgtgataaaatccttgtaagtagtttgtggatggccagaaacagggaatgggcagagtaatcagtctgtggggcctttggaggtgttttgattatttgggactcaagtaatcagtcacaagagttttttcctagtctgtcaaactctcttctaattctggagaagattttaggctttcttctgtatatggcctggccgttttatctcttagaatggagttttggtaagagctctcagctccctttggacaaactttaaaacaaatttctggtttaggaatgccacagaataaaatataaattctaatatagtgccatactgactaggaagaggttttgaaacattcaagttgtatttaagattttttgtagcattcctataaaaaaagtctcagaatcctataataactaaatgttaaatgacattagtgtgctcgagcggtaaggggttggggcagaaatgatgttagttctagtttaggtttcatgtgatacaccccaaaaaaagaaaaaacacatccattttcattaagactagcaaacatccatagttaacccacttgtcaccaaacatgatttggtggtgttcttgtaagtgtggtctgtctagttggcgaatctttaaatgaaaaaaaaaaatgatggtatgatttatatatgggatagaaaattttgctaatcttgctttgcaccatttttctaaaattaaaaagttgcaaaaagatatgggcatattatacttacatttagaaaagaacaataaatcttgctttttctagctttcccctatctttaaagccttggttagactacataactctgccgtgatggtctcacttattgagctctcctcatcgcccaattggtttcttggccaatacaggacatcaagctgcacaaacatccctagggcctctaaaagaaggcaaagtcacaaaggaggagaagaagatacttttaaaataaaacattaaggatatttttgttttatgtgagttagagcaatgactttgtaatttcatattatattctattaatatataaagatagagccatccaaatttaggtgatcacatttgtttactctcgttcttttcttatcttctttagttttttctcttttctaacatggtattgtacctttgttatcaggaggtaatgaatttgaaccttactgtatatttattttccctaatttaatgagcttacatgtgagcccaaaaagaaggctgcttatgaggcaggattagtgttaaagcatgtacattattggcctaccattacctaacagcttaagtttttttgtcaaattagtaacttaatatggtatattactttgaaactttttctccccttaattctattcgtagttcaatatctttggttctgactttgggatgaaagtatatcaattggatgtgaaactgtcttctcatatggagaatcaaagatctgaatggggaagcatatctggagcaaccgcctgagtttgttgcctagaaagagtttagtgtcacggtttgcaagctgcaaaaggccatctgtaacttaaaattgtttccctaggcctgatttgatcagttaagctatgtactcatatcttttacatttcagagatgtcattagatcactgtatctttttactaaggaaagaaactggtattgtagttcttgtgttgtatgtggatgacattctagtttcaggaagtgacactacagatggtcagcaggtaaaaacttacctgaaggaaaattttccaaattgaagaacttggagtattgcagtattttttcatgattgaagttgcccattgaaaagattatatggttttaccttaatgaaatatatgcatgatttactcattgtaactggtatgttaggctctaaacctatggaaactcctatggaactgaatgtcaaacttgaaggtgaaggtagtcctgattttcttgttaaaaagaggtatagaagccttcttggaaaactaatttatttgatagttacaagtgatatcactttctctgtgagtgctataagccaattcatggaagctcctaattagattcattgggaggttgtgagcggaatcttgagatatttaactggtacaatggttttaggtgcttcattaaaaaaaaaaaagaactaatcctaaatcagacattattagcttttcacatgctgattgggcagaccttgacattgatggaagatccattagtggatgtcgtatgtttgttggtggaaacttggttacatggaggtgtgagaaacaaaatgtggaggtaagatttaatgctgaagcagagcatagagctatgcattcaacctatgaagtcatgtggatcaagaatcttatggaggagcttggtttctcacttgagaatcccatggcaatgtaatttaataatcaaactgctatccatatagctagtaatccaatttttcatgagagaaccaattattgaagtatttagccattttattaagttgttatgggtgagaagatggtgaccacaattgtcaagtcagaagatcaagttgtacatatattcattaaagcaagatcaagttggacatatattcattaaagccttgggaaaaaaatgttgtctccaatgtgttctctaagctagggtttagaaatatctttacccccaacttggtggaagggtgttaagctataatattcagggtttataagtcttattcagttagagcagtaactttgtaattttatgtcatttcttcttcttctgcttcttattatgtaaatagaaagccatctagctgtaggcaatggcctcatgttcgtttattctcattcttttcttctcttcagttttttctctttcccaacagacacaattatatcccaatgtctaaggaacagaataattctagtatctttaaatttgtactaacaagaagtggctatctgaatcatatccttggtgaaaaaatgactcaattaaatggcatgttctgaagctttttgtcctttgtgtaatccccaatgagaagagggaaaaaatgaaaatgaaatgaaaactaaaggagtttccatgtaaactataactagatgatttgtgtacatactattttgtggtgtacagttgacaatacatacgtgattctcaatttagaggattacaatcaaaatgatcttgacacaatattgttttgtgcttaatgcttgtatttgtttgctttggatggcagcgaacccagagttccgtactcttcctagcttcctg
